United States Patent Application Publication US 2010/0120627 A1 - sequence listing, part 2

SEQ ID NO: 1568 - DNA, 880 bp, Homo sapiens
tgaaaatctactctatcagctgctgtggttgccaccattctcaggaccctcgccatgaaagcccttatgctgctcaccctgtctgttctgctctgctgggtctcagctgacattcgctgtcactcctgctacaaggtccctgtgctgggctgtgtggaccggcagtcctgccgcctggagccaggacagcaatgcctgacaacacatgcataccttggtaagatgtgggttttctccaatctgcgctgtggcacaccagaagagccctgtcaggaggccttcaaccaaaccaaccgtaagctgggtctgacatataacaccacctgctgcaacaaggacaactgcaacagcgcaggaccccggcccactccagccctgggccttgtcttccttacctccttggctggccttggcctctggctgctgcactgagactcattccattggctgcccctcctcccacctgccttggcctgagcctctctccctgtgtctctgtatcccctggctttacagaatcgtctctccctagctcccatttctttaattaaacactgttccgagtggtctcctcatccgtccttcccacctcacacccttcactctcctttttctgggtcccttcccacttccttccaggacctccattggctcctagaagggctccccactttgcttcctatactctgctgtcccctacttgaggagggattgggatctgggcctgaaatggggcttctgtgttgtccccagtgaaggctcccacaaggacctgatgacctcactgtacagagctgactccccaaatccaggctcccatatgtaccccatcccccatactcacctctttccattttgagtaataaatgtctgagtctga

SEQ ID NO: 1569 - protein, 125 aa, Homo sapiens
MKALMLLTLSVLLCWVSADIRCHSCYKVPVLGCVDRQSCRLEPGQQCLTTHAYLGKMWVFSNLRCGTPEEPCQEAFNQTNRKLGLTYNTTCCNKDNCNSAGPRPTPALGLVFLTSLAGLGLWLLH

SEQ ID NO: 1570 - DNA, 745 bp, Homo sapiens
atggctgtgtttctgcagctgctaccgctgctgctctcgagggcccaagggaaccctggggcttctctggacggccgccctggggaccgggtgaatctctcctgcggaggagtctctcatcccatccgctgggtctgggcacccagcttcccggcctgcaagggcctgtccaaaggacgccgaccgatcctgtgggcctcttcgagcgggacccccaccgtgcctcccctccagcctttcgtcggccgcctacgctccctggactctggtatccggcggctggagctcctcttgagcgcgggagactcgggcacttttttctgcaagggccgccacgaggacgagagccgtacagtgcttcacgtgctgggggacaggacctattgcaaggcccccgggcctacccatgggtccgtgtatccccagctcctgatcccgctgctgggcgctgggttggtgctcggactgggagctttgggcctggtctggtggctgcacaggcgcctgcccccgcaaccgattcgaccactccctagatttgctctgtcccccccacatagctccacttgtgaaaaccgagccccagaggccagtaaaggaggaagagcccaagattccaggggacctggaccaggaaccgagcctgctctatgcggatctggaccatctagccctcagcaggccccgccggctgtccacagcggaccctgctgatgcctccaccatctatgcagttgtagtttga

SEQ ID NO: 1571 - protein, 237 aa, Homo sapiens
MAVFLQLLPLLLSRAQGNPGASLDGRPGDRVNLSCGGVSHPIRWVWAPSFPACKGLSKGRRPILWASSSGTPTVPPLQPFVGRLRSLDSGIRRLELLLSAGDSGTFFCKGRHEDESRTVLHVLGDRTYCKAPGPTHGSVYPQLLIPLLGAGLVLGLGALGLVWWLHRRLPPQPIRPLPRFALSPPHSSTCENRAPEASKGGRAQDSRGPGPGTEPALCGSGPSSPQQAPPAVHSGPC

SEQ ID NO: 1572 - DNA, 726 bp, Homo sapiens
atggctgtgtttctgcagctgctaccgctgctgctctcgagggcccaagggaaccctggggcttctctggacggccgccctggggaccgggtgaatctctcctgcggaggagtctctcatcccatccgctgggtctgggcacccagcttcccggcctgcaagggcctgtccaaaggacgccgaccgatcctgtgggcctcttcgagcgggacccccaccgtgcctcccctccagcctttcgtcggccgcctacgctccctggactctggtatccggcggctggagctcctcttgagcgcgggagactcgggcacttttttctgcaagggccgccacgaggacgagagccgtacagtgcttcacgtgctgggggacaggacctattgcaaggcccccgggcctacccatgggtccgtgtatccccagctcctgatcccgctgctgggcgctgggttggtgctcggactgggagctttgggcctggtctggtggctgcacaggcgcctgcccccgcaaccgattcgaccactccctagatttgctccacttgtgaaaaccgagccccagaggccagtaaaggaggaagagcccaagattccaggggacctggaccaggaaccgagcctgctctatgcggatctggaccatctagccctcagcaggccccgccggctgtccacagcggaccctgctgatgcctccaccatctatgcagttgtagtttga

SEQ ID NO: 1573 - protein, 241 aa, Homo sapiens
MAVFLQLLPLLLSRAQGNPGASLDGRPGDRVNLSCGGVSHPIRWVWAPSFPACKGLSKGRRPILWASSSGTPTVPPLQPFVGRLRSLDSGIRRLELLLSAGDSGTFFCKGRHEDESRTVLHVLGDRTYCKAPGPTHGSVYPQLLIPLLGAGLVLGLGALGLVWWLHRRLPPQPIRPLPRFAPLVKTEPQRPVKEEEPKIPGDLDQEPSLLYADLDHLALSRPRRLSTADPADASTIYAVVV

SEQ ID NO: 1574 - DNA, 654 bp, Homo sapiens
atggctgtgtttctgcagctgctaccgctgctgctctcgagggcccaagggaaccctggggcttctctggacggccgccctggggaccgggtgaatctctcctgcggaggagtctctcatcccatccgctgggtctgggcacccagcttcccggcctgcaagggcctgtccaaaggacgccgaccgatcctgtgggcctcttcgagcgggacccccaccgtgcctcccctccagcctttcgtcggccgcctacgctccctggactctggtatccggcggctggagctcctcttgagcgcgggagactcgggcacttttttctgcaagggccgccacgaggacgagagccgtacagtgcttcacgtgctgggggacaggacctattgcaaggcccccgggcctacccatggcgcctgcccccgcaaccgattcgaccactccctagatttgctctgtcccccccacatagctccacttgtgaaaaccgagccccagaggccagtaaaggaggaagagcccaagattccaggggacctggaccaggaaccgagcctgctctatgcggatctggaccatctagccctcagcaggccccgccggctgtccacagcggaccctgctgatgcctccaccatctatgcagttgtagtttga

SEQ ID NO: 1575 - protein, 217 aa, Homo sapiens
MAVFLQLLPLLLSRAQGNPGASLDGRPGDRVNLSCGGVSHPIRWVWAPSFPACKGLSKGRRPILWASSSGTPTVPPLQPFVGRLRSLDSGIRRLELLLSAGDSGTFFCKGRHEDESRTVLHVLGDRTYCKAPGPTHGACPRNRFDHSLDLLCPPHIAPLVKTEPQRPVKEEEPKIPGDLDQEPSLLYADLDHLALSRPRRLSTADPADASTIYAVVV

SEQ ID NO: 1576 - DNA, 613 bp, Homo sapiens
atggctgtgtttctgcagctgctaccgctgctgctctcgagggcccaagggaaccctggggcttctctggacggccgccctggggaccgggtgaatctctcctgcggaggagtctctcatcccatccgctgggtctgggcacccagcttcccggcctgcaagggcctgtccaaaggacgccgaccgatcctgtgggcctcttcgagcgggacccccaccgtgcctcccctccagcctttcgtcggccgcctacgctccctggactctggtatccggcggctggagctcctcttgagcgcgggagactcgggcacttttttctgcaagggccgccacgaggacgagagccgtacagtgcttcacgtgctgggggacaggacctattgcaaggcccccgggcctacccatgctctgtcccccccacatagctccacttgtgaaaaccgagccccagaggccagtaaaggaggaagagcccaagattccaggggacctggaccaggaaccgagcctgctctatgcggatctggaccatctagccctcagcaggccccgccggctgtccacagcggaccctgctgatgcctccaccatctatgcagttgtagtttga

SEQ ID NO: 1577 - protein, 193 aa, Homo sapiens
MAVFLQLLPLLLSRAQGNPGASLDGRPGDRVNLSCGGVSHPIRWVWAPSFPACKGLSKGRRPILWASSSGTPTVPPLQPFVGRLRSLDSGIRRLELLLSAGDSGTFFCKGRHEDESRTVLHVLGDRTYCKAPGPTHALSPPHSSTCENRAPEASKGGRAQDSRGPGPGTEPALCGSGPSSPQQAPPAVHSGPC

SEQ ID NO: 1578 - DNA, 594 bp, Homo sapiens
atggctgtgtttctgcagctgctaccgctgctgctctcgagggcccaagggaaccctggggcttctctggacggccgccctggggaccgggtgaatctctcctgcggaggagtctctcatcccatccgctgggtctgggcacccagcttcccggcctgcaagggcctgtccaaaggacgccgaccgatcctgtgggcctcttcgagcgggacccccaccgtgcctcccctccagcctttcgtcggccgcctacgctccctggactctggtatccggcggctggagctcctcttgagcgcgggagactcgggcacttttttctgcaagggccgccacgaggacgagagccgtacagtgcttcacgtgctgggggacaggacctattgcaaggcccccgggcctacccatgctccacttgtgaaaaccgagccccagaggccagtaaaggaggaagagcccaagattccaggggacctggaccaggaaccgagcctgctctatgcggatctggaccatctagccctcagcaggccccgccggctgtccacagcggaccctgctgatgcctccaccatctatgcagttgtagtttga

SEQ ID NO: 1579 - protein, 197 aa, Homo sapiens
MAVFLQLLPLLLSRAQGNPGASLDGRPGDRVNLSCGGVSHPIRWVWAPSFPACKGLSKGRRPILWASSSGTPTVPPLQPFVGRLRSLDSGIRRLELLLSAGDSGTFFCKGRHEDESRTVLHVLGDRTYCKAPGPTHAPLVKTEPQRPVKEEEPKIPGDLDQEPSLLYADLDHLALSRPRRLSTADPADASTIYAVVV

SEQ ID NO: 1580 - DNA, 863 bp, Homo sapiens
atggctgtgtttctgcagctgctaccgctgctgctctcgagggcccaagggaaccctggggcttctctggacggccgccctggggaccgggtgaatctctcctgcggaggagtctctcatcccatccgctgggtctgggcacccagcttcccggcctgcaagggcctgtccaaaggacgccgaccgatcctgtgggcctcttcgagcgggacccccaccgtgcctcccctccagcctttcgtcggccgcctacgctccctggactctggtatccggcggctggagctcctcttgagcgcgggagactcgggcacttttttctgcaagggccgccacgaggacgagagccgtacagtgcttcacgtgctgggggacaggacctattgcaaggcccccgggcctacccatgggtccgtgtatccccagctcctgatcccgctgctgggcgctgggttggtgctcggactgggagctttgggcctggtctggtggctgcacaggcgcctgcccccgcaaccgattcgaccactccctagatttggtgagactaattccaccccattttctttctcctacatgcccactccccacccctcaattcctgagtctgagcccttgctgggagcagacacgttggtcaccttctctccatccttcagctctgtcccccccacatagctccacttgtgaaaaccgagccccagaggccagtaaaggaggaagagcccaagattccaggggacctggaccaggaaccgagcctgctctatgcggatctggaccatctagccctcagcaggccccgccggctgtccacagcggaccctgctgatgcctccaccatctatgcagttgtagtttga

SEQ ID NO: 1581 - protein, 225 aa, Homo sapiens
MAVFLQLLPLLLSRAQGNPGASLDGRPGDRVNLSCGGVSHPIRWVWAPSFPACKGLSKGRRPILWASSSGTPTVPPLQPFVGRLRSLDSGIRRLELLLSAGDSGTFFCKGRHEDESRTVLHVLGDRTYCKAPGPTHGSVYPQLLIPLLGAGLVLGLGALGLVWWLHRRLPPQPIRPLPRFGETNSTPFSFSYMPTPHPSIPESEPLLGADTLVTFSPSFSSVPPT

SEQ ID NO: 1582 - DNA, 870 bp, Homo sapiens
atggctgtgtttctgcagctgctaccgctgctgctctcgagggcccaagggaaccctggggcttctctggacggccgccctggggaccgggtgaatctctcctgcggaggagtctctcatcccatccgctgggtctgggcacccagcttcccggcctgcaagggcctgtccaaaggacgccgaccgatcctgtgggcctcttcgagcgggacccccaccgtgcctcccctccagcctttcgtcggccgcctacgctccctggactctggtatccggcggctggagctcctcttgagcgcgggagactcgggcacttttttctgcaagggccgccacgaggacgagagccgtacagtgcttcacgtgctgggggacaggacctattgcaaggcccccgggcctacccatgggtccgtgtatccccagctcctgatcccgctgctgggcgctgggttggtgctcggactgggagctttgggcctggtctggtggctgcacaggcgcctgcccccgcaaccgattcgaccactccctagatttgctctgtcccccccacatagctccacttgtgaaaaccgagccccagaggccagtaaaggaggaagagcccaagattccaggggacctggaccaggaaccggtaagggcatggggatgggaaggggatagccagaatctctgaggaaaatggaccaaaaaaaaaaaggcctgaaccccaaggaagactgtggagaccatcttgtcttcctccccttcctcctccagagcctgctctatgcggatctggaccatctagccctcagcaggccccgccggctgtccacagcggaccctgctgatgcctccaccatctatgcagttgtagtttga

SEQ ID NO: 1583 - protein, 222 aa, Homo sapiens
MAVFLQLLPLLLSRAQGNPGASLDGRPGDRVNLSCGGVSHPIRWVWAPSFPACKGLSKGRRPILWASSSGTPTVPPLQPFVGRLRSLDSGIRRLELLLSAGDSGTFFCKGRHEDESRTVLHVLGDRTYCKAPGPTHGSVYPQLLIPLLGAGLVLGLGALGLVWWLHRRLPPQPIRPLPRFALSPPHSSTCENRAPEASKGGRAQDSRGPGPGTGKGMGMGRG

SEQ ID NO: 1584 - DNA, 1351 bp, Homo sapiens
ccgcttagacaatgccccggagccgccagaccgtcgcgcccctgccccatcgtagtatatgagctcgcctacacaaggacccccgctaaaagccagagctcccagtccccgaggcttgaagacggggactcccttctccaccaactctgtcctcggggggtggggccccagccgagatcacagcgcgacaggagtgggggtggccgctggagacaggtgaagaaacaagaaaactaagaaatccgagcggttggagggggagtctgtgtggatgggatggggacgccgggggaggggctgggccgctgctcccatgccctgatccggggagtcccagagagcctggcgtcgggggaaggtgcgggggctggccttcccgctctggatctggccaaagctcaaagggagcacggggtgctgggaggtaaactgaggcaacgactggggctacagctgctagaactgccacctgaggagtcattgccgctgggaccgctgcttggcgacacggccgtgatccaaggggacacggccctaatcacgcggccctggagccccgctcgtaggccagaggtcgatggagtccgcaaagccctgcaagacctggggctccgaattgtggaaataggagacgagaacgcgacgctggatggcactgacgttctcttcaccggccgggagtttttcgtaggcctctccaaatggaccaatcaccgaggagctgagatcgtggcggacacgttccgggacttcgccgtctccactgtgccagtctcgggtccctcccacctgcgcggtctctgcggcatggggggacctcgcactgttgtggcaggcagcagcgacgctgcccaaaaggctgtccgggcaatggcagtgctgacagatcacccatatgcctccctgaccctcccagatgacgcagctgctgactgcctctttcttcgtcctgggttgcctggtgtgccccctttcctcctgcaccgtggaggtggggatctgcccaacagccaggaggcactgcagaagctctctgatgtcaccctggtacctgtgtcctgctcagaactggagaaggctggcgccgggctcagctccctctgcttggtgctcagcacacgcccccacagctgagggcctggccttggggtactgctggccaggggtaggatagtataggaagtagaaggggaaggagggttagatagagaatgctgaataggcagtagttgggagagagcctcaatattgggggaggggagagtgtagggaaaaggatccactgggtgaatcctccctctcagaaccaataaaatagaattgaccttttaaaaaaaaaaaaaaaaaaaaa

SEQ ID NO: 1585 - protein, 285 aa, Homo sapiens
MGTPGEGLGRCSHALIRGVPESLASGEGAGAGLPALDLAKAQREHGVLGGKLRQRLGLQLLELPPEESLPLGPLLGDTAVIQGDTALITRPWSPARRPEVDGVRKALQDLGLRIVEIGDENATLDGTDVLFTGREFFVGLSKWTNHRGAEIVADTFRDFAVSTVPVSGPSHLRGLCGMGGPRTVVAGSSDAAQKAVRAMAVLTDHPYASLTLPDDAAADCLFLRPGLPGVPPFLLHRGGGDLPNSQEALQKLSDVTLVPVSCSELEKAGAGLSSLCLVLSTRPHS

SEQ ID NO: 1586 - DNA, 1265 bp, Homo sapiens
gttcagggcggggccggtcggtgagtcagcggctctctgatccagcccgggagaggaccgagctggaggagctgggtgtggggtgcgttgggctggtggggaggcctagtttgggtgcaagtaggtctgattgagcttgtgttgtgctgaagggacagccctgggtctaggggagagagtccctgagtgtgagacccgccttccccggtcccagcccctcccagttcccccagggacggccacttcctggtccccgacgcaaccatggctgaagaacaaccgcaggtcgaattgttcgtgaaggctggcagtgatggggccaagattgggaactgcccattctcccagagactgttcatggtactgtggctcaagggagtcaccttcaatgttaccaccgttgacaccaaaaggcggaccgagacagtgcagaagctgtgcccaggggggcagctcccattcctgctgtatggcactgaagtgcacacagacaccaacaagattgaggaatttctggaggcagtgctgtgccctcccaggtaccccaagctggcagctctgaaccctgagtccaacacagctgggctggacatatttgccaaattttctgcctacatcaagaattcaaacccagcactcaatgacaatctggagaagggactcctgaaagccctgaaggttttagacaattacttaacatcccccctcccagaagaagtggatgaaaccagtgctgaagatgaaggtgtctctcagaggaagtttttggatggcaacgagctcaccctggctgactgcaacctgttgccaaagttacacatagtacaggtggtgtgtaagaagtaccggggattcaccatccccgaggccttccggggagtgcatcggtacttgagcaatgcctacgcccgggaagaattcgcttccacctgtccagatgatgaggagatcgagctcgcctatgagcaagtggcaaaggccctcaaataagcccctcctgggactccctcaaccccctccattttctccacaaaggccctggtggtttccacattgctacccaatggacacactccaaaatggccagtgggcagggaatcctggagcacttgttccgggatggtgtggtggaagaggggatgagggaaagaaatggggggcctgggtcagatttttattgtggggtgggatgagtaggacaacatatttcagtaataaaatacagaataaaaatcaagtgtttttacgcaaaaaaaaaaaaaaaa

SEQ ID NO: 1587 - protein, 241 aa, Homo sapiens
MAEEQPQVELFVKAGSDGAKIGNCPFSQRLFMVLWLKGVTFNVTTVDTKRRTETVQKLCPGGQLPFLLYGTEVHTDTNKIEEFLEAVLCPPRYPKLAALNPESNTAGLDIFAKFSAYIKNSNPALNDNLEKGLLKALKVLDNYLTSPLPEEVDETSAEDEGVSQRKFLDGNELTLADCNLLPKLHIVQVVCKKYRGFTIPEAFRGVHRYLSNAYAREEFASTCPDDEEIELAYEQVAKALK

SEQ ID NO: 1588 - DNA, 2903 bp, Homo sapiens
gcgcgctccttttgcaggctcgtggcggtcggtcagcggggcgttctcccacctgtagcgactcaggttactgaaaaggcgggaaaacgctgcgatggcggcagctgggggaggaggaagataagcgcgtgaggctggggtcctggcgcgtggttggcagaggcagagacataagacgtgcacgactcgccccacagggccctcagaccccttccttccaaaggagcctccaagctcatggcctccttaggagcgaacccaaggaggacaccgcagggaccgagacctggggcggcctcctccggcttccccagcccggccccagtgccgggccccagggaggccgaggaggaggaagtcgaggaggaggaggagctggccgagatccatctgtgtgtgctgtggaattcaggatacttgggcattgcctactatgatactagtgactccactatccacttcatgccagatgccccagaccacgagagcctcaagcttctccagagagttctggatgagatcaatccccagtctgttgttacgagtgccaaacaggatgagaatatgactcgatttctgggaaagcttgcctcccaggagcacagagagcctaaaagacctgaaatcatatttttgccaagtgtggattttggtctggagataagcaaacaacgcctcctttctggaaactactccttcatcccagacgccatgactgccactgagaaaatcctcttcctctcttccattattccctttgactgcctcctcacagttcgagcacttggagggctgctgaagttcctgggtcgaagaagaatcggggttgaactggaagactataatgtcagcgtccccatcctgggctttaagaaatttatgttgactcatctggtgaacatagatcaagacacttacagtgttctacagatttttaagagtgagtctcacccctcagtgtacaaagtggccagtggactgaaggaggggctcagcctctttggaatcctcaacagatgccactgtaagtggggagagaagctgctcaggctatggttcacacgtccgactcatgacctgggggagctcagttctcgtctggacgtcattcagttttttctgctgccccagaatctggacatggctcagatgctgcatcggctcctgggtcacatcaagaacgtgcctctgattctgaaacgcatgaagttgtcccacaccaaggtcagcgactggcaggttctctacaagactgtgtacagtgccctgggcctgagggatgcctgccgctccctgccgcagtccatccagctctttcgggacattgcccaagagttctctgatgacctgcaccatatcgccagcctcattgggaaagtagtggactttgagggcagccttgctgaaaatcgcttcacagtcctccccaacatagatcctgaaattgatgagaaaaagcgaagactgatgggacttcccagtttccttactgaggttgcccgcaaggagctggagaatctggactcccgtattccttcatgcagtgtcatctacatccctctgattggcttccttctttctattccccgcctgccttccatggtagaggccagtgactttgagattaatggactggacttcatgtttctctcagaggagaagctgcactatcgtagtgcccgaaccaaggagctggatgcattgctgggggacctgcactgcgagatccgggaccaggagacgctgctgatgtaccagctacagtgccaggtgctggcacgagcagctgtcttaacccgagtattggaccttgcctcccgcctggacgtcctgctggctcttgccagtgctgcccgggactatggctactcaaggccgcgttactccccacaagtccttggggtacgaatccagaatggcagacatcctctgatggaactctgtgcccgaacctttgtgcccaactccacagaatgtggtggggacaaagggagggtcaaagtcatcactggacccaactcatcagggaagagcatatacctcaaacaggtaggcttgatcacattcatggccctggtaggcagctttgtgccagcagaggaggccgaaattggggcagtagacgccatcttcacacgaattcatagctgcgaatccatctcccttggcctctccaccttcatgatcgacctcaaccaggtggcgaaagcagtgaacaatgccactgcacagtcgctggtccttattgatgaatttggaaagggaaccaacacggtggatgggctcgcgcttctggccgctgtgctccgacactggctggcacgtggacccacatgcccccacatctttgtggccaccaactttctgagccttgttcagctacaactgctgccacaagggcccctggtgcagtatttgaccatggagacctgtgaggatggcaacgatcttgtcttcttctatcaggtttgcgaaggtgttgcgaaggccagccatgcctcccacacagctgcccaggctgggcttcctgacaagcttgtggctcgtggcaaggaggtctcagacttgatccgcagtggaaaacccatcaagcctgtcaaggatttgctaaagaagaaccaaatggaaaattgccagacattagtggataagtttatgaaactggatttggaagatcctaacctggacttgaacgttttcatgagccaggaagtgctgcctgctgccaccagcatcctctgagagtccttccagtgtcctccccagcctcctgagactccggtgggctgccatgccctctttgtttccttatctccctcagacgcagagtttttagtttctctagaaattttgtttcatattaggaataaagtttattttgaagaaaaaaaaaaaaaaaaaaa

SEQ ID NO: 1589 - protein, 834 aa, Homo sapiens
MASLGANPRRTPQGPRPGAASSGFPSPAPVPGPREAEEEEVEEEEELAEIHLCVLWNSGYLGIAYYDTSDSTIHFMPDAPDHESLKLLQRVLDEINPQSVVTSAKQDENMTRFLGKLASQEHREPKRPEIIFLPSVDFGLEISKQRLLSGNYSFIPDAMTATEKILFLSSIIPFDCLLTVRALGGLLKFLGRRRIGVELEDYNVSVPILGFKKFMLTHLVNIDQDTYSVLQIFKSESHPSVYKVASGLKEGLSLFGILNRCHCKWGEKLLRLWFTRPTHDLGELSSRLDVIQFFLLPQNLDMAQMLHRLLGHIKNVPLILKRMKLSHTKVSDWQVLYKTVYSALGLRDACRSLPQSIQLFRDIAQEFSDDLHHIASLIGKVVDFEGSLAENRFTVLPNIDPEIDEKKRRLMGLPSFLTEVARKELENLDSRIPSCSVIYIPLIGFLLSIPRLPSMVEASDFEINGLDFMFLSEEKLHYRSARTKELDALLGDLHCEIRDQETLLMYQLQCQVLARAAVLTRVLDLASRLDVLLALASAARDYGYSRPRYSPQVLGVRIQNGRHPLMELCARTFVPNSTECGGDKGRVKVITGPNSSGKSIYLKQVGLITFMALVGSFVPAEEAEIGAVDAIFTRIHSCESISLGLSTFMIDLNQVAKAVNNATAQSLVLIDEFGKGTNTVDGLALLAAVLRHWLARGPTCPHIFVATNFLSLVQLQLLPQGPLVQYLTMETCEDGNDLVFFYQVCEGVAKASHASHTAAQAGLPDKLVARGKEVSDLIRSGKPIKPVKDLLKKNQMENCQTLVDKFMKLDLEDPNLDLNVFMSQEVLPAATSIL

SEQ ID NO: 1590 - DNA, 2796 bp, Homo sapiens
gcgcgctccttttgcaggctcgtggcggtcggtcagcggggcgttctcccacctgtagcgactcagagcctccaagctcatggcctccttaggagcgaacccaaggaggacaccgcagggaccgagacctggggcggcctcctccggcttccccagcccggccccagtgccgggccccagggaggccgaggaggaggaagtcgaggaggaggaggagctggccgagatccatctgtgtgtgctgtggaattcaggatacttgggcattgcctactatgatactagtgactccactatccacttcatgccagatgccccagaccacgagagcctcaagcttctccagagagttctggatgagatcaatccccagtctgttgttacgagtgccaaacaggatgagaatatgactcgatttctgggaaagcttgcctcccaggagcacagagagcctaaaagacctgaaatcatatttttgccaagtgtggattttggtctggagataagcaaacaacgcctcctttctggaaactactccttcatcccagacgccatgactgccactgagaaaatcctcttcctctcttccattattccctttgactgcctcctcacacccccaggagatttaagatttaccccgattccactgctgatcccctcccaggttcgagcacttggagggctgctgaagttcctgggtcgaagaagaatcggggttgaactggaagactataatgtcagcgtccccatcctgggctttaagaaatttatgttgactcatctggtgaacatagatcaagacacttacagtgttctacagatttttaagagtgagtctcacccctcagtgtacaaagtggccagtggactgaaggaggggctcagcctctttggaatcctcaacagatgccactgtaagtggggagagaagctgctcaggctatggttcacacgtccgactcatgacctgggggagctcagttctcgtctggacgtcattcagttttttctgctgccccagaatctggacatggctcagatgctgcatcggctcctgggtcacatcaagaacgtgcctctgattctgaaacgcatgaagttgtcccacaccaaggtcagcgactggcaggttctctacaagactgtgtacagtgccctgggcctgagggatgcctgccgctccctgccgcagtccatccagctctttcgggacattgcccaagagttctctgatgacctgcaccatatcgccagcctcattgggaaagtagtggactttgagggcagccttgctgaaaatcgcttcacagtcctccccaacatagatcctgaaattgatgagaaaaagcgaagactgatgggacttcccagtttccttactgaggttgcccgcaaggagctggagaatctggactcccgtattccttcatgcagtgtcatctacatccctctgattggcttccttctttctattccccgcctgccttccatggtagaggccagtgactttgagattaatggactggacttcatgtttctctcagaggagaagctgcactatcgtagtgcccgaaccaaggagctggatgcattgctgggggacctgcactgcgagatccgggaccaggagacgctgctgatgtaccagctacagtgccaggtgctggcacgagcagctgtcttaacccgagtattggaccttgcctcccgcctggacgtcctgctggctcttgccagtgctgcccgggactatggctactcaaggccgcgttactccccacaagtccttggggtacgaatccagaatggcagacatcctctgatggaactctgtgcccgaacctttgtgcccaactccacagaatgtggtggggacaaagggagggtcaaagtcatcactggacccaactcatcagggaagagcatatacctcaaacaggtaggcttgatcacattcatggccctggtaggcagctttgtgccagcagaggaggccgaaattggggcagtagacgccatcttcacacgaattcatagctgcgaatccatctcccttggcctctccaccttcatgatcgacctcaaccaggtggcgaaagcagtgaacaatgccactgcacagtcgctggtccttattgatgaatttggaaagggaaccaacacggtggatgggctcgcgcttctggccgctgtgctccgacactggctggcacgtggacccacatgcccccacatctttgtggccaccaactttctgagccttgttcagctacaactgctgccacaagggcccctggtgcagtatttgaccatggagacctgtgaggatggcaacgatcttgtcttcttctatcaggtttgcgaaggtgttgcgaaggccagccatgcctcccacacagctgcccaggctgggcttcctgacaagcttgtggctcgtggcaaggaggtctcagacttgatccgcagtggaaaacccatcaagcctgtcaaggatttgctaaagaagaaccaaatggaaaattgccagacattagtggataagtttatgaaactggatttggaagatcctaacctggacttgaacgttttcatgagccaggaagtgctgcctgctgccaccagcatcctctgagagtccttccagtgtcctccccagcctcctgagactccggtgggctgccatgccctctttgtttccttatctccctcagacgcagagtttttagtttctctagaaattttgtttcatattaggaataaagtttattttgaagaaaaaaaaaaaaaaaaaaa

SEQ ID NO: 1591 - protein, 851 aa, Homo sapiens
MASLGANPRRTPQGPRPGAASSGFPSPAPVPGPREAEEEEVEEEEELAEIHLCVLWNSGYLGIAYYDTSDSTIHFMPDAPDHESLKLLQRVLDEINPQSVVTSAKQDENMTRFLGKLASQEHREPKRPEIIFLPSVDFGLEISKQRLLSGNYSFIPDAMTATEKILFLSSIIPFDCLLTPPGDLRFTPIPLLIPSQVRALGGLLKFLGRRRIGVELEDYNVSVPILGFKKFMLTHLVNIDQDTYSVLQIFKSESHPSVYKVASGLKEGLSLFGILNRCHCKWGEKLLRLWFTRPTHDLGELSSRLDVIQFFLLPQNLDMAQMLHRLLGHIKNVPLILKRMKLSHTKVSDWQVLYKTVYSALGLRDACRSLPQSIQLFRDIAQEFSDDLHHIASLIGKVVDFEGSLAENRFTVLPNIDPEIDEKKRRLMGLPSFLTEVARKELENLDSRIPSCSVIYIPLIGFLLSIPRLPSMVEASDFEINGLDFMFLSEEKLHYRSARTKELDALLGDLHCEIRDQETLLMYQLQCQVLARAAVLTRVLDLASRLDVLLALASAARDYGYSRPRYSPQVLGVRIQNGRHPLMELCARTFVPNSTECGGDKGRVKVITGPNSSGKSIYLKQVGLITFMALVGSFVPAEEAEIGAVDAIFTRIHSCESISLGLSTFMIDLNQVAKAVNNATAQSLVLIDEFGKGTNTVDGLALLAAVLRHWLARGPTCPHIFVATNFLSLVQLQLLPQGPLVQYLTMETCEDGNDLVFFYQVCEGVAKASHASHTAAQAGLPDKLVARGKEVSDLIRSGKPIKPVKDLLKKNQMENCQTLVDKFMKLDLEDPNLDLNVFMSQEVLPAATSIL

SEQ ID NO: 1592 - DNA, 2748 bp, Homo sapiens
gcgcgctccttttgcaggctcgtggcggtcggtcagcggggcgttctcccacctgtagcgactcagagcctccaagctcatggcctccttaggagcgaacccaaggaggacaccgcagggaccgagacctggggcggcctcctccggcttccccagcccggccccagtgccgggccccagggaggccgaggaggaggaagtcgaggaggaggaggagctggccgagatccatctgtgtgtgctgtggaattcaggatacttgggcattgcctactatgatactagtgactccactatccacttcatgccagatgccccagaccacgagagcctcaagcttctccagagagttctggatgagatcaatccccagtctgttgttacgagtgccaaacaggatgagaatatgactcgatttctgggaaagcttgcctcccaggagcacagagagcctaaaagacctgaaatcatatttttgccaagtgtggattttggtctggagataagcaaacaacgcctcctttctggaaactactccttcatcccagacgccatgactgccactgagaaaatcctcttcctctcttccattattccctttgactgcctcctcacagttcgagcacttggagggctgctgaagttcctgggtcgaagaagaatcggggttgaactggaagactataatgtcagcgtccccatcctgggctttaagaaatttatgttgactcatctggtgaacatagatcaagacacttacagtgttctacagatttttaagagtgagtctcacccctcagtgtacaaagtggccagtggactgaaggaggggctcagcctctttggaatcctcaacagatgccactgtaagtggggagagaagctgctcaggctatggttcacacgtccgactcatgacctgggggagctcagttctcgtctggacgtcattcagttttttctgctgccccagaatctggacatggctcagatgctgcatcggctcctgggtcacatcaagaacgtgcctctgattctgaaacgcatgaagttgtcccacaccaaggtcagcgactggcaggttctctacaagactgtgtacagtgccctgggcctgagggatgcctgccgctccctgccgcagtccatccagctctttcgggacattgcccaagagttctctgatgacctgcaccatatcgccagcctcattgggaaagtagtggactttgagggcagccttgctgaaaatcgcttcacagtcctccccaacatagatcctgaaattgatgagaaaaagcgaagactgatgggacttcccagtttccttactgaggttgcccgcaaggagctggagaatctggactcccgtattccttcatgcagtgtcatctacatccctctgattggcttccttctttctattccccgcctgccttccatggtagaggccagtgactttgagattaatggactggacttcatgtttctctcagaggagaagctgcactatcgtagtgcccgaaccaaggagctggatgcattgctgggggacctgcactgcgagatccgggaccaggagacgctgctgatgtaccagctacagtgccaggtgctggcacgagcagctgtcttaacccgagtattggaccttgcctcccgcctggacgtcctgctggctcttgccagtgctgcccgggactatggctactcaaggccgcgttactccccacaagtccttggggtacgaatccagaatggcagacatcctctgatggaactctgtgcccgaacctttgtgcccaactccacagaatgtggtggggacaaagggagggtcaaagtcatcactggacccaactcatcagggaagagcatatacctcaaacaggtaggcttgatcacattcatggccctggtaggcagctttgtgccagcagaggaggccgaaattggggcagtagacgccatcttcacacgaattcatagctgcgaatccatctcccttggcctctccaccttcatgatcgacctcaaccagcaggtggcgaaagcagtgaacaatgccactgcacagtcgctggtccttattgatgaatttggaaagggaaccaacacggtggatgggctcgcgcttctggccgctgtgctccgacactggctggcacgtggacccacatgcccccacatctttgtggccaccaactttctgagccttgttcagctacaactgctgccacaagggcccctggtgcagtatttgaccatggagacctgtgaggatggcaacgatcttgtcttcttctatcaggtttgcgaaggtgttgcgaaggccagccatgcctcccacacagctgcccaggctgggcttcctgacaagcttgtggctcgtggcaaggaggtctcagacttgatccgcagtggaaaacccatcaagcctgtcaaggatttgctaaagaagaaccaaatggaaaattgccagacattagtggataagtttatgaaactggatttggaagatcctaacctggacttgaacgttttcatgagccaggaagtgctgcctgctgccaccagcatcctctgagagtccttccagtgtcctccccagcctcctgagactccggtgggctgccatgccctctttgtttccttatctccctcagacgcagagtttttagtttctctagaaattttgtttcatattaggaataaagtttattttgaagaaaaaaaaaaaaaaaaaaa

SEQ ID NO: 1593 - protein, 835 aa, Homo sapiens
MASLGANPRRTPQGPRPGAASSGFPSPAPVPGPREAEEEEVEEEEELAEIHLCVLWNSGYLGIAYYDTSDSTIHFMPDAPDHESLKLLQRVLDEINPQSVVTSAKQDENMTRFLGKLASQEHREPKRPEIIFLPSVDFGLEISKQRLLSGNYSFIPDAMTATEKILFLSSIIPFDCLLTVRALGGLLKFLGRRRIGVELEDYNVSVPILGFKKFMLTHLVNIDQDTYSVLQIFKSESHPSVYKVASGLKEGLSLFGILNRCHCKWGEKLLRLWFTRPTHDLGELSSRLDVIQFFLLPQNLDMAQMLHRLLGHIKNVPLILKRMKLSHTKVSDWQVLYKTVYSALGLRDACRSLPQSIQLFRDIAQEFSDDLHHIASLIGKVVDFEGSLAENRFTVLPNIDPEIDEKKRRLMGLPSFLTEVARKELENLDSRIPSCSVIYIPLIGFLLSIPRLPSMVEASDFEINGLDFMFLSEEKLHYRSARTKELDALLGDLHCEIRDQETLLMYQLQCQVLARAAVLTRVLDLASRLDVLLALASAARDYGYSRPRYSPQVLGVRIQNGRHPLMELCARTFVPNSTECGGDKGRVKVITGPNSSGKSIYLKQVGLITFMALVGSFVPAEEAEIGAVDAIFTRIHSCESISLGLSTFMIDLNQQVAKAVNNATAQSLVLIDEFGKGTNTVDGLALLAAVLRHWLARGPTCPHIFVATNFLSLVQLQLLPQGPLVQYLTMETCEDGNDLVFFYQVCEGVAKASHASHTAAQAGLPDKLVARGKEVSDLIRSGKPIKPVKDLLKKNQMENCQTLVDKFMKLDLEDPNLDLNVFMSQEVLPAATSIL

SEQ ID NO: 1594 - DNA, 2745 bp, Homo sapiens
gcgcgctccttttgcaggctcgtggcggtcggtcagcggggcgttctcccacctgtagcgactcagagcctccaagctcatggcctccttaggagcgaacccaaggaggacaccgcagggaccgagacctggggcggcctcctccggcttccccagcccggccccagtgccgggccccagggaggccgaggaggaggaagtcgaggaggaggaggagctggccgagatccatctgtgtgtgctgtggaattcaggatacttgggcattgcctactatgatactagtgactccactatccacttcatgccagatgccccagaccacgagagcctcaagcttctccagagagttctggatgagatcaatccccagtctgttgttacgagtgccaaacaggatgagaatatgactcgatttctgggaaagcttgcctcccaggagcacagagagcctaaaagacctgaaatcatatttttgccaagtgtggattttggtctggagataagcaaacaacgcctcctttctggaaactactccttcatcccagacgccatgactgccactgagaaaatcctcttcctctcttccattattccctttgactgcctcctcacagttcgagcacttggagggctgctgaagttcctgggtcgaagaagaatcggggttgaactggaagactataatgtcagcgtccccatcctgggctttaagaaatttatgttgactcatctggtgaacatagatcaagacacttacagtgttctacagatttttaagagtgagtctcacccctcagtgtacaaagtggccagtggactgaaggaggggctcagcctctttggaatcctcaacagatgccactgtaagtggggagagaagctgctcaggctatggttcacacgtccgactcatgacctgggggagctcagttctcgtctggacgtcattcagttttttctgctgccccagaatctggacatggctcagatgctgcatcggctcctgggtcacatcaagaacgtgcctctgattctgaaacgcatgaagttgtcccacaccaaggtcagcgactggcaggttctctacaagactgtgtacagtgccctgggcctgagggatgcctgccgctccctgccgcagtccatccagctctttcgggacattgcccaagagttctctgatgacctgcaccatatcgccagcctcattgggaaagtagtggactttgagggcagccttgctgaaaatcgcttcacagtcctccccaacatagatcctgaaattgatgagaaaaagcgaagactgatgggacttcccagtttccttactgaggttgcccgcaaggagctggagaatctggactcccgtattccttcatgcagtgtcatctacatccctctgattggcttccttctttctattccccgcctgccttccatggtagaggccagtgactttgagattaatggactggacttcatgtttctctcagaggagaagctgcactatcgtagtgcccgaaccaaggagctggatgcattgctgggggacctgcactgcgagatccgggaccaggagacgctgctgatgtaccagctacagtgccaggtgctggcacgagcagctgtcttaacccgagtattggaccttgcctcccgcctggacgtcctgctggctcttgccagtgctgcccgggactatggctactcaaggccgcgttactccccacaagtccttggggtacgaatccagaatggcagacatcctctgatggaactctgtgcccgaacctttgtgcccaactccacagaatgtggtggggacaaagggagggtcaaagtcatcactggacccaactcatcagggaagagcatatacctcaaacaggtaggcttgatcacattcatggccctggtaggcagctttgtgccagcagaggaggccgaaattggggcagtagacgccatcttcacacgaattcatagctgcgaatccatctcccttggcctctccaccttcatgatcgacctcaaccaggtggcgaaagcagtgaacaatgccactgcacagtcgctggtccttattgatgaatttggaaagggaaccaacacggtggatgggctcgcgcttctggccgctgtgctccgacactggctggcacgtggacccacatgcccccacatctttgtggccaccaactttctgagccttgttcagctacaactgctgccacaagggcccctggtgcagtatttgaccatggagacctgtgaggatggcaacgatcttgtcttcttctatcaggtttgcgaaggtgttgcgaaggccagccatgcctcccacacagctgcccaggctgggcttcctgacaagcttgtggctcgtggcaaggaggtctcagacttgatccgcagtggaaaacccatcaagcctgtcaaggatttgctaaagaagaaccaaatggaaaattgccagacattagtggataagtttatgaaactggatttggaagatcctaacctggacttgaacgttttcatgagccaggaagtgctgcctgctgccaccagcatcctctgagagtccttccagtgtcctccccagcctcctgagactccggtgggctgccatgccctctttgtttccttatctccctcagacgcagagtttttagtttctctagaaattttgtttcatattaggaataaagtttattttgaagaaaaaaaaaaaaaaaaaaa

SEQ ID NO: 1595 - protein, 834 aa, Homo sapiens; identical to SEQ ID NO: 1589

SEQ ID NO: 1596 - DNA, 2559 bp, Homo sapiens
atgctccccacggaggtcccccaatcccacccgggcccctcagcgttgcttctgctgcagctgttgctgccccccacatctgccttcttccccaacatctggagcctgctggctgcccctggctccatcacccaccaagacctaactgaggaggcagcgctcaacgtcaccctgcagctcttcctggagcagccacccccaggccgcccccctcttcgtcttgaggacttcctgggtcgaacactccttgctgatgacctctttgccgcctactttggacctggttcttctcggcggttccgagcagccttaggtgaggtgtctcgtgccaatgcagcccaggacttcctgccaacttccaggaatgaccccgacctgcactttgatgctgagcgactgggtcagggacgcgcgcgcctggtaggggctctgcgggagaccgtggtggcagccagggcccttgaccacaccctggctcgccagcgcctcggggctgcacttcatgccctgcaggatttctacagtcatagcaactgggtggagctgggcgagcagcagccacaccctcacctcctctggccaaggcaggagctccagaacctggcacaagtggccgatcctacctgctccgattgcgaggagttgagctgccccaggaattggctgggcttcacactcctcacctctggctactttggaactcatcccccgaaacctccagggaaatgtagccacgggggccattttgaccggagcagctcccagccaccgaggggaggcatcaacaaggacagcacatccccaggcttctcccctcaccacatgctgcacctccaggctgcaaaactggcccttctagcctccatccaggccttcagccttctgcgaagccgcctgggagacagggatttctccaggctgctggacatcaccccagcctccagcctgagctttgtcctggacaccacgggcagcatgggtgaggagatcaacgctgccaaaatccaggctcgccaccttgtggagcagcggagaggcagccccatggagcctgtccactatgtcctggtgccttttcatgacccagggttcggccctgtctttacaaccagtgaccctgacagcttctggcaacagcttaatgagatccatgccttggggggtggagacgagcctgagatgtgcctgtcagccctgcagctggccctgctgcacacacctccactctcagatatctttgtcttcacggatgcctcccccaaggatgcctttctcaccaaccaggtggaatccctgactcaggagcggcgctgccgggtaacattcctggtgactgaagatacatcaagggttcagggtcgagctcggcgtgagatcttgtcccctctgcgttttgagccatacaaagcagtggccctggcctcaggaggagaggtgatcttcaccaaagaccagcacattcgagacgtggcagccattgttggggagagcatggctgccctggtgactcttcccctggaccctcctgttgtggtgcctgggcagccacttgtgttcagcgtggatgggctgctccagaagatcacagtccggatccacggagacatcagcagcttctggatcaagaaccctgcaggggtctcccagggccaggaggaaggcgggggtcctctaggtcacactcgccgctttgggcagttctggatggtgaccatggatgaccctccacagacaggaacctgggagatccaggtcacagctgaggacacccctggggtgagagtgcaagcccagacctccctggacttcctcttccactttgggatccccatggaggatggaccccaccctggcctctaccccctgactcagccagttgcaggtcttcagacccagctgctggtagaagtgacagggttgggttccagagccaatcctggggatcctcagccgcatttctcccacgtcatccttcgaggggtcccagagggtgccgaactaggccaggtgcccttggagcccgtgggacctccggagcgaggtctcctcgcagcctcgctgtcgcccacgctgctgtccacccctagacccttctccctggagctgattggccaggacgcagcggggcggcgcctgcacagggctgcccctcagcctagcactgtagtccctgtccttctggagcttagtggcccctcgggtttcttggccccgggcagcaaagtcccgctcagtctccgcatcgccagcttctcgggccctcaggatcttgaccttaggactttcgtcaaccccagcttctccctcacctccaacctctccagggctcacctggaactgaatgagtcggcctggggccgcctgtggctggaggtcccagattcagcggccccggattccgtggtgatggtgactgtgactgcagggggacgagaagccaacccagtacccccgactcatgctttcctccggctcctggtatcggccccagccccgcaggtgaggaactactactttccatcacagggaccggcacaccacccctaccggctcatctga

SEQ ID NO: 1597 - protein, 852 aa, Homo sapiens
MLPTEVPQSHPGPSALLLLQLLLPPTSAFFPNIWSLLAAPGSITHQDLTEEAALNVTLQLFLEQPPPGRPPLRLEDFLGRTLLADDLFAAYFGPGSSRRFRAALGEVSRANAAQDFLPTSRNDPDLHFDAERLGQGRARLVGALRETVVAARALDHTLARQRLGAALHALQDFYSHSNWVELGEQQPHPHLLWPRQELQNLAQVADPTCSDCEELSCPRNWLGFTLLTSGYFGTHPPKPPGKCSHGGHFDRSSSQPPRGGINKDSTSPGFSPHHMLHLQAAKLALLASIQAFSLLRSRLGDRDFSRLLDITPASSLSFVLDTTGSMGEEINAAKIQARHLVEQRRGSPMEPVHYVLVPFHDPGFGPVFTTSDPDSFWQQLNEIHALGGGDEPEMCLSALQLALLHTPPLSDIFVFTDASPKDAFLTNQVESLTQERRCRVTFLVTEDTSRVQGRARREILSPLRFEPYKAVALASGGEVIFTKDQHIRDVAAIVGESMAALVTLPLDPPVVVPGQPLVFSVDGLLQKITVRIHGDISSFWIKNPAGVSQGQEEGGGPLGHTRRFGQFWMVTMDDPPQTGTWEIQVTAEDTPGVRVQAQTSLDFLFHFGIPMEDGPHPGLYPLTQPVAGLQTQLLVEVTGLGSRANPGDPQPHFSHVILRGVPEGAELGQVPLEPVGPPERGLLAASLSPTLLSTPRPFSLELIGQDAAGRRLHRAAPQPSTVVPVLLELSGPSGFLAPGSKVPLSLRIASFSGPQDLDLRTFVNPSFSLTSNLSRAHLELNESAWGRLWLEVPDSAAPDSVVMVTVTAGGREANPVPPTHAFLRLLVSAPAPQVRNYYFPSQGPAHHPYRLI

SEQ ID NO: 1598 - DNA, 4308 bp, Homo sapiens
gcgcctgacgggagcgtcgtgctcaggggtgtcctctcgtcctgcgtccgcgcccagcgccccgcgccccgcgctgttcctcgtgagaccggcgggcggcgagccgcgcggcccccggggcagtgtcggacacggcgggcgcgcactcgcaggcggggcacggccgcccccgccaggacccgcaggcccggaaacgctccctgtcacaaaggggggaacacgtgggcgccggctgccggggcggcgatcttagggaactagggtcacctggagagccgcccaccgtctctgcccgctcgactcctccgcccgggccgctcggccggtccagccgcggccggcgcctggctgtgaggtggattcccggcccagtctgaccatctccctccagtttttccacttcgttcggaccttctcataactatgtccaccctctacgtctcccctcacccagatgccttccccagcctccgagccctcatagccgctcgctatggggaggctggggagggtcccggatggggaggagcccacccccgcatctgtctccagccacccccgactagcaggactccctttcccccaccccgcctgccggccctggagcaggggcccggtgggctctgggtgtggggggccacggctgtggcccagctgctgtggccagcaggcctggggggcccagggggcagccgggcggctgtccttgtccaacagtgggtcagttacgccgacacggagttaataccagctgcctgtggagcaacgctgccggccctgggactccgaagctcggcccaggacccccaggctgtgctgggggccctgggcagggccctgagccccttggaggagtggcttcggctgcacacctacttggccggggaggcccccactctggctgacctggcggctgtcacagccttgctgctgcctttccgatacgtcctagacccacctgcccgccggatctggaataatgtgactcgctggtttgtcacgtgtgtccggcagccagaattccgagccgtgctaggagaagtggttctatactcaggagccaggcctctctctcatcagccaggccccgaggctcctgccctcccaaagacagctgctcagctcaagaaagaggcaaagaaacgggagaagctagagaaattccaacagaagcagaagatccaacagcagcagccacctccaggggagaagaaaccaaaaccagagaagagggagaaacgggatcctggggtcattacctatgacctcccaaccccacccggggaaaagaaagatgtcagtggccccatgcccgactcctacagccctcggtatgtggaggctgcctggtacccttggtgggagcagcagggcttcttcaagccagagtatgggcgtcctaatgtgtcagcagcaaatccccgaggtgtcttcatgatgtgcatcccaccccccaatgtgacaggctccctgcacctgggccatgcactcaccaacgccatccaggactccctgactcgatggcaccgcatgcgtggggagaccaccctgtggaaccctggctgtgaccatgcaggtattgccacccaggtggtggtggagaagaagctatggcgtgagcagggactgagccggcaccagctgggccgcgaggcctttctacaggaagtctggaagtggaaggaggagaaaggtgaccggatttaccaccagttgaagaagcttggcagctccttggactgggatcgagcctgtttcaccatggaccctaaactctcagcagctgtgacagaggcctttgtccggcttcacgaggaaggcatcatctatcgcagtacccgccttgttaactggtcctgcaccctcaactccgccatctctgacattgaggtggataagaaggagctgacaggtcgcaccctgctctccgtgcctggctacaaggagaaggtggagttcggggtcctcgtgtcctttgcctataaggtccaaggctcagatagcgacgaggaggtggtggtggcaacaactcggatcgagacaatgctgggagatgtggctgtagctgtgcaccccaaagataccagataccagcacctgaaggggaagaacgtgatccacccattcctgtctcggagccttcccattgtcttcgatgaatttgtggacatggactttggcacaggtgctgtgaagatcacccccgcacatgaccaaaatgactatgaagttgggcagcggcacgggctggaggccatcagcatcatggactcccggggggccctcatcaatgtgcctccgcctttcctgggcctgcccaggtttgaggccaggaaagcggtgctggtggcgctgaaggagcggggactgttccgtggcattgaggacaaccccatggtggtgccactttgcaaccggtcgaaggacgtggtagagcctctgctgcggccgcagtggtacgttcgctgcggggagatggcccaggctgccagcgccgctgtgactcggggtgacctccgcatcctgcctgaggcccatcagcgcacatggcatgcctggatggacaacatccgggagtggtgcatttccaggcagctgtggtggggccatcgcatcccagcctactttgtcactgtcagtgacccagcggtgccccctggggaggaccctgatgggcggtactgggtgagtggacgcaatgaggcggaggcccgggagaaggcagccaaggagttcggagtgtcccctgacaagatcagtctccagcaagatgaggatgtattggatacctggttctcctctggcctcttccccttatccattttgggctggcccaaccagtcagaagacctgagtgtgttctaccccgggacactgctggagaccggtcatgacatcctcttcttctgggtggcccggatggtcatgctgggcctgaagctcacgggcaggctgccctttagagaggtctacctccatgccatcgtgcgagatgctcacggccggaagatgagcaagtctctaggcaatgtcatcgatcccctggacgtcatctatggaatctccctgcagggcctccacaaccagctgctgaacagcaacctggatcccagcgaggtggagaaggccaaagaagggcagaaagctgacttcccagcggggattcctgaatgtggcaccgatgctctccggtttggattatgtgcctacatgtcccagggtcgtgacatcaacctggatgtgaaccggatactgggttaccgccacttctgcaacaagctctggaatgccaccaagtttgcccttcgtggccttgggaagggttttgtgccctcacccacctcccagcccggaggccatgagagcctggtggaccgctggatccgcagccgcctgacagaggctgtgaggctcagcaatcaaggcttccaggcctacgacttcccggccgtcaccactgcccagtacagcttctggctctatgagctctgtgatgtctacttggagtgcctgaaacctgtactgaatggggtggaccaggtggcagctgagtgtgcccgccagaccctgtacacttgcctggacgttggcctgcggctgctctcacccttcatgcccttcgtgacggaggagctgttccagaggctgccccggaggatgccgcaagctccccctagcctctgtgttaccccctacccggagccctcagagtgctcctggaaggaccccgaggcagaagccgcccttgagctggcgctaagcatcacgcgagccgtgcgctccctgcgggccgactacaacctcacccggatccggcctgactgtttcctggaagtggcggatgaggccacgggcgccctggcatcggcggtgtcgggctacgtgcaggccctggccagcgcaggtgtggtggctgttctggccctgggggctcccgccccccagggttgcgctgtggctctggcttctgatcgctgctccatccacctgcagcttcaggggctggtggaccctgcacgggagctgggcaagctgcaagccaagcgagttgaggcccagcggcaggcccagcgtctgcgggaacgccgtgctgcctcgggctatcctgtcaaggtgccgctcgaagtccaggaggcagatgaagccaagctccaacagacagaagcagagctcaggaaggtggatgaggccatcgccctattccagaagatgctgtgatccaccacccagcttcacccctcacccccagcggctcaccatggggatggcagcaataaaatattttcccacaaaaaaaaaaaaaaaaaa

SEQ ID NO: 1599 - protein, 1264 aa, Homo sapiens
MSTLYVSPHPDAFPSLRALIAARYGEAGEGPGWGGAHPRICLQPPPTSRTPFPPPRLPALEQGPGGLWVWGATAVAQLLWPAGLGGPGGSRAAVLVQQWVSYADTELIPAACGATLPALGLRSSAQDPQAVLGALGRALSPLEEWLRLHTYLAGEAPTLADLAAVTALLLPFRYVLDPPARRIWNNVTRWFVTCVRQPEFRAVLGEVVLYSGARPLSHQPGPEAPALPKTAAQLKKEAKKREKLEKFQQKQKIQQQQPPPGEKKPKPEKREKRDPGVITYDLPTPPGEKKDVSGPMPDSYSPRYVEAAWYPWWEQQGFFKPEYGRPNVSAANPRGVFMMCIPPPNVTGSLHLGHALTNAIQDSLTRWHRMRGETTLWNPGCDHAGIATQVVVEKKLWREQGLSRHQLGREAFLQEVWKWKEEKGDRIYHQLKKLGSSLDWDRACFTMDPKLSAAVTEAFVRLHEEGIIYRSTRLVNWSCTLNSAISDIEVDKKELTGRTLLSVPGYKEKVEFGVLVSFAYKVQGSDSDEEVVVATTRIETMLGDVAVAVHPKDTRYQHLKGKNVIHPFLSRSLPIVFDEFVDMDFGTGAVKITPAHDQNDYEVGQRHGLEAISIMDSRGALINVPPPFLGLPRFEARKAVLVALKERGLFRGIEDNPMVVPLCNRSKDVVEPLLRPQWYVRCGEMAQAASAAVTRGDLRILPEAHQRTWHAWMDNIREWCISRQLWWGHRIPAYFVTVSDPAVPPGEDPDGRYWVSGRNEAEAREKAAKEFGVSPDKISLQQDEDVLDTWFSSGLFPLSILGWPNQSEDLSVFYPGTLLETGHDILFFWVARMVMLGLKLTGRLPFREVYLHAIVRDAHGRKMSKSLGNVIDPLDVIYGISLQGLHNQLLNSNLDPSEVEKAKEGQKADFPAGIPECGTDALRFGLCAYMSQGRDINLDVNRILGYRHFCNKLWNATKFALRGLGKGFVPSPTSQPGGHESLVDRWIRSRLTEAVRLSNQGFQAYDFPAVTTAQYSFWLYELCDVYLECLKPVLNGVDQVAAECARQTLYTCLDVGLRLLSPFMPFVTEELFQRLPRRMPQAPPSLCVTPYPEPSECSWKDPEAEAALELALSITRAVRSLRADYNLTRIRPDCFLEVADEATGALASAVSGYVQALASAGVVAVLALGAPAPQGCAVALASDRCSIHLQLQGLVDPARELGKLQAKRVEAQRQAQRLRERRAASGYPVKVPLEVQEADEAKLQQTEAELRKVDEAIALFQKML

SEQ ID NO: 1600 - DNA, 907 bp, Homo sapiens
ctcctctctactctacccagcttgcgctccccagccgcaagtcggccgcgctttgcccgtcagcgcttggagctttctgcgtcgcttcccgctgcgcctgcgcggtcccgcctcgccccacgcgcgggctcgcgcttcggtttccccagacctgctcgcagcaccctgctgtcttcccggtccggcccgctgcccgcggcgccagcaccatgctcttctattcttttttcaagtcccttgtgggcaaggatgtggtcgtggaactaaagaatgacctgagcatctgtggaaccctccattctgtggatcagtatctcaacatcaaactaactgacatcagtgtcacagaccctgagaaataccctcacatgttatcagtgaagaactgcttcattcggggctcagtggtccgatacgtgcagctgccagcagatgaggtcgacacacagttgctacaggatgcggcaaggaaggaagccctgcagcagaaacagtgatggctcctcctcctcttcccctccctctttcattggtgacccataaccccaagtcccagcccagaacccctaacccccaatacttgaaggggttttgtttttttactaatgatggttttgtgggttttttttaagggatgagtggatgagaggagtaatagggaacagctatcctctcttgagaaggggaggataagtaggctgggaaacttcaaagccttcccagtccccagcacctgcctttctcactacttctctggagatggtaggagagtttcctaggtctttccagggcagcatgtgattcatttggggatggaaggaatctgtcccgcatcgggaataaaatttatgatgcaaaaaaaaaaaaaaaaaaaaaaaaaaaaaaaaaaaaaaaaaaaaaaaaaaaa

SEQ ID NO: 1601 - protein, 95 aa, Homo sapiens
MLFYSFFKSLVGKDVVVELKNDLSICGTLHSVDQYLNIKLTDISVTDPEKYPHMLSVKNCFIRGSVVRYVQLPADEVDTQLLQDAARKEALQQKQ

SEQ ID NO: 1602 - DNA, 2509 bp, Homo sapiens
gtctcaaatttgcagggagggacggggtggggggtggggggaccccggttgtgcagtttgatattgagggagcccccacctactcgctggggctgcgtaatctggacgtttccaaactgaagcgaaggcgtcgggagactaggcctcagagaaccatggctactgccaagggaatcgccataggcatcgacctgggcaccacctactcctgtgtgggggtgttccagcacggcaaggtggagatcatcgccaacgaccagggcaaccgcaccacccccagctacgtggccttcacagacaccgagcggctcattggggatgcggccaagaaccaggtagcaatgaatccccagaacactgtttttgatgctaaacgtctgatcggcaggaaatttaatgatcctgttgtacaagcagatatgaaactttggccttttcaagtgattaatgaaggaggcaagcccaaagtccttgtgtcctacaaaggggagaataaagctttctaccctgaggaaatctcttcgatggtattgactaagttgaaggagactgctgaggcctttttgggccaccctgtcaccaatgcagtgattaccgtgccagcctatttcaatgactctcaacgtcaggctactaaggatgcaggtgtgattgctggacttaatgtgctaagaatcatcaatgagcccacggctgctgccattgcctatggtttagataaaggaggtcaaggagaacgacatgtcctgatttttgatctgggtggaggcacatttgatgtgtcaattctgaccatagatgatgggatttttgaggtaaaggccactgctggggacactcacctgggtggggaggactttgacaacaggcttgtgagccacttcgtggaggagttcaagaggaaacacaaaaaggacatcagccagaacaagcgagccgtgaggcggctgcgcaccgcctgcgagagggccaagaggaccctgtcgtccagcacccaggccaacctagaaattgattcactttatgaaggcattgacttctatacatccatcaccagagctcgatttgaagagttgtgtgcagacctgtttaggggtaccctggagcctgtagaaaaagcgcttcgggatgccaagatggataaggctaaaatccatgacattgttttagtagggggctccacccgcatccccaaggtgcagcggctgcttcaggactacttcaatggacgtgatctcaacaagagcatcaaccctgatgaggccgtagcatatggggctgcggtacaagcagccatcctgatgggggacaagtctgagaaggtacaggacctgctgctgctggacgtggctcccctgtccctggggctggagacggctgggggcgtgatgactgccctgataaagcgcaactccaccatccccaccaagcagacacagattttcaccacctactctgacaaccaacccggggtgctgatccaggtgtatgagggcgagagggccatgacaaaggacaacaacctgctggggcggtttgacctgactggaatccctccagcacccaggggagttcctcagatcgaggtgacgtttgacattgatgccaatggtattctcaatgtcacagccatggacaagagcaccggcaaggtgaacaagatcaccatcaccaatgacaagggccgcctgagcaaggaggagattgagcgcatggttctggatgctgagaaatataaagctgaagatgaggtccagagggagaaaattgctgcaaagaatgccttagaatcctatgcttttaacatgaagagtgttgtgagtgatgaaggtttgaagggcaagattagtgagtctgataaaaataaaatattggataaatgcaacgagctcctttcgtggctggaggtcaatcaactggcagagaaagatgagtttgatcataagagaaaggaattggagcagatgtgtaaccctatcatcacaaaactctaccaaggaggatgcactgggcctgcctgcggaacagggtatgtgcctggaaggcctgccacaggccccacaattgaagaagtagattaattctttttagaactgaagcatcctaggatgcctctacatgtatttcattcccctcatcttcaaacatcattattattcttgaccagacctgaatctaagttaccatcccttggaaattctggagaaggagtctcatgcaccacctatcacactccctcacatcctgtttctgactttggaatggactcaggaaaactaggcccctctttaaaccgtgtgatgtatttgaatgtctgttatttccagccaccctaacattcttcttcctgtgtggatgcttatttgtcaatcagtaaatttgttcgtaaagaaaattacttctggtatttaggctgtgaatgtaccttgaaggggagagttcatggagagagcatgtgttctctgattgtgaggtcactgtgaatgattaaattggtaagggtaaagta

SEQ ID NO: 1603 - protein, 641 aa, Homo sapiens
MATAKGIAIGIDLGTTYSCVGVFQHGKVEIIANDQGNRTTPSYVAFTDTERLIGDAAKNQVAMNPQNTVFDAKRLIGRKFNDPVVQADMKLWPFQVINEGGKPKVLVSYKGENKAFYPEEISSMVLTKLKETAEAFLGHPVTNAVITVPAYFNDSQRQATKDAGVIAGLNVLRIINEPTAAAIAYGLDKGGQGERHVLIFDLGGGTFDVSILTIDDGIFEVKATAGDTHLGGEDFDNRLVSHFVEEFKRKHKKDISQNKRAVRRLRTACERAKRTLSSSTQANLEIDSLYEGIDFYTSITRARFEELCADLFRGTLEPVEKALRDAKMDKAKIHDIVLVGGSTRIPKVQRLLQDYFNGRDLNKSINPDEAVAYGAAVQAAILMGDKSEKVQDLLLLDVAPLSLGLETAGGVMTALIKRNSTIPTKQTQIFTTYSDNQPGVLIQVYEGERAMTKDNNLLGRFDLTGIPPAPRGVPQIEVTFDIDANGILNVTAMDKSTGKVNKITITNDKGRLSKEEIERMVLDAEKYKAEDEVQREKIAAKNALESYAFNMKSVVSDEGLKGKISESDKNKILDKCNELLSWLEVNQLAEKDEFDHKRKELEQMCNPIITKLYQGGCTGPACGTGYVPGRPATGPTIEEVD

SEQ ID NO: 1604 - DNA, 2383 bp, Homo sapiens
gctgctgcgacagtccactacctttttcgagagtgactcccgttgtcccaaggcttcccagagcgaacctgtgcggctgcaggcaccggcgcgtcgagtttccggcgtccggaaggaccgagctcttctcgcggatccagtgttccgtttccagcccccaatctcagagccgagccgacagagagcagggaaccggcatggccaaagccgcggcgatcggcatcgacctgggcaccacctactcctgcgtgggggtgttccaacacggcaaggtggagatcatcgccaacgaccagggcaaccgcaccacccccagctacgtggccttcacggacaccgagcggctcatcggggatgcggccaagaaccaggtggcgctgaacccgcagaacaccgtgtttgacgcgaagcggctgatcggccgcaagttcggcgacccggtggtgcagtcggacatgaagcactggcctttccaggtgatcaacgacggagacaagcccaaggtgcaggtgagctacaagggggacaccaaggcattctaccccgaggagatctcgtccatggtgctgaccaagatgaaggagatcgccgaggcgtacctgggctacccggtgaccaacgcggtgatcaccgtgccggcctacttcaacgactcgcagcgccaggccaccaaggatgcgggtgtgatcgcggggctcaacgtgctgcggatcatcaacgagcccacggccgccgccatcgcctacggcctggacagaacgggcaagggggagcgcaacgtgctcatctttgacctgggcgggggcaccttcgacgtgtccatcctgacgatcgacgacggcatcttcgaggtgaaggccacggccggggacacccacctgggtggggaggactttgacaacaggctggtgaaccacttcgtggaggagttcaagagaaaacacaagaaggacatcagccagaacaagcgagccgtgaggcggctgcgcaccgcctgcgagagggccaagaggaccctgtcgtccagcacccaggccagcctggagatcgactccctgtttgagggcatcgacttctacacgtccatcaccagggcgaggttcgaggagctgtgctccgacctgttccgaagcaccctggagcccgtggagaaggctctgcgcgacgccaagctggacaaggcccagattcacgacctggtcctggtcgggggctccacccgcatccccaaggtgcagaagctgctgcaggacttcttcaacgggcgcgacctgaacaagagcatcaaccccgacgaggctgtggcctacggggcggcggtgcaggcggccatcctgatgggggacaagtccgagaacgtgcaggacctgctgctgctggacgtggctcccctgtcgctggggctggagacggccggaggcgtgatgactgccctgatcaagcgcaactccaccatccccaccaagcagacgcagatcttcaccacctactccgacaaccaacccggggtgctgatccaggtgtacgagggcgagagggccatgacgaaagacaacaatctgttggggcgcttcgagctgagcggcatccctccggcccccaggggcgtgccccagatcgaggtgaccttcgacatcgatgccaacggcatcctgaacgtcacggccacggacaagagcaccggcaaggccaacaagatcaccatcaccaacgacaagggccgcctgagcaaggaggagatcgagcgcatggtgcaggaggcggagaagtacaaagcggaggacgaggtgcagcgcgagagggtgtcagccaagaacgccctggagtcctacgccttcaacatgaagagcgccgtggaggatgaggggctcaagggcaagatcagcgaggccgacaagaagaaggtgctggacaagtgtcaagaggtcatctcgtggctggacgccaacaccttggccgagaaggacgagtttgagcacaagaggaaggagctggagcaggtgtgtaaccccatcatcagcggactgtaccagggtgccggtggtcccgggcctgggggcttcggggctcagggtcccaagggagggtctgggtcaggccccaccattgaggaggtagattaggggcctttccaagattgctgtttttgttttggagcttcaagactttgcatttcctagtatttctgtttgtcagttctcaatttcctgtgtttgcaatgttgaaattttttggtgaagtactgaacttgctttttttccggtttctacatgcagagatgaatttatactgccatcttacgactatttcttctttttaatacacttaactcaggccattttttaagttggttacttcaaagtaaataaactttaaaattcaa

SEQ ID NO: 1605 - protein, 641 aa, Homo sapiens
MAKAAAIGIDLGTTYSCVGVFQHGKVEIIANDQGNRTTPSYVAFTDTERLIGDAAKNQVALNPQNTVFDAKRLIGRKFGDPVVQSDMKHWPFQVINDGDKPKVQVSYKGDTKAFYPEEISSMVLTKMKEIAEAYLGYPVTNAVITVPAYFNDSQRQATKDAGVIAGLNVLRIINEPTAAAIAYGLDRTGKGERNVLIFDLGGGTFDVSILTIDDGIFEVKATAGDTHLGGEDFDNRLVNHFVEEFKRKHKKDISQNKRAVRRLRTACERAKRTLSSSTQASLEIDSLFEGIDFYTSITRARFEELCSDLFRSTLEPVEKALRDAKLDKAQIHDLVLVGGSTRIPKVQKLLQDFFNGRDLNKSINPDEAVAYGAAVQAAILMGDKSENVQDLLLLDVAPLSLGLETAGGVMTALIKRNSTIPTKQTQIFTTYSDNQPGVLIQVYEGERAMTKDNNLLGRFELSGIPPAPRGVPQIEVTFDIDANGILNVTATDKSTGKANKITITNDKGRLSKEEIERMVQEAEKYKAEDEVQRERVSAKNALESYAFNMKSAVEDEGLKGKISEADKKKVLDKCQEVISWLDANTLAEKDEFEHKRKELEQVCNPIISGLYQGAGGPGPGGFGAQGPKGGSGSGPTIEEVD

SEQ ID NO: 1606 - DNA, 2512 bp, Homo sapiens
gcctgaggagctgctgcgagggtccgcttcgtctttcgagagtgactcccgcggtcccaaggctttccagagcgaacctgtgcggctgcaggcaccggcgtgttgagtttccggcgttccgaaggactgagctcttgtcgcggatcccgtccgccgtttccagcccccagtctcagagcggagcccacagagcagggcaccggcatggccaaagccgcggcgatcggcatcgacctgggcaccacctactcctgcgtgggggtgttccaacacggcaaggtggagatcatcgccaacgaccagggcaaccgcaccacccccagctacgtggccttcacggacaccgagcggctcatcggggatgcggccaagaaccaggtggcgctgaacccgcagaacaccgtgtttgacgcgaagcggctgatcggccgcaagttcggcgacccggtggtgcagtcggacatgaagcactggcctttccaggtgatcaacgacggagacaagcccaaggtgcaggtgagctacaagggggagaccaaggcattctaccccgaggagatctcgtccatggtgctgaccaagatgaaggagatcgccgaggcgtacctgggctacccggtgaccaacgcggtgatcaccgtgccggcctacttcaacgactcgcagcgccaggccaccaaggatgcgggtgtgatcgcggggctcaacgtgctgcggatcatcaacgagcccacggccgccgccatcgcctacggcctggacagaacgggcaagggggagcgcaacgtgctcatctttgacctgggcgggggcaccttcgacgtgtccatcctgacgatcgacgacggcatcttcgaggtgaaggccacggccggggacacccacctgggtggggaggactttgacaacaggctggtgaaccacttcgtggaggagttcaagagaaaacacaagaaggacatcagccagaacaagcgagccgtgaggcggctgcgcaccgcctgcgagagggccaagaggaccctgtcgtccagcacccaggccagcctggagatcgactccctgtttgagggcatcgacttctacacgtccatcaccagggcgaggttcgaggagctgtgctccgacctgttccgaagcaccctggagcccgtggagaaggctctgcgcgacgccaagctggacaaggcccagattcacgacctggtcctggtcgggggctccacccgcatccccaaggtgcagaagctgctgcaggacttcttcaacgggcgcgacctgaacaagagcatcaaccccgacgaggctgtggcctacggggcggcggtgcaggcggccatcctgatgggggacaagtccgagaacgtgcaggacctgctgctgctggacgtggctcccctgtcgctggggctggagacggccggaggcgtgatgactgccctgatcaagcgcaactccaccatccccaccaagcagacgcagatcttcaccacctactccgacaaccaacccggggtgctgatccaggtgtacgagggcgagagggccatgacgaaagacaacaatctgttggggcgcttcgagctgagcggcatccctccggcccccaggggcgtgccccagatcgaggtgaccttcgacatcgatgccaacggcatcctgaacgtcacggccacggacaagagcaccggcaaggccagcaagatcaccatcaccaacgacaagggccgcctgagcaaggaggagatcgagcgcatggtgcaggaggcggagaagtacaaagcggaggacgaggtgcagcgcgagagggtgtcagccaagaacgccctggagtcctacgccttcaacatgaagagcgccgtggaggatgaggggctcaagggcaagatcagcgaggcggacaagaagaaggttctggacaagtgtcaagaggtcatctcgtggctggacgccaacaccttggccgagaaggacgagtttgagcacaagaggaaggagctggagcaggtgtgtaaccccatcatcagcggactgtaccagggtgccggtggtcccgggcctgggggcttcggggctcagggtcccaagggagggtctgggtcaggccctaccattgaggaggtggattaggggcctttgttctttagtatgtttgtctttgaggtggactgttgggactcaaggactttgctgctgttttcctatgtcatttctgcttcagctctttgctgcttcacttctttgtaaagttaagttgtaacctgatggtaattagctggcttcattatttttgtagtacaaccgatatgttcattagaattctttgcatttaatgttgatactgtaagggtgtttcgttccctttaaatgaatcaacactgccaccttctgtacgagtttgtttttttttttttttttttttttttttgcttggcgaaaacactacaaaggctgggaatgtatgtttttataatttgtttatttaaatatgaaaaataaaatgttaaacttt

SEQ ID NO: 1607 - protein, 641 aa, Homo sapiens
MAKAAAIGIDLGTTYSCVGVFQHGKVEIIANDQGNRTTPSYVAFTDTERLIGDAAKNQVALNPQNTVFDAKRLIGRKFGDPVVQSDMKHWPFQVINDGDKPKVQVSYKGETKAFYPEEISSMVLTKMKEIAEAYLGYPVTNAVITVPAYFNDSQRQATKDAGVIAGLNVLRIINEPTAAAIAYGLDRTGKGERNVLIFDLGGGTFDVSILTIDDGIFEVKATAGDTHLGGEDFDNRLVNHFVEEFKRKHKKDISQNKRAVRRLRTACERAKRTLSSSTQASLEIDSLFEGIDFYTSITRARFEELCSDLFRSTLEPVEKALRDAKLDKAQIHDLVLVGGSTRIPKVQKLLQDFFNGRDLNKSINPDEAVAYGAAVQAAILMGDKSENVQDLLLLDVAPLSLGLETAGGVMTALIKRNSTIPTKQTQIFTTYSDNQPGVLIQVYEGERAMTKDNNLLGRFELSGIPPAPRGVPQIEVTFDIDANGILNVTATDKSTGKASKITITNDKGRLSKEEIERMVQEAEKYKAEDEVQRERVSAKNALESYAFNMKSAVEDEGLKGKISEADKKKVLDKCQEVISWLDANTLAEKDEFEHKRKELEQVCNPIISGLYQGAGGPGPGGFGAQGPKGGSGSGPTIEEVD

SEQ ID NO: 1608 - DNA, 842 bp, Homo sapiens
ctttttgcgaagtgggctcgtgggttggcagtatgagagttgtaatggcccgactgttgagtgagggggagcaggggatcccaacggcttgcgctgcctttgcgcagcagccggcgggcggccacgtcgcggcctggctggggtaggagagggcggtccccagtgcagttgggtgaactaccgttgcacactggagtttctggtgtctttgcttggaactgacctagctcgtggcagggggaactcggctagcggccccacagcccctgctgactcaaaacaactgagttgtaagacgttcatcgccgtgttatccttgagtaaagaagcgggcttttgccatgttgtccaggctggtctctactcctgggctcaagcagtcctcctgcctcagtctcccaaagtgctggaattacagggaatgaactctggaagcccagccagggacaatgcaccttcacagagattctgcactaatctgagtgaaggtctaaggtttggaatctccccctcatggagagaagctttgtatggctgtcatgcttagacagtgattcctgcaacttgaccttcaggctgggagaggtggagagccatgcctgttctccttccttgctatggaatttgctgacacaatatcttccgcctggtgctgggcatatcctaagaacttacaactttcctgtattatcctgtgtgagcagctgtcaccttattgggggaaaaatgcctgaaaattagggggcacttcaagtagatagcttctatttcctatatttgtcttatatacaagtatttgcttttatcaaaataattccaataaagcattttaaagtaaagaa

SEQ ID NO: 1609 - protein, 75 aa, Homo sapiens
MERSFVWLSCLDSDSCNLTFRLGEVESHACSPSLLWNLLTQYLPPGAGHILRTYNFPVLSCVSSCHLIGGKMPEN

SEQ ID NO: 1610 - DNA, 748 bp, Homo sapiens
ctttttgcgaagtgggctcgtgggttggcagtatgagagttgtaatggcccgactgttgagtgagggggagcaggggatcccaacggcttgcgctgcctttgcgcagcagccggcgggcggccacgtcgcggcctggctggggtaggagagggcggtccccagtgcagttgggtgaactaccgttgcacactggagtttctggtgtctttgcttggaactgacctagctcgtggcagggggaactcggctagcggccccacagcccctgctgactcaaaacaactgagttgtaagacgttcatcgccgtgttatccttgagtaaagaatgaactctggaagcccagccagggacaatgcaccttcacagagattctgcactaatctgagtgaaggtctaaggtttggaatctccccctcatggagagaagctttgtatggctgtcatgcttagacagtgattcctgcaacttgaccttcaggctgggagaggtggagagccatgcctgttctccttccttgctatggaatttgctgacacaatatcttccgcctggtgctgggcatatcctaagaacttacaactttcctgtattatcctgtgtgagcagctgtcaccttattgggggaaaaatgcctgaaaattagggggcacttcaagtagatagcttctatttcctatatttgtcttatatacaagtatttgcttttatcaaaataattccaataaagcattttaaagtaaagaa

SEQ ID NO: 1611 - protein, 75 aa, Homo sapiens; identical to SEQ ID NO: 1609

SEQ ID NO: 1612 - DNA, 1943 bp, Homo sapiens
cgggaagcgcggcggggcctccagaccggggcgggcttaagggtgacatctgcgctttaaagggtccgggtcagctgactcccgactctgtggagtctagctgccagggtcgcggcagctgcggggagagatgactggggagcgacccagcacggcgctcccggacagacgctgggggccgcggattctgggcttctggggaggctgtagggtttgggtgtttgccgcgatcttcctgctgctgtctctggcagcctcctggtccaaggctgagaacgacttcggtctggtgcagccgctggtgaccatggagcaactgctgtgggtgagcgggagacagatcggctcagtggacaccttccgcatcccgctcatcacagccactccgcggggcactcttctcgcctttgctgaggcgaggaaaatgtcctcatccgatgagggggccaagttcatcgccctgcggaggtccatggaccagggcagcacatggtctcctacagcgttcattgtcaatgatggggatgtccccgatgggctgaaccttggggcagtagtgagcgatgttgagacaggagtagtatttcttttctactccctttgtgctcacaaggccggctgccaggtggcctctaccatgttggtatggagcaaggatgatggtgtttcctggagcacaccccggaatctctccctggatattggcactgaagtgtttgcccctggaccgggctctggtattcagaaacagcgggagccacggaagggccgcctcatcgtgtgtggccatgggacgctggagcgggacggagtcttctgtctcctcagcgatgatcatggtgcctcctggcgctacggaagtggggtcagcggcatcccctacggtcagcccaagcaggaaaatgatttcaatcctgatgaatgccagccctatgagctcccagatggctcagtcgtcatcaatgcccgaaaccagaacaactaccactgccactgccgaattgtcctccgcagctatgatgcctgtgatacactaaggccccgtgatgtgaccttcgaccctgagctcgtggaccctgtggtagctgcaggagctgtagtcaccagctccggcattgtcttcttctccaacccagcacatccagagttccgagtgaacctgaccctgcgatggagcttcagcaatggtacctcatggcggaaagagacagtccagctatggccaggccccagtggctattcatccctggcaaccctggagggcagcatggatggagaggagcaggccccccagctctacgtcctgtatgagaaaggccggaaccactacacagagagcatctccgtggccaaaatcagtgtctatgggacactctgagctgtgccactgccacaggggtattctgccttcaggactctgccttcaggaacacgggtctgtagagggtctgctggagacgcctgaaagacagttccatcttcctttagactccagccttggcaaaatcaccttccctttaccagggaaatcacttcctttaggactgaaagctaggcgtcctctcccacaaaaaagtcctgccctcatctgagaatactgtctttccatatggctaagtgtggccccaccaccctctctgccctcccgggacattgattggtcctgtcttgggcaggtctagtgagctgtagaattgaatcaatgtgaactcagggaactggggaaggctgagcctcctctttggtgttgcggtaagataaccgacagggctggtgaaagtccccagatggcaggatatttggtttcagagtaaggactaggtgcaccaccatgactgactatcaatcaaaatgtttgtaacttaaaatttttaatgaaggataatgaatatttgtagagtctctatggttctgtcaatgcaaaaaaaaaaaaaaaaaaaaaa

SEQ ID NO: 1613 - protein, 415 aa, Homo sapiens
MTGERPSTALPDRRWGPRILGFWGGCRVWVFAAIFLLLSLAASWSKAENDFGLVQPLVTMEQLLWVSGRQIGSVDTFRIPLITATPRGTLLAFAEARKMSSSDEGAKFIALRRSMDQGSTWSPTAFIVNDGDVPDGLNLGAVVSDVETGVVFLFYSLCAHKAGCQVASTMLVWSKDDGVSWSTPRNLSLDIGTEVFAPGPGSGIQKQREPRKGRLIVCGHGTLERDGVFCLLSDDHGASWRYGSGVSGIPYGQPKQENDFNPDECQPYELPDGSVVINARNQNNYHCHCRIVLRSYDACDTLRPRDVTFDPELVDPVVAAGAVVTSSGIVFFSNPAHPEFRVNLTLRWSFSNGTSWRKETVQLWPGPSGYSSLATLEGSMDGEEQAPQLYVLYEKGRNHYTESISVAKISVYGTL

SEQ ID NO: 1614 - DNA, 2347 bp, Homo sapiens
atggggggaaagcagcgggacgaggatgacgaggcctacgggaagccagtcaaatacgacccctcctttcgaggccccatcaagaacagaagctgcacagatgtcatctgctgcgtcctcttcctgctcttcattctaggttacatcgtggtggggattgtggcctggttgtatggagacccccggcaagtcctctaccccaggaactctactggggcctactgtggcatgggggagaacaaagataagccgtatctcctgtacttcaacatcttcagctgcatcctgtccagcaacatcatctcagttgctgagaacggcctacagtgccccacaccccaggtgtgtgtgtcctcctgcccggaggacccatggactgtgggaaaaaacgagttctcacagactgttggggaagtcttctatacaaaaaacaggaacttttgtctgccaggggtaccctggaatatgacggtgatcacaagcctgcaacaggaactctgccccagtttcctcctcccctctgctccagctctgggacgctgctttccatggaccaacattactccaccggcgctcccagggatcaccaatgacaccaccatacagcaggggatcagcggtcttattgacagcctcaatgcccgagacatcagtgttaagatctttgaagattttgcccagtcctggtattggattcttgttgccctgggggtggctctggtcttgagcctactgtttatcttgcttctgcgcctggtggctgggcccctggtgctggtgctgatcctgggagtgctgggcgtgctggcatatggcatctactactgctgggaggagtaccgagtgctgcgggacaagggcgcctccatctcccagctgggtttcaccaccaacctcagtgcctaccagagcgtgcaggagacctggctggccgccctgatcgtgttggcggtgcttgaagccatcctgctgctggtgctcatcttcctgcggcagcggattcgtattgccatcgccctcctgaaggaggccagcaaggctgtgggacagatgatgtctaccatgttctacccactggtcacctttgtcctcctcctcatctgcattgcctactgggccatgactgctctgtatcctctgcccacgcagccagccactcttggatatgtgctctgggcatccaacatcagctcccccggctgtgagaaagtgccaataaatacatcatgcaaccccacggcccaccttgtgaactcctcgtgcccagggctgatgtgcgtcttccagggctactcatccaaaggcctaatccaacgttctgtcttcaatctgcaaatctatggggtcctggggctcttctggacccttaactgggtactggccctgggccaatgcgtcctcgctggagcctttgcctccttctactgggccttccacaagccccaggacatccctaccttccccttaatctctgccttcatccgcacactccgttaccacactgggtcattggcatttggagccctcatcctgacccttgtgcagatagcccgggtcatcttggagtatattgaccacaagctcagaggagtgcagaaccctgtagcccgctgcatcatgtgctgtttcaagtgctgcctctggtgtctggaaaaatttatcaagttcctaaaccgcaatgcatacatcatgatcgccatctacgggaagaatttctgtgtctcagccaaaaatgcgttcatgctactcatgcgaaacattgtcagggtggtcgtcctggacaaagtcacagacctgctgctgttctttgggaagctgctggtggtcggaggcgtgggggtcctgtccttcttttttttctccggtcgcatcccggggctgggtaaagactttaagagcccccacctcaactattactggctgcccatcatgacctccatcctgggggcctatgtcatcgccagcggcttcttcagcgttttcggcatgtgtgtggacacgctcttcctctgcttcctggaagacctggagcggaacaacggctccctggaccggccctactacatgtccaagagccttctaaagattctgggcaagaagaacgaggcgcccccggacaacaagaagaggaagaagtgacagctccggccctgatccaggactgcaccccacccccaccgtccagccatccaacctcacttcgccttacaggtctccattttgtggtaaaaaaaggttttaggccaggcgccgtggctcacgcctgtaatccaacactttgagaggctgaggcgggcggatcacctgagtcaggagttcgagaccagcctggccaacatggtgaaac

SEQ ID NO: 1615 - protein, 712 aa, Homo sapiens
MGGKQRDEDDEAYGKPVKYDPSFRGPIKNRSCTDVICCVLFLLFILGYIVVGIVAWLYGDPRQVLYPRNSTGAYCGMGENKDKPYLLYFNIFSCILSSNIISVAENGLQCPTPQVCVSSCPEDPWTVGKNEFSQTVGEVFYTKNRNFCLPGVPWNMTVITSLQQELCPSFLLPSAPALGRCFPWTNITPPALPGITNDTTIQQGISGLIDSLNARDISVKIFEDFAQSWYWILVALGVALVLSLLFILLLRLVAGPLVLVLILGVLGVLAYGIYYCWEEYRVLRDKGASISQLGFTTNLSAYQSVQETWLAALIVLAVLEAILLLVLIFLRQRIRIAIALLKEASKAVGQMMSTMFYPLVTFVLLLICIAYWAMTALYPLPTQPATLGYVLWASNISSPGCEKVPINTSCNPTAHLVNSSCPGLMCVFQGYSSKGLIQRSVFNLQIYGVLGLFWTLNWVLALGQCVLAGAFASFYWAFHKPQDIPTFPLISAFIRTLRYHTGSLAFGALILTLVQIARVILEYIDHKLRGVQNPVARCIMCCFKCCLWCLEKFIKFLNRNAYIMIAIYGKNFCVSAKNAFMLLMRNIVRVVVLDKVTDLLLFFGKLLVVGGVGVLSFFFFSGRIPGLGKDFKSPHLNYYWLPIMTSILGAYVIASGFFSVFGMCVDTLFLCFLEDLERNNGSLDRPYYMSKSLLKILGKKNEAPPDNKKRKK

SEQ ID NO: 1616 - DNA, 2579 bp, Homo sapiens
actccggagactgagccatggggggaaagcagcgggacgaggatgacgaggcctacgggaagccagtcaaatacgacccctcctttcgaggccccatcaagaacagaagctgcacagatgtcatctgctgcgtcctcttcctgctcttcattctaggttacatcgtggtggggattgtggcctggttgtatggagacccccggcaagtcctctaccccaggaactctactggggcctactgtggcatgggggagaacaaagataagccgtatctcctgtacttcaacatcttcagctgcatcctgtccagcaacatcatctcagttgctgagaacggcctacagtgccccacaccccaggtgtgtgtgtcctcctgcccggaggacccatggactgtgggaaaaaacgagttctcacagactgttggggaagtcttctatacaaaaagcagcaacttttgtctgccaggggtaccctggaatatgacggtgatcacaagcctgcaacaggaactctgccccagtttcctcctcccctctgctccagctctgggacgctgctttccatggaccaacattactccaccggcgctcccagggatcaccaatgacaccaccatacagcaggggatcagcggtcttattgacagcctcaatgcccgagacatcagtgttaagatctttgaagattttgcccagtcctggtattggattcttgttgccctgggggtggctctggtcttgagcctactgtttatcttgcttctgcgcctggtggctgggcccctggtgctggtgctgatcctgggagtgctgggcgtgctggcatacggcatctactactgctgggaggagtaccgagtgctgcgggacaagggcgcctccatctcccagctgggtttcaccaccaacctcagtgcctaccagagcgtgcaggagacctggctggccgccctgatcgtgttggcggtgcttgaagccatcctgctgctggtgctcatcttcctgcggcagcggattcgtattgccatcgccctcctgaaggaggccagcaaggctgtgggacagatgatgtctaccatgttctacccactggtcacctttgtcctcctcctcatctgcattgcctactgggccatgactgctctgtacctggctacatcggggcaaccccagtatgtgctctgggcatccaacatcagctcccccggctgtgagaaagtgccaataaatacatcatgcaaccccacggcccaccttgtgaactcctcgtgcccagggctgatgtgcgtcttccagggctactcatccaaaggcctaatccaacgttctgtcttcaatctgcaaatctatggggtcctggggctcttctggacccttaactgggtactggccctgggccaatgcgtcctcgctggagcctttgcctccttctactgggccttccacaagccccaggacatccctaccttccccttaatctctgccttcatccgcacactccgttaccacactgggtcattggcatttggagccctcatcctgacccttgtgcagatagcccgggtcatcttggagtatattgaccacaagctcagaggagtgcagaaccctgtagcccgctgcatcatgtgctgtttcaagtgctgcctctggtgtctggaaaaatttatcaagttcctaaaccgcaatgcatacatcatgatcgccatctacgggaagaatttctgtgtctcagccaaaaatgcgttcatgctactcatgcgaaacattgtcagggtggtcgtcctggacaaagtcacagacctgctgctgttctttgggaagctgctggtggtcggaggcgtgggggtcctgtccttcttttttttctccggtcgcatcccggggctgggtaaagactttaagagcccccacctcaactattactggctgcccatcatgacctccatcctgggggcctatgtcatcgccagcggcttcttcagcgttttcggcatgtgtgtggacacgctcttcctctgcttcctggaagacctggagcggaacaacggctccctggaccggccctactacatgtccaagagccttctaaagattctgggcaagaagaacgaggcgcccccggacaacaagaagaggaagaagtgacagctccggccctgatccaggactgcaccccacccccaccgtccagccatccaacctcacttcgccttacaggtctccattttgtggtaaaaaagggttttaggccaggcgccgtggctcacgcctgtaatccaacactttgagaggctgaggcgggcggatcacctgagtcaggagttcgagaccagcctggccaacatggtgaaacctccgtctctattaaaaatacaaaaattagccgagagtggtggcatgcacctgtcatcccagctactcgggaggctgaggcaggagaatcgcttgaacccgggaggcagaggttgcagtgagccgagatcgcgccactgcactccaacctgggtgacagactctgtctccaaaacaaaacaaacaaacaaaaagattttattaaagatattttgttaactc

SEQ ID NO: 1617 - protein, 710 aa, Homo sapiens
MGGKQRDEDDEAYGKPVKYDPSFRGPIKNRSCTDVICCVLFLLFILGYIVVGIVAWLYGDPRQVLYPRNSTGAYCGMGENKDKPYLLYFNIFSCILSSNIISVAENGLQCPTPQVCVSSCPEDPWTVGKNEFSQTVGEVFYTKSSNFCLPGVPWNMTVITSLQQELCPSFLLPSAPALGRCFPWTNITPPALPGITNDTTIQQGISGLIDSLNARDISVKIFEDFAQSWYWILVALGVALVLSLLFILLLRLVAGPLVLVLILGVLGVLAYGIYYCWEEYRVLRDKGASISQLGFTTNLSAYQSVQETWLAALIVLAVLEAILLLVLIFLRQRIRIAIALLKEASKAVGQMMSTMFYPLVTFVLLLICIAYWAMTALYLATSGQPQYVLWASNISSPGCEKVPINTSCNPTAHLVNSSCPGLMCVFQGYSSKGLIQRSVFNLQIYGVLGLFWTLNWVLALGQCVLAGAFASFYWAFHKPQDIPTFPLISAFIRTLRYHTGSLAFGALILTLVQIARVILEYIDHKLRGVQNPVARCIMCCFKCCLWCLEKFIKFLNRNAYIMIAIYGKNFCVSAKNAFMLLMRNIVRVVVLDKVTDLLLFFGKLLVVGGVGVLSFFFFSGRIPGLGKDFKSPHLNYYWLPIMTSILGAYVIASGFFSVFGMCVDTLFLCFLEDLERNNGSLDRPYYMSKSLLKILGKKNEAPPDNKKRKK

SEQ ID NO: 1618 - DNA, 3994 bp, Homo sapiens
gcaagcggcgatggcggcggcggcgggagctgcagcggcggcggccgccgagggggaggcccccgctgagatgggggcgctgctgctggagaaggaaaccagaggagccaccgagagagttcatggctctttgggggacacccctcgtagtgaagaaaccctgcccaaggccaaccccgactccctggagcctgctggcccctcatctccagcctctgtcactgtcactgttggtgatgagggggctgacacccctgtaggggctacaccactcattggggatgaatctgagaatcttgagggagatggggacctccgtgggggccggatcctgctgggccatgccacaaagtcattcccctcttcccccagcaaggggggttcctgtcctagccgggccaagatgtcaatgacaggggcgggaaaatcacctccatctgtccagagtttggctatgaggctactgagtatgccaggagcccagggagctgcagcagcagggtctgaaccccctccagccaccacgagcccagagggacagcccaaggtccaccgagcccgcaaaaccatgtccaaaccaggaaatggacagcccccggtccctgagaagcggccccctgaaatacagcatttccgcatgagtgatgatgtccactcactgggaaaggtgacctcagatctggccaaaaggaggaagctgaactcaggaggtggcctgtcggaggagttaggttctgcccggcgttcaggagaagtgaccctgacgaaaggggaccccgggtccctggaggagtgggagacggtggtgggtgatgacttcagtctctactatgattcctactctgtggatgagcgcgtggactccgacagcaagtctgaagttgaagctctaactgaacaactaagtgaagaggaggaggaggaagaggaggaagaagaagaagaggaagaggaggaggaagaggaagaagaagaggaagatgaggagtcagggaatcagtcagataggagtggttccagtggccggcgcaaggccaagaagaaatggcgaaaagacagcccatgggtgaagccgtctcggaaacggcgcaagcgggagcctccgcgggccaaggagccacgaggagtgaatggtgtgggctcctcaggccccagtgagtacatggaggtccctctggggtccctggagctgcccagcgaggggaccctctcccccaaccacgctggggtgtccaatgacacatcttcgctggagacagagcgagggtttgaggagttgcccctgtgcagctgccgcatggaggcacccaagattgaccgcatcagcgagagggcggggcacaagtgcatggccactgagagtgtggacggagagctgtcaggctgcaatgccgccatcctcaagcgggagaccatgaggccatccagccgtgtggccctgatggtgctctgtgagacccaccgcgcccgcatggtcaaacaccactgctgcccgggctgcggctacttctgcacggcgggcaccttcctggagtgccaccctgacttccgtgtggcccaccgcttccacaaggcctgtgtgtctcagctgaatgggatggtcttctgtccccactgtggggaggatgcttctgaagctcaagaggtgaccatcccccggggtgacggggtgaccccaccggccggcactgcagctcctgcacccccacccctgtcccaggatgtccccgggagagcagacacttctcagcccagtgcccggatgcgagggcatggggaaccccggcgcccgccctgcgatcccctggctgacaccattgacagctcagggccctccctgaccctgcccaatgggggctgcctttcagccgtggggctgccactggggccaggccgggaggccctggaaaaggccctggtcatccaggagtcagagaggcggaagaagctccgtttccaccctcggcagttgtacctgtccgtgaagcagggcgagctgcagaaggtgatcctgatgctgttggacaacctggaccccaacttccagagcgaccagcagagcaagcgcacgcccctgcatgcagccgcccagaagggctccgtggagatctgccatgtgctgctgcaggctggagccaacataaatgcagtggacaaacagcagcggacgccactgatggaggccgtggtgaacaaccacctggaggtagcccgttacatggtgcagcgtggtggctgtgtctatagcaaggaggaggacggttccacctgcctccaccacgcagccaaaatcgggaacttggagatggtcagcctgctgctgagcacaggacaggtggacgtcaacgcccaggacagtggggggtggacgcccatcatctgggctgcagagcacaagcacatcgaggtgatccgcatgctactgacgcggggcgccgacgtcaccctcactgacaacgaggagaacatctgcctgcactgggcctccttcacgggcagcgccgccatcgccgaagtccttctgaatgcgcgctgtgacctccatgctgtcaactaccatggggacacccccctgcacatcgcagctcgggagagctaccatgactgcgtgctgttattcctgtcacgtggggccaaccctgagctgcggaacaaagagggggacacagcatgggacctgactcccgagcgctccgacgtgtggtttgcgcttcaactcaaccgcaagctccgacttggggtgggaaatcgggccatccgcacagagaagatcatctgccgggacgtggctcggggctatgagaacgtgcccattccctgtgtcaacggtgtggatggggagccctgccctgaggattacaagtacatctcagagaactgcgagacgtccaccatgaacatcgatcgcaacatcacccacctgcagcactgcacgtgtgtggacgactgctctagctccaactgcctgtgcggccagctcagcatccggtgctggtatgacaaggatgggcgattgctccaggaatttaacaagattgagcctccgctgattttcgagtgtaaccaggcgtgctcatgctggagaaactgcaagaaccgggtcgtacagagtggcatcaaggtgcggctacagctctaccgaacagccaagatgggctggggggtccgcgccctgcagaccatcccacaggggaccttcatctgcgagtatgtcggggagctgatctctgatgctgaggctgatgtgagagaggatgattcttacctcttcgacttagacaacaaggatggagaggtgtactgcatagatgcccgttactatggcaacatcagccgcttcatcaaccacctgtgtgaccccaacatcattcccgtccgggtcttcatgctgcaccaagacctgcgatttccacgcatcgccttcttcagttcccgagacatccggactggggaggagctagggtttgactatggcgaccgcttctgggacatcaaaagcaaatatttcacctgccaatgtggctctgagaagtgcaagcactcagccgaagccattgccctggagcagagccgtctggcccgcctggacccacaccctgagctgctgcccgagctcggctccctgccccctgtcaacacatgagaacggaccacaccctctctccccagcatggatggccacagctcagccgcctcctctgccaccagctgctcgcagcccatgcctgggggtgctgccatcttctctccccaccaccctttcacacattcctgaccagagatcccagccaggccctggaggtctgacagcccctccctcccagagctggttcctccctgggagggcaacttcagggctggccaccccccgtgttccccatcctcagttgaagtttgatgaattgaagtcgggcctctatgccaactggttccttttgttctcaataaatgttgggtttggtaataaaaaaaaaaaaaaaaaaaaaaaaaaaaa

SEQ ID NO: 1619 - protein, 1210 aa, Homo sapiens
MAAAAGAAAAAAAEGEAPAEMGALLLEKETRGATERVHGSLGDTPRSEETLPKANPDSLEPAGPSSPASVTVTVGDEGADTPVGATPLIGDESENLEGDGDLRGGRILLGHATKSFPSSPSKGGSCPSRAKMSMTGAGKSPPSVQSLAMRLLSMPGAQGAAAAGSEPPPATTSPEGQPKVHRARKTMSKPGNGQPPVPEKRPPEIQHFRMSDDVHSLGKVTSDLAKRRKLNSGGGLSEELGSARRSGEVTLTKGDPGSLEEWETVVGDDFSLYYDSYSVDERVDSDSKSEVEALTEQLSEEEEEEEEEEEEEEEEEEEEEEEEDEESGNQSDRSGSSGRRKAKKKWRKDSPWVKPSRKRRKREPPRAKEPRGVNGVGSSGPSEYMEVPLGSLELPSEGTLSPNHAGVSNDTSSLETERGFEELPLCSCRMEAPKIDRISERAGHKCMATESVDGELSGCNAAILKRETMRPSSRVALMVLCETHRARMVKHHCCPGCGYFCTAGTFLECHPDFRVAHRFHKACVSQLNGMVFCPHCGEDASEAQEVTIPRGDGVTPPAGTAAPAPPPLSQDVPGRADTSQPSARMRGHGEPRRPPCDPLADTIDSSGPSLTLPNGGCLSAVGLPLGPGREALEKALVIQESERRKKLRFHPRQLYLSVKQGELQKVILMLLDNLDPNFQSDQQSKRTPLHAAAQKGSVEICHVLLQAGANINAVDKQQRTPLMEAVVNNHLEVARYMVQRGGCVYSKEEDGSTCLHHAAKIGNLEMVSLLLSTGQVDVNAQDSGGWTPIIWAAEHKHIEVIRMLLTRGADVTLTDNEENICLHWASFTGSAAIAEVLLNARCDLHAVNYHGDTPLHIAARESYHDCVLLFLSRGANPELRNKEGDTAWDLTPERSDVWFALQLNRKLRLGVGNRAIRTEKIICRDVARGYENVPIPCVNGVDGEPCPEDYKYISENCETSTMNIDRNITHLQHCTCVDDCSSSNCLCGQLSIRCWYDKDGRLLQEFNKIEPPLIFECNQACSCWRNCKNRVVQSGIKVRLQLYRTAKMGWGVRALQTIPQGTFICEYVGELISDAEADVREDDSYLFDLDNKDGEVYCIDARYYGNISRFINHLCDPNIIPVRVFMLHQDLRFPRIAFFSSRDIRTGEELGFDYGDRFWDIKSKYFTCQCGSEKCKHSAEAIALEQSRLARLDPHPELLPELGSLPPVNT

SEQ ID NO: 1620 - DNA, 3892 bp, Homo sapiens
gcaagcggcgatggcggcggcggcgggagctgcagcggcggcggccgccgagggggaggcccccgctgagatgggggcgctgctgctggagaaggaaaccagaggagccaccgagagagttcatggctctttgggggacacccctcgtagtgaagaaaccctgcccaaggccaaccccgactccctggagcctgctggcccctcatctccagcctctgtcactgtcactgttggtgatgagggggctgacacccctgtaggggctacaccactcattggggatgaatctgagaatcttgagggagatggggacctccgtgggggccggatcctgctgggccatgccacaaagtcattcccctcttcccccagcaaggggggttcctgtcctagccgggccaagatgtcaatgacaggggcgggaaaatcacctccatctgtccagagtttggctatgaggctactgagtatgccaggagcccagggagctgcagcagcagggtctgaaccccctccagccaccacgagcccagagggacagcccaaggtccaccgagcccgcaaaaccatgtccaaaccaggaaatggacagcccccggtccctgagaagcggccccctgaaatacagcatttccgcatgagtgatgatgtccactcactgggaaaggtgacctcagatctggccaaaaggaggaagctgaactcaggaggtggcctgtcggaggagttaggttctgcccggcgttcaggagaagtgaccctgacgaaaggggaccccgggtccctggaggagtgggagacggtggtgggtgatgacttcagtctctactatgattcctactctgtggatgagcgcgtggactccgacagcaagtctgaagttgaagctctaactgaacaactaagtgaagaggaggaggaggaagaggaggaagaagaagaagaggaagaggaggaggaagaggaagaagaagaggaagatgaggagtcagggaatcagtcagataggagtggttccagtggccggcgcaaggccaagaagaaatggcgaaaagacagcccatgggtgaagccgtctcggaaacggcgcaagcgggagcctccgcgggccaaggagccacgaggagtgtccaatgacacatcttcgctggagacagagcgagggtttgaggagttgcccctgtgcagctgccgcatggaggcacccaagattgaccgcatcagcgagagggcggggcacaagtgcatggccactgagagtgtggacggagagctgtcaggctgcaatgccgccatcctcaagcgggagaccatgaggccatccagccgtgtggccctgatggtgctctgtgagacccaccgcgcccgcatggtcaaacaccactgctgcccgggctgcggctacttctgcacggcgggcaccttcctggagtgccaccctgacttccgtgtggcccaccgcttccacaaggcctgtgtgtctcagctgaatgggatggtcttctgtccccactgtggggaggatgcttctgaagctcaagaggtgaccatcccccggggtgacggggtgaccccaccggccggcactgcagctcctgcacccccacccctgtcccaggatgtccccgggagagcagacacttctcagcccagtgcccggatgcgagggcatggggaaccccggcgcccgccctgcgatcccctggctgacaccattgacagctcagggccctccctgaccctgcccaatgggggctgcctttcagccgtggggctgccactggggccaggccgggaggccctggaaaaggccctggtcatccaggagtcagagaggcggaagaagctccgtttccaccctcggcagttgtacctgtccgtgaagcagggcgagctgcagaaggtgatcctgatgctgttggacaacctggaccccaacttccagagcgaccagcagagcaagcgcacgcccctgcatgcagccgcccagaagggctccgtggagatctgccatgtgctgctgcaggctggagccaacataaatgcagtggacaaacagcagcggacgccactgatggaggccgtggtgaacaaccacctggaggtagcccgttacatggtgcagcgtggtggctgtgtctatagcaaggaggaggacggttccacctgcctccaccacgcagccaaaatcgggaacttggagatggtcagcctgctgctgagcacaggacaggtggacgtcaacgcccaggacagtggggggtggacgcccatcatctgggctgcagagcacaagcacatcgaggtgatccgcatgctactgacgcggggcgccgacgtcaccctcactgacaacgaggagaacatctgcctgcactgggcctccttcacgggcagcgccgccatcgccgaagtccttctgaatgcgcgctgtgacctccatgctgtcaactaccatggggacacccccctgcacatcgcagctcgggagagctaccatgactgcgtgctgttattcctgtcacgtggggccaaccctgagctgcggaacaaagagggggacacagcatgggacctgactcccgagcgctccgacgtgtggtttgcgcttcaactcaaccgcaagctccgacttggggtgggaaatcgggccatccgcacagagaagatcatctgccgggacgtggctcggggctatgagaacgtgcccattccctgtgtcaacggtgtggatggggagccctgccctgaggattacaagtacatctcagagaactgcgagacgtccaccatgaacatcgatcgcaacatcacccacctgcagcactgcacgtgtgtggacgactgctctagctccaactgcctgtgcggccagctcagcatccggtgctggtatgacaaggatgggcgattgctccaggaatttaacaagattgagcctccgctgattttcgagtgtaaccaggcgtgctcatgctggagaaactgcaagaaccgggtcgtacagagtggcatcaaggtgcggctacagctctaccgaacagccaagatgggctggggggtccgcgccctgcagaccatcccacaggggaccttcatctgcgagtatgtcggggagctgatctctgatgctgaggctgatgtgagagaggatgattcttacctcttcgacttagacaacaaggatggagaggtgtactgcatagatgcccgttactatggcaacatcagccgcttcatcaaccacctgtgtgaccccaacatcattcccgtccgggtcttcatgctgcaccaagacctgcgatttccacgcatcgccttcttcagttcccgagacatccggactggggaggagctagggtttgactatggcgaccgcttctgggacatcaaaagcaaatatttcacctgccaatgtggctctgagaagtgcaagcactcagccgaagccattgccctggagcagagccgtctggcccgcctggacccacaccctgagctgctgcccgagctcggctccctgccccctgtcaacacatgagaacggaccacaccctctctccccagcatggatggccacagctcagccgcctcctctgccaccagctgctcgcagcccatgcctgggggtgctgccatcttctctccccaccaccctttcacacattcctgaccagagatcccagccaggccctggaggtctgacagcccctccctcccagagctggttcctccctgggagggcaacttcagggctggccaccccccgtgttccccatcctcagttgaagtttgatgaattgaagtcgggcctctatgccaactggttccttttgttctcaataaatgttgggtttggtaataaaaaaaaaaaaaaaaaaaaaaaaaaaaa

SEQ ID NO: 1621 - protein, 1176 aa, Homo sapiens
MAAAAGAAAAAAAEGEAPAEMGALLLEKETRGATERVHGSLGDTPRSEETLPKANPDSLEPAGPSSPASVTVTVGDEGADTPVGATPLIGDESENLEGDGDLRGGRILLGHATKSFPSSPSKGGSCPSRAKMSMTGAGKSPPSVQSLAMRLLSMPGAQGAAAAGSEPPPATTSPEGQPKVHRARKTMSKPGNGQPPVPEKRPPEIQHFRMSDDVHSLGKVTSDLAKRRKLNSGGGLSEELGSARRSGEVTLTKGDPGSLEEWETVVGDDFSLYYDSYSVDERVDSDSKSEVEALTEQLSEEEEEEEEEEEEEEEEEEEEEEEEDEESGNQSDRSGSSGRRKAKKKWRKDSPWVKPSRKRRKREPPRAKEPRGVSNDTSSLETERGFEELPLCSCRMEAPKIDRISERAGHKCMATESVDGELSGCNAAILKRETMRPSSRVALMVLCETHRARMVKHHCCPGCGYFCTAGTFLECHPDFRVAHRFHKACVSQLNGMVFCPHCGEDASEAQEVTIPRGDGVTPPAGTAAPAPPPLSQDVPGRADTSQPSARMRGHGEPRRPPCDPLADTIDSSGPSLTLPNGGCLSAVGLPLGPGREALEKALVIQESERRKKLRFHPRQLYLSVKQGELQKVILMLLDNLDPNFQSDQQSKRTPLHAAAQKGSVEICHVLLQAGANINAVDKQQRTPLMEAVVNNHLEVARYMVQRGGCVYSKEEDGSTCLHHAAKIGNLEMVSLLLSTGQVDVNAQDSGGWTPIIWAAEHKHIEVIRMLLTRGADVTLTDNEENICLHWASFTGSAAIAEVLLNARCDLHAVNYHGDTPLHIAARESYHDCVLLFLSRGANPELRNKEGDTAWDLTPERSDVWFALQLNRKLRLGVGNRAIRTEKIICRDVARGYENVPIPCVNGVDGEPCPEDYKYISENCETSTMNIDRNITHLQHCTCVDDCSSSNCLCGQLSIRCWYDKDGRLLQEFNKIEPPLIFECNQACSCWRNCKNRVVQSGIKVRLQLYRTAKMGWGVRALQTIPQGTFICEYVGELISDAEADVREDDSYLFDLDNKDGEVYCIDARYYGNISRFINHLCDPNIIPVRVFMLHQDLRFPRIAFFSSRDIRTGEELGFDYGDRFWDIKSKYFTCQCGSEKCKHSAEAIALEQSRLARLDPHPELLPELGSLPPVNT

SEQ ID NO: 1622 - DNA, 1931 bp, Homo sapiens
cgcccacgcggagccggccccgcgcgcgcgcgcgtcccgtgcatccccgcgcctgcgcgctgcccaggccctgcccgtgtgtgggggtcgctgccgaccccgggggggggtggggaaaataagggattaaaaaaacagcgcgcggaaccgggccagggttgcccacccccgccacaatggcctctggggtggaagtcctgcgcttccagctgcccggccacgaggccgcaacgctacggaacatgaaccagctccgggcagaggagcggttctgcgacgtgaccattgtggccgacagcctcaagtttcgaggccacaaggtcatcttggccgcctgctcacccttcctgcgggaccagttcctgctgaaccccagctcggagctgcaggtctccctgatgcacagtgcacgcatcgtggccgacttgctcctctcctgctacacgggcgccttggaattcgctgttagggacatcgtcaactaccttacagccgcctcctacctgcagatggagcacgtggtggagaaatgccggaatgccctcagccagttcattgagcccaaaataggcctcaaagaggatggggtcagtgaggctagccttgtgagcagcatcagcgccaccaagtccctcctccctccagccaggaccccaaagccagccccgaagcccccacccccacctcctctaccccctccactcctgcggccagtgaagctggagttcccactggatgaagacttggagctgaaagccgaggaagaggatgaggatgaggatgaggacgtgtctgacatctgcatcgtcaaggtggagtcggccctggaggtggcacaccggctcaaaccccctggaggcctgggagggggtctgggcattggaggctccgtgggtggccaccttggggagctggcccagagcagcgttccccccagcactgtagccccaccgcagggtgtggtgaaggcctgctatagcctgtcggaagatgcagaaggggagggcctgctgttgattcccggaggccgggccagcgtgggggccacctcgggcctggtggaagcagcagcggtggccatggctgcccggggggcggggggcagcctgggggcggggggcagccggggacccctgcctgggggcttctcaggtggaaaccccttaaagaacatcaagtgcaccaagtgcccggaagtgttccagggcgtggagaagctggtcttccacatgcgggcgcagcacttcatcttcatgtgccctcgctgtggcaagcagttcaaccacagcagcaacctcaaccgccacatgaacgtgcatcgtggtgtcaagtcacactcgtgcggcatctgcggcaagtgcttcacacagaagtccacccttcacgaccacctcaacctgcactcgggagcgcggccctaccgctgctcctactgcgacgtgcgcttcgcccacaagcctgccattaggcggcacctcaaggagcaacacggcaagaccacggccgagaacgtgctggaggccagtgtggccgagattaacgtcctcatccgctagccgcgcaggcgtggaggccaggaggctggggcccctgggctgcgtggaaaaagggctctttggcccaggagaattggggggtggggggtctggggcagaaaggtaagagtgggaggctgagcagatgcacacatcctgagagagggaagatgattccttggagagacttgctcttgagagtgcaagaatctggagctgggaaaagggttcttggaggccaggggaatacggggtcccagagaaagatttccttctcttagaagtgcatgtatatgtggagggagggaaaagggtcctatagaatggggggaaaaaaaaaaaaaaaaaaaaaaaaaaaaaaaaaaaaaaaaaaaaaaaaaaaaaaaaaaaaaaaaa

SEQ ID NO: 1623 - protein, 459 aa, Homo sapiens
MASGVEVLRFQLPGHEAATLRNMNQLRAEERFCDVTIVADSLKFRGHKVILAACSPFLRDQFLLNPSSELQVSLMHSARIVADLLLSCYTGALEFAVRDIVNYLTAASYLQMEHVVEKCRNALSQFIEPKIGLKEDGVSEASLVSSISATKSLLPPARTPKPAPKPPPPPPLPPPLLRPVKLEFPLDEDLELKAEEEDEDEDEDVSDICIVKVESALEVAHRLKPPGGLGGGLGIGGSVGGHLGELAQSSVPPSTVAPPQGVVKACYSLSEDAEGEGLLLIPGGRASVGATSGLVEAAAVAMAARGAGGSLGAGGSRGPLPGGFSGGNPLKNIKCTKCPEVFQGVEKLVFHMRAQHFIFMCPRCGKQFNHSSNLNRHMNVHRGVKSHSCGICGKCFTQKSTLHDHLNLHSGARPYRCSYCDVRFAHKPAIRRHLKEQHGKTTAENVLEASVAEINVLIR

SEQ ID NO: 1624 - DNA, 2609 bp, Homo sapiens
ggctctctacctctcgccgcccctagggaggacaccatgggcccactgatggttcttttttgcctgctgttcctgtacccaggtctggcagactcggctccctcctgccctcagaacgtgaatatctcgggtggcaccttcaccctcagccatggctgggctcctgggagccttctcacctactcctgcccccagggcctgtacccatccccagcatcacggctgtgcaagagcagcggacagtggcagaccccaggagccacccggtctctgtctaaggcggtctgcaaacctgtgcgctgtccagcccctgtctcctttgagaatggcatttataccccacggctggggtcctatcccgtgggtggcaatgtgagcttcgagtgtgaggatggcttcatattgcggggctcgcctgtgcgtcagtgtcgccccaacggcatgtgggatggagaaacagctgtgtgtgataatggggctggccactgccccaacccaggcatttcactgggcgcagtgcggacaggcttccgctttggtcatggggacaaggtccgctatcgctgctcctcgaatcttgtgctcacggggtcttcggagcgggagtgccagggcaacggggtctggagtggaacggagcccatctgccgccaaccctactcttatgacttccctgaggacgtggcccctgccctgggcacttccttctcccacatgcttggggccaccaatcccacccagaagacaaaggaaagcctgggccgtaaaatccaaatccagcgctctggtcatctgaacctctacctgctcctggactgttcgcagagtgtgtcggaaaatgactttctcatcttcaaggagagcgcctccctcatggtggacaggatcttcagctttgagatcaatgtgagcgttgccattatcacctttgcctcagagcccaaagtcctcatgtctgtcctgaacgacaactcccgggatatgactgaggtgatcagcagcctggaaaatgccaactataaagatcatgaaaatggaactgggactaacacctatgcagccttaaacagtgtctatctcatgatgaacaaccaaatgcgactcctcggcatggaaacgatggcctggcaggaaatccgacatgccatcatccttctgacagatggaaagtccaatatgggtggctctcccaagacagctgttgaccatatcagagagatcctgaacatcaaccagaagaggaatgactatctggacatctatgccatcggggtgggcaagctggatgtggactggagagaactgaatgagctagggtccaagaaggatggtgagaggcatgccttcattctgcaggacacaaaggctctgcaccaggtctttgaacatatgctggatgtctccaagctcacagacaccatctgcggggtggggaacatgtcagcaaacgcctctgaccaggagaggacaccctggcatgtcactattaagcccaagagccaagagacctgccggggggccctcatctccgaccaatgggtcctgacagcagctcattgcttccgcgatggcaacgaccactccctgtggagggtcaatgtgggagaccccaaatcccagtggggcaaagaattccttattgagaaggcggtgatctccccagggtttgatgtctttgccaaaaagaaccagggaatcctggagttctatggtgatgacatagctctgctgaagctggcccagaaagtaaagatgtccacccatgccaggcccatctgccttccctgcacgatggaggccaatctggctctgcggagacctcaaggcagcacctgtagggaccatgagaatgaactgctgaacaaacagagtgttcctgctcattttgtcgccttgaatgggagcaaactgaacattaaccttaagatgggagtggagtggacaagctgtgccgaggttgtctcccaagaaaaaaccatgttccccaacttgacagatgtcagggaggtggtgacagaccagttcctatgcagtgggacccaggaggatgagagtccctgcaagggagaatctgggggagcagttttccttgagcggagattcaggttttttcaggtgggtctggtgagctggggtctttacaacccctgccttggctctgctgacaaaaactcccgcaaaagggcccctcgtagcaaggtcccgccgccacgagactttcacatcaatctcttccgcatgcagccctggctgaggcagcacctgggggatgtcctgaattttttacccctctagccatggccactgagccctctgctgccctgccagaatctgccgcccctccatcttctacctctgaatggccacccttagaccctgtgatccatcctctctcctagctgagtaaatccgggtctctaggatgccagaggcagcgcacacaagctgggaaatcctcagggctcctaccagcaggactgcctcgctgccccacctcccgctccttggcctgtccccagattccttccctggttgacttgactcatgcttgtttcactttcacatggaatttcccagttatgaaattaataaaaatcaatggtttccac

SEQ ID NO: 1625 - protein, 752 aa, Homo sapiens
MGPLMVLFCLLFLYPGLADSAPSCPQNVNISGGTFTLSHGWAPGSLLTYSCPQGLYPSPASRLCKSSGQWQTPGATRSLSKAVCKPVRCPAPVSFENGIYTPRLGSYPVGGNVSFECEDGFILRGSPVRQCRPNGMWDGETAVCDNGAGHCPNPGISLGAVRTGFRFGHGDKVRYRCSSNLVLTGSSERECQGNGVWSGTEPICRQPYSYDFPEDVAPALGTSFSHMLGATNPTQKTKESLGRKIQIQRSGHLNLYLLLDCSQSVSENDFLIFKESASLMVDRIFSFEINVSVAIITFASEPKVLMSVLNDNSRDMTEVISSLENANYKDHENGTGTNTYAALNSVYLMMNNQMRLLGMETMAWQEIRHAIILLTDGKSNMGGSPKTAVDHIREILNINQKRNDYLDIYAIGVGKLDVDWRELNELGSKKDGERHAFILQDTKALHQVFEHMLDVSKLTDTICGVGNMSANASDQERTPWHVTIKPKSQETCRGALISDQWVLTAAHCFRDGNDHSLWRVNVGDPKSQWGKEFLIEKAVISPGFDVFAKKNQGILEFYGDDIALLKLAQKVKMSTHARPICLPCTMEANLALRRPQGSTCRDHENELLNKQSVPAHFVALNGSKLNINLKMGVEWTSCAEVVSQEKTMFPNLTDVREVVTDQFLCSGTQEDESPCKGESGGAVFLERRFRFFQVGLVSWGLYNPCLGSADKNSRKRAPRSKVPPPRDFHINLFRMQPWLRQHLGDVLNFLPL

SEQ ID NO: 1626 - DNA, 2574 bp, Homo sapiens
ttggatgttccgggaaagtgatgtgggtaggacaggcggggcgagccgcaggtgccagaacacagattgtataaaaggctgggggctggtggggagcaggggaagggaatgtgaccaggtctaggtctggagtttcagcttggacactgagccaagcagacaagcaaagcaagccaggacacaccatcctgccccaggcccagcttctctcctgccttccaacgccatggggagcaatctcagcccccaactctgcctgatgccctttatcttgggcctcttgtctggaggtgtgaccaccactccatggtctttggcccggccccagggatcctgctctctggagggggtagagatcaaaggcggctccttccgacttctccaagagggccaggcactggagtacgtgtgtccttctggcttctacccgtaccctgtgcagacacgtacctgcagatctacggggtcctggagcaccctgaagactcaagaccaaaagactgtcaggaaggcagagtgcagagcaatccactgtccaagaccacacgacttcgagaacggggaatactggccccggtctccctactacaatgtgagtgatgagatctctttccactgctatgacggttacactctccggggctctgccaatcgcacctgccaagtgaatggccgatggagtgggcagacagcgatctgtgacaacggagcggggtactgctccaacccgggcatccccattggcacaaggaaggtgggcagccagtaccgccttgaagacagcgtcacctaccactgcagccgggggcttaccctgcgtggctcccagcggcgaacgtgtcaggaaggtggctcttggagcgggacggagccttcctgccaagactccttcatgtacgacacccctcaagaggtggccgaagctttcctgtcttccctgacagagaccatagaaggagtcgatgctgaggatgggcacggcccaggggaacaacagaagcggaagatcgtcctggacccttcaggctccatgaacatctacctggtgctagatggatcagacagcattggggccagcaacttcacaggagccaaaaagtgtctagtcaacttaattgagaaggtggcaagttatggtgtgaagccaagatatggtctagtgacatatgccacataccccaaaatttgggtcaaagtgtctgaagcagacagcagtaatgcagactgggtcacgaagcagctcaatgaaatcaattatgaagaccacaagttgaagtcagggactaacaccaagaaggccctccaggcagtgtacagcatgatgagctggccagatgacgtccctcctgaaggctggaaccgcacccgccatgtcatcatcctcatgactgatggattgcacaacatgggcggggacccaattactgtcattgatgagatccgggacttgctatacattggcaaggatcgcaaaaacccaagggaggattatctggatgtctatgtgtttggggtcgggcctttggtgaaccaagtgaacatcaatgctttggcttccaagaaagacaatgagcaacatgtgttcaaagtcaaggatatggaaaacctggaagatgttttctaccaaatgatcgatgaaagccagtctctgagtctctgtggcatggtttgggaacacaggaagggtaccgattaccacaagcaaccatggcaggccaagatctcagtcattcgcccttcaaagggacacgagagctgtatgggggctgtggtgtctgagtactttgtgctgacagcagcacattgtttcactgtggatgacaaggaacactcaatcaaggtcagcgtaggaggggagaagcgggacctggagatagaagtagtcctatttcaccccaactacaacattaatgggaaaaaagaagcaggaattcctgaattttatgactatgacgttgccctgatcaagctcaagaataagctgaaatatggccagactatcaggcccatttgtctcccctgcaccgagggaacaactcgagctttgaggcttcctccaactaccacttgccagcaacaaaaggaagagctgctccctgcacaggatatcaaagctctgtttgtgtctgaggaggagaaaaagctgactcggaaggaggtctacatcaagaatggggataagaaaggcagctgtgagagagatgctcaatatgccccaggctatgacaaagtcaaggacatctcagaggtggtcacccctcggttcctttgtactggaggagtgagtccctatgctgaccccaatacttgcagaggtgattctggcggccccttgatagttcacaagagaagtcgtttcattcaagttggtgtaatcagctggggagtagtggatgtctgcaaaaaccagaagcggcaaaagcaggtacctgctcacgcccgagactttcacatcaacctctttcaagtgctgccctggctgaaggagaaactccaagatgaggatttgggttttctataaggggtttcctgctggacaggggcgtgggattgaattaaaacagctgcgacaac

SEQ ID NO: 1627 - protein, 764 aa, Homo sapiens
MGSNLSPQLCLMPFILGLLSGGVTTTPWSLARPQGSCSLEGVEIKGGSFRLLQEGQALEYVCPSGFYPYPVQTRTCRSTGSWSTLKTQDQKTVRKAECRAIHCPRPHDFENGEYWPRSPYYNVSDEISFHCYDGYTLRGSANRTCQVNGRWSGQTAICDNGAGYCSNPGIPIGTRKVGSQYRLEDSVTYHCSRGLTLRGSQRRTCQEGGSWSGTEPSCQDSFMYDTPQEVAEAFLSSLTETIEGVDAEDGHGPGEQQKRKIVLDPSGSMNIYLVLDGSDSIGASNFTGAKKCLVNLIEKVASYGVKPRYGLVTYATYPKIWVKVSEADSSNADWVTKQLNEINYEDHKLKSGTNTKKALQAVYSMMSWPDDVPPEGWNRTRHVIILMTDGLHNMGGDPITVIDEIRDLLYIGKDRKNPREDYLDVYVFGVGPLVNQVNINALASKKDNEQHVFKVKDMENLEDVFYQMIDESQSLSLCGMVWEHRKGTDYHKQPWQAKISVIRPSKGHESCMGAVVSEYFVLTAAHCFTVDDKEHSIKVSVGGEKRDLEIEVVLFHPNYNINGKKEAGIPEFYDYDVALIKLKNKLKYGQTIRPICLPCTEGTTRALRLPPTTTCQQQKEELLPAQDIKALFVSEEEKKLTRKEVYIKNGDKKGSCERDAQYAPGYDKVKDISEVVTPRFLCTGGVSPYADPNTCRGDSGGPLIVHKRSRFIQVGVISWGVVDVCKNQKRQKQVPAHARDFHINLFQVLPWLKEKLQDEDLGFL

SEQ ID NO: 1628 - DNA, 1568 bp, Homo sapiens
gccccgccgagagcgtgaactatcgctgcggaggggcagacctggaccggtggaaggccgggcggaagtgcgcgcctggggccgccttggttaccgcgttttccgctcctcgctacgtcatcgttgtgagcccgctatcagcggccagcgcgggcgcggccggagaccgtggggcccccggttgccgccccctcgggagccaccatgttggtgataccccccggactgagcgaggaagaggaggctctgcagaagaaattcaacaagctcaagaaaaagaaaaaggcattgctggctctgaagaagcaaagtagcagcagcacaaccagccaaggtggtgtcaaacgctcactatcagagcagcctgtcatggacacagccacagcaacagagcaggcaaagcagctggtgaagtcaggagccatcagtgccatcaaggctgagaccaagaactcaggcttcaagcgttctcgaacccttgaggggaagttaaaggaccccgagaagggaccagtccccactttccagccgttccagaggagcatatctgctgatgatgacctgcaagagtcatccagacgtccccagaggaaatctctgtatgagagctttgtgtcttctagtgatcgacttcgagaactaggaccagatggagaagaggcagagggcccaggggctggtgatggtccccctcgaagctttgactggggctatgaagaacgcagtggtgcccactcctcagcctcccctccccgaagccgcagccgggaccgcagccatgagaggaaccgggacagagaccgagatcgggagcgggatcgagaccgggatcgagacagagacagagagcgggacagggatcgggatcgggatcgagatcgagaccgggaacgggacagggatcgggagcgggatcgagaccgagaccgagagggtcctttccgcaggtcggattcattccctgaacggcgagcccctaggaaagggaatactctctatgtatatggagaagacatgacacccacccttctccgtggggccttctctccttttggaaacatcattgacctctccatggacccacccagaaactgtgccttcgtcacctatgaaaagatggagtcagcagatcaggccgttgctgagctcaacgggacccaggtggagtctgtacagctcaaagtcaacatagcccgaaaacagcccatgctggatgccgctactggcaagtctgtctggggctccctcgctgtccagaacagccctaagggttgccaccgggacaagaggacccagattgtctacagtgatgacgtctacaaggaaaaccttgtggatggcttctagggaacagagctggattccttgtgcctcatatgccccaatgctggtctcagtaaaacactgaggtggaagcttacacatctccctcagcctctggtttttcagcacttgggattggggttaaacctttaaaaacggctgtcaggtttgatctcagtgtaacaacatggccagtgcctgttccccactcccttgccccaaaaggatctggaacacaaaaaaaa

SEQ ID NO: 1629 - protein, 380 aa, Homo sapiens
MLVIPPGLSEEEEALQKKFNKLKKKKKALLALKKQSSSSTTSQGGVKRSLSEQPVMDTATATEQAKQLVKSGAISAIKAETKNSGFKRSRTLEGKLKDPEKGPVPTFQPFQRSISADDDLQESSRRPQRKSLYESFVSSSDRLRELGPDGEEAEGPGAGDGPPRSFDWGYEERSGAHSSASPPRSRSRDRSHERNRDRDRDRERDRDRDRDRDRERDRDRDRDRDRDRERDRDRERDRDRDREGPFRRSDSFPERRAPRKGNTLYVYGEDMTPTLLRGAFSPFGNIIDLSMDPPRNCAFVTYEKMESADQAVAELNGTQVESVQLKVNIARKQPMLDAATGKSVWGSLAVQNSPKGCHRDKRTQIVYSDDVYKENLVDGF

SEQ ID NO: 1630 - DNA, 4187 bp, Homo sapiens
cgtagcgcccgcagagcaacgcaaagaggaagaacagagaaacggctatgagaaaaagggccgaagagtgagaagcagagggccttacccgagggggcggcaaccgggggccccacggtctccggccgcgcccgcgctggccgctgatagcgggctcacaacgatgacgtagcgaggagcggaaaacgcggtaaccaaggcggccccaggcgcgcacttccgcccggccttccaccggtccaggtctgcccctccgcagcgatagttcacgctctcggcggggctgtaccggaagttgcctctacttccgcccgttccggggcggggcttacttcgcagcgactacttgccgcacttccgggctgccaggcagctgctgtggctccaggatgatggagacagagcgacttgtgctaccccctccagatcccctggacctaccccttcgggccgtggagctcggatgcacggggcactgggagctgctgaacttgcctggagctccagagagtagccttccccatggcctccctccttgtgccccagatctgcagcaagaagcagaacagttgtttctgtcatccccagcctggctgcctctgcatggtgtggagcactcagcccgaaaatggcagaggaagacggatccctggtctcttttggctgtcctgggagccccagtcccatccgacctacaggcccaaagacacccaaccacaggccagatactgggttacaaagaggtcttgctggagaacacaaatctctcggctacaacctccttgtctcttcgccggcctccagggccagcctcccagtccttatggggaaatccaactcagtatcccttctggccaggggggatggatgaacccaccataacagatctgaacacacgggaggaggctgaggaggagatagactttgagaaagatcttcttactattccacctggtttcaagaaaggcatggactttgcaccaaaagattgtccaactccagctcctggactactaagccttagctgtatgttggagcctctggatttgggtgggggtgacgaggatgagaatgaggcagtgggacagccaggaggtcccagaggggacactgtttcagcctctccctgcagtgctcccctggcccgagcaagcagcttggaagacctagtgttgaaggaagcgtccacagctgtatccaccccagaggccccagagcctccatctcaggagcagtgggccatccctgtggacgccacctcccctgttggtgatttctatcgcctcattccccagccagccttccagtgggcatttgagccagatgtgtttcagaaacaggccatcctgcacttggaacggcatgactctgtctttgtcgcagctcacacatctgcaggaaaaacagttgtggctgaatatgccattgccctggcccagaaacacatgacacgcaccatctacacttcgcccatcaaggccctgagcaaccagaagttccgggacttccgaaacacattcggggatgtggggctgctcaccggggatgtacagctgcatccggaggcctcctgcctcatcatgaccacagagatccttcgctccatgctgtacagtggctcagatgttattcgggacctggagtgggtcatctttgatgaggttcactatatcaacgatgtcgagcgtggggtcgtgtgggaggaggtgcttatcatgctacctgaccacgtttctatcatccttctgagtgccaccgtccccaacgcccttgagtttgctgactggattgggcggctgaagcgtcgtcagatctatgtgattagcactgtaacccgccccgtgcccctggagcactatcttttcacagggaacagctccaagacccagggggagctctttttgttgctggactcccgaggagccttccatacaaaagggtactatgcagctgtggaggccaagaaggagagaatgagcaaacacgcccagacctttggggccaagcagcccacacatcaggggggccctgcacaggaccgcggagtgtacctgtccctcctggcctccctccgcacacgtgcccagttgcccgtggtggtgttcaccttctcccggggccgctgtgatgagcaggcctcaggcctcacctcccttgacctcaccaccagttcggagaagagcgagatccacctcttcctgcagcgctgccttgctcgcctccgtggctctgaccgccagctgccccaggtcctgcacatgtcagagctcctgaatcgcggcctgggtgtgcaccatagcggcatcctgcccatcctcaaggagatcgtggagatgctcttcagccgtggcctggtcaaggtcttgtttgccacagagacctttgccatgggagtaaacatgcctgctcgtacagtagtgtttgactccatgcgcaaacacgatggctccaccttccgggacctgctccctggggagtatgtgcagatggcaggccgggcagggcggaggggcctggaccccacaggcaccgttatcctgctctgcaagggccgagtgcccgagatggcagacctgcaccgcatgatgatggggaagccgtcccagctgcagtcccagttccgcctcacgtacactatgatcctcaacttgctgcgagtggatgccctcagggtggaggacatgatgaagaggagcttctctgagtttccctcccgcaaagacagcaaggcccatgaacaggccctggctgaactgaccaagaggctgggagctttggaggagcctgacatgactggccaactggtcgacctgcctgaatattacagctggggggaggaactgacagagacccagcacatgatccagcgacgcatcatggagtctgtgaacgggctgaagtctctctcagcaggaagggtggtggttgtgaagaatcaggagcatcacaacgcattgggagtgatcctacaggtctcctcgaactccaccagcagagtattcacaaccctggtcttgtgtgataagcccttgtcccaggacccacaggacagggggccagccactgcagaggtgccctatccagatgacctcgtgggattcaagctgttcctgcctgaagggccttgtgaccacaccgtggtcaagctccagccaggagatatggctgccatcaccaccaaggtgctccgggtgaatggggagaagatcttggaggacttcagcaagaggcagcagccaaaattcaagaaggatcctccccttgcagccgtgaccactgctgtccaggaactgctgcgtctggctcaggcccacccagccggacctcccaccctcgaccctgtcaatgacctgcagctcaaagatatgtcagttgtagagggtgggctccgggcccggaagctggaggagctgatccagggggctcagtgtgtacacagcccccgttttcctgcccagtacctgaagctgcgggagcgaatgcagatacagaaggagatggagcggctgcgcttcctactgtcggatcagtcattgctgctgcttcctgagtaccatcagcgagtagaggtgctccgaaccctgggttatgtggacgaggcgggcactgtgaagctggcagggcgggtggcttgtgccatgagcagccatgagttgctcctcactgagctcatgtttgacaatgcactgagcaccctgcggcctgaggagattgctgccttgctctctggcctggtctgccagagccctggggacgctggggatcagctcccaaacaccctcaagcagggaatagaacgtgtccgggctgtggccaagcggattggtgaggtccaggtggcttgtggcctgaaccagacggtggaggaatttgtgggggagctgaattttgggctggttgaggttgtatatgagtgggcccggggcatgcccttctccgagttggcagggctctcagggacccctgagggcctggtggtccgctgcattcagcgcctggctgagatgtgtcgctcactgcggggggcagcccgcctggtaggagagcctgtgctgggtgccaagatggagacagcggctaccttgctacggcgggacatcgtatttgcggccagcctctacacccagtgaatgccccatgtaaaaacatgatgataaaacagcaaagcacaaaaaaaaaaaaaaaaa

SEQ ID NO: 1631 - protein, 1246 aa, Homo sapiens
MMETERLVLPPPDPLDLPLRAVELGCTGHWELLNLPGAPESSLPHGLPPCAPDLQQEAEQLFLSSPAWLPLHGVEHSARKWQRKTDPWSLLAVLGAPVPSDLQAQRHPTTGQILGYKEVLLENTNLSATTSLSLRRPPGPASQSLWGNPTQYPFWPGGMDEPTITDLNTREEAEEEIDFEKDLLTIPPGFKKGMDFAPKDCPTPAPGLLSLSCMLEPLDLGGGDEDENEAVGQPGGPRGDTVSASPCSAPLARASSLEDLVLKEASTAVSTPEAPEPPSQEQWAIPVDATSPVGDFYRLIPQPAFQWAFEPDVFQKQAILHLERHDSVFVAAHTSAGKTVVAEYAIALAQKHMTRTIYTSPIKALSNQKFRDFRNTFGDVGLLTGDVQLHPEASCLIMTTEILRSMLYSGSDVIRDLEWVIFDEVHYINDVERGVVWEEVLIMLPDHVSIILLSATVPNALEFADWIGRLKRRQIYVISTVTRPVPLEHYLFTGNSSKTQGELFLLLDSRGAFHTKGYYAAVEAKKERMSKHAQTFGAKQPTHQGGPAQDRGVYLSLLASLRTRAQLPVVVFTFSRGRCDEQASGLTSLDLTTSSEKSEIHLFLQRCLARLRGSDRQLPQVLHMSELLNRGLGVHHSGILPILKEIVEMLFSRGLVKVLFATETFAMGVNMPARTVVFDSMRKHDGSTFRDLLPGEYVQMAGRAGRRGLDPTGTVILLCKGRVPEMADLHRMMMGKPSQLQSQFRLTYTMILNLLRVDALRVEDMMKRSFSEFPSRKDSKAHEQALAELTKRLGALEEPDMTGQLVDLPEYYSWGEELTETQHMIQRRIMESVNGLKSLSAGRVVVVKNQEHHNALGVILQVSSNSTSRVFTTLVLCDKPLSQDPQDRGPATAEVPYPDDLVGFKLFLPEGPCDHTVVKLQPGDMAAITTKVLRVNGEKILEDFSKRQQPKFKKDPPLAAVTTAVQELLRLAQAHPAGPPTLDPVNDLQLKDMSVVEGGLRARKLEELIQGAQCVHSPRFPAQYLKLRERMQIQKEMERLRFLLSDQSLLLLPEYHQRVEVLRTLGYVDEAGTVKLAGRVACAMSSHELLLTELMFDNALSTLRPEEIAALLSGLVCQSPGDAGDQLPNTLKQGIERVRAVAKRIGEVQVACGLNQTVEEFVGELNFGLVEVVYEWARGMPFSELAGLSGTPEGLVVRCIQRLAEMCRSLRGAARLVGEPVLGAKMETAATLLRRDIVFAASLYTQ

SEQ ID NO: 1632 - DNA, 1590 bp, Homo sapiens
gcccgtcagtgctgggaggggcggtggcgacgcacataccagcatcacctccgccaggccgggccccacgccggccgcggattggctccctccaagggcacgcacgcccggggactcgttggcggcgtggaggggcgccggtggccacgttggtgtcaacctccttcgtgaagctcacacctcccccgccccgggaggggtttgcccgccactgtcgctgaatgattgcatcatcgaaagcagaaaaccacttttgcatccttcggcctctggcgtgcctgccatgacgtcatagctctgcggaggtggaagttggggagctttgaggacctcatggatcccagggggaccaagagaggagctgagaagacagaggtagctgagcctcggaacaaactacctcgtccagcaccttctctgcccacagaccctgccctctactctgggccctttcctttctaccggcgcccttcggaactgggctgcttctccctggatgctcaacgccagtaccatggagatgcccgagccctgcgctactatagcccaccccccactaacggtccaggccccaactttgacctcagagacggatacccggatcgataccagccccgggacgaggaggtccaggaaaggctggaccacctgctgtgctggctcctggaacaccgaggccggttggaggggggtccaggctggctggcagaggccatagtgacgtggcgggggcacctgacaaaactgctgacgacaccgtatgagcggcaggagggctggcagctggcagcctcccggttccagggaacactatacctgagtgaagtggagacaccgaacgctcgggcccagaggcttgctcggccaccgctcctccgggagcttatgtacatgggatacaaatttgagcagtacatgtgtgcagacaaacctggaagctccccagacccctctggggaggttaacaccaacgtggccttctgctctgtgctacgcagccgcctgggaagccaccctctgctcttctcaggggaggtagactgcacagacccccaagccccatccacacagcccccaacctgctatgtggagctcaagacctccaaggagatgcacagccctggccaatggaggagtttctacagacacaagctcctgaaatggtgggctcagtcattcctcccaggggtcccgaatgttgttgctggcttccgtaacccagacggttttgtctcttccctcaagacctttcctaccatgaagatgtttgaatatgtcaggaatgaccgtgacggctggaatccctctgtgtgcatgaacttctgtgccgccttccttagctttgcccagagcacggttgtccaggatgaccccaggctcgttcatctcttctcttgggagcctggcggcccagtcaccgtgtctgtacaccaagatgcaccttacgccttcctgcccatatggtatgtggaagctatgactcaggacctcccatcaccccccaagactccctctcccaaatagtaatgctttagagggaggcagtcatatctctgtgtgcagataataaaagcatatttctaagaggtt

SEQ ID NO: 1633 - protein, 396 aa, Homo sapiens
MDPRGTKRGAEKTEVAEPRNKLPRPAPSLPTDPALYSGPFPFYRRPSELGCFSLDAQRQYHGDARALRYYSPPPTNGPGPNFDLRDGYPDRYQPRDEEVQERLDHLLCWLLEHRGRLEGGPGWLAEAIVTWRGHLTKLLTTPYERQEGWQLAASRFQGTLYLSEVETPNARAQRLARPPLLRELMYMGYKFEQYMCADKPGSSPDPSGEVNTNVAFCSVLRSRLGSHPLLFSGEVDCTDPQAPSTQPPTCYVELKTSKEMHSPGQWRSFYRHKLLKWWAQSFLPGVPNVVAGFRNPDGFVSSLKTFPTMKMFEYVRNDRDGWNPSVCMNFCAAFLSFAQSTVVQDDPRLVHLFSWEPGGPVTVSVHQDAPYAFLPIWYVEAMTQDLPSPPKTPSPK

SEQ ID NO: 1634 - DNA, 1620 bp, Homo sapiens
gtcctccaaatgcagtgaggttaggaaggacgtctgcgctcagatcaagaatccagttacctcaaagctccccaacttccacctccgcagagctatgacgtcatggcaggcacgccagaggccgaaggatgcaaaagtggttttctgctttcgatgatgcaatcattcagcgacagtggcgggcaaacccctcccggggcgggggaggtgtgagcttcacgaaggaggttgacaccaacgtggccaccggcgcccctccacgccgccaacgagtccccgggcgtgcgtgcccttggagggagccaatccgcggccggcgtggggcccggcctggcggaggtgatgctggagggacgcccggggagaccgtacgtcactgctctgcgccggaagaccctattttcaggttctcttccctccattcctaccccttccccggtaccataaaatcccgggatatgagctggaagaggcatcacctgatcccggagacctttggagttaagaggcggcggaagcgagggcctgtggagtcggatcctcttcggggtgagccagggtcggcgcgcgcggctgtctcagaactcatgcagctgttcccgcgaggcctgtttgaggacgcgctgccgcccatcgtgctgaggagccaggtgtacagccttgtgcctgacaggaccgtggccgaccggcagctgaaggagcttcaagagcagggggagatcagaatcgtccagctgggcttcgacttggatgcccatggaattatcttcactgaggactacaggaccagagtcctcaaggcctgtgatggccgaccgtatgctggggcagtgcagaaatttctagcttcagtacttccagcctgtggggaccttagtttccagcaggaccaaatgacacagacctttggcttcagggactcagaaatcacgcatctggtgaatgctggagtcctcaccgtccgagatgctgggagctggtggctagctgtgcctggagctgggagattcatcaagtactttgttaaagggcgccaggctgtccttagcatggtccggaaggcaaagtaccgggaactgctcctatcagagctcctgggccggcgggcgcctgtcgtggtgcggcttggcctcacctaccatgtgcacgacctcattggggcccagctagtggactgcatctctaccacttcaggaaccctcctccgcctgccagagacatgaagattctgctcatcattgctcagctcctcagagtgggccgggaggggactagaagagctgcatgatggtggctgagacagggtcaccttgggaaggcttgggagccaggatgagtgtcgggctctcgtgtgtgcaaaaggtcagatgtgactgctgctgtttgcctggtttctgacccagtggtggggtttgagcaatgcttctctgcccttccatggaaagtggaaccagaaatggtgccaaggctgtggctgttccctttcgtgtaaaatggtgctgttattactctgtcttgaaataggaaggtgggatttctggggaggctggtgaaggagggcagggttcttttctctacgtgtcatgttaaaattgccaaataaagtacctctgcctgtga

SEQ ID NO: 1635 - protein, 364 aa, Homo sapiens
MQKWFSAFDDAIIQRQWRANPSRGGGGVSFTKEVDTNVATGAPPRRQRVPGRACPWREPIRGRRGARPGGGDAGGTPGETVRHCSAPEDPIFRFSSLHSYPFPGTIKSRDMSWKRHHLIPETFGVKRRRKRGPVESDPLRGEPGSARAAVSELMQLFPRGLFEDALPPIVLRSQVYSLVPDRTVADRQLKELQEQGEIRIVQLGFDLDAHGIIFTEDYRTRVLKACDGRPYAGAVQKFLASVLPACGDLSFQQDQMTQTFGFRDSEITHLVNAGVLTVRDAGSWWLAVPGAGRFIKYFVKGRQAVLSMVRKAKYRELLLSELLGRRAPVVVRLGLTYHVHDLIGAQLVDCISTTSGTLLRLPET

SEQ ID NO: 1636 - DNA, 1632 bp, Homo sapiens
gtcctccaaatgcagtgaggttaggaaggacgtctgcgctcagatcaagaatccagttacctcaaagctccccaacttccacctccgcagagctatgacgtcatggcaggcacgccagaggccgaaggatgcaaaagtggttttctgctttcgatgatgcaatcattcagcgacagtggcgggcaaacccctcccggggcgggggaggtgtgagcttcacgaaggaggttgacaccaacgtggccaccggcgcccctccacgccgccaacgagtccccgggcgtgcgtgcccttggagggagccaatccgcggccggcgtggggcccggcctggcggaggtgatgctggagggacgcccggggagaccgtacgtcactgctctgcgccggaagaccctattttcaggttctcttccctccattcctaccccttccccggtaccataaaatcccgggatatgagctggaagaggcatcacctgatcccggagacctttggagttaagaggcggcggaagcgagggcctgtggagtcggatcctcttcggggtgagccagggtcggcgcgcgcggctgtctcagaactcatgcagctgttcccgcgaggcctgtttgaggacgcgctgccgcccatcgtgctgaggagccaggtgtacagccttgtgcctgacaggaccgtggccgaccggcagctgaaggagcttcaagagcagggggagatcagaatcgtccagctgggcttcgacttggatgcccatggaattatcttcactgaggactacaggaccagagtatgtgactgtgtcctcaaggcctgtgatggccgaccgtatgctggggcagtgcagaaatttctagcttcagtacttccagcctgtggggaccttagtttccagcaggaccaaatgacacagacctttggcttcagggactcagaaatcacgcatctggtgaatgctggagtcctcaccgtccgagatgctgggagctggtggctagctgtgcctggagctgggagattcatcaagtactttgttaaagggcgccaggctgtccttagcatggtccggaaggcaaagtaccgggaactgctcctatcagagctcctgggccggcgggcgcctgtcgtggtgcggcttggcctcacctaccatgtgcacgacctcattggggcccagctagtggactgcatctctaccacttcaggaaccctcctccgcctgccagagacatgaagattctgctcatcattgctcagctcctcagagtgggccgggaggggactagaagagctgcatgatggtggctgagacagggtcaccttgggaaggcttgggagccaggatgagtgtcgggctctcgtgtgtgcaaaaggtcagatgtgactgctgctgtttgcctggtttctgacccagtggtggggtttgagcaatgcttctctgcccttccatggaaagtggaaccagaaatggtgccaaggctgtggctgttccctttcgtgtaaaatggtgctgttattactctgtcttgaaataggaaggtgggatttctggggaggctggtgaaggagggcagggttcttttctctacgtgtcatgttaaaattgccaaataaagtacctctgcctgtga

SEQ ID NO: 1637 - protein, 368 aa, Homo sapiens
MQKWFSAFDDAIIQRQWRANPSRGGGGVSFTKEVDTNVATGAPPRRQRVPGRACPWREPIRGRRGARPGGGDAGGTPGETVRHCSAPEDPIFRFSSLHSYPFPGTIKSRDMSWKRHHLIPETFGVKRRRKRGPVESDPLRGEPGSARAAVSELMQLFPRGLFEDALPPIVLRSQVYSLVPDRTVADRQLKELQEQGEIRIVQLGFDLDAHGIIFTEDYRTRVCDCVLKACDGRPYAGAVQKFLASVLPACGDLSFQQDQMTQTFGFRDSEITHLVNAGVLTVRDAGSWWLAVPGAGRFIKYFVKGRQAVLSMVRKAKYRELLLSELLGRRAPVVVRLGLTYHVHDLIGAQLVDCISTTSGTLLRLPET

SEQ ID NO: 1638 - DNA, 2023 bp, Homo sapiens
  misc_feature (1010)..(1010): n is a, c, g, or t
atgcgcctctcgtggagcgtggcccagggcccctttgattccttcgtggtccagtatgaggacacgaacgggcagccccaggccttgctcgtggacggcgaccagagcaagatcctcatctcaggcctggagcccagcaccccctacaggttcctcctctatggcctccatgaagggaagcgcctggggcccctctcagctgagggcaccacagggctggctcctgctggtcagacctcagaggagtcaaggccccgcctgtcccagctgtctgtgactgacgtgaccaccagttcactgaggctcaactgggaggccccaccgggggccttcgactccttcctgctccgctttggggttccatcaccaagcactctggagccgcatccgcgtccactgctgcagcgcgagctgatggtgccggggacgcggcactcggccgtgctccgggacctgcgttccgggactctgtacagcctgacactgtatgggctgcgaggaccccacaaggccgacagcatccagggaaccgcccgcaccctcagcccagttctggagagcccccgtgacctccaattcagtgaaatcagggagacctcagccaaggtcaactggatgcccccaccatcccgggcggacagcttcaaagtctcctaccagctggcggacggaggggagcctcagagtgtgcaggtggatggccaggcccggacccagaaactccaggggctgatcccaggcgctcgctatgaggtgaccgtggtctcggtccgaggctttgaggagagtgagcctctcacaggcttcctcaccacggttcctgacggtcccacacagttgcgtgcactgaacttgaccgagggattcgccgtgctgcactggaagcccccccagaatcctgtggacacctatgacgtccaggtcacagcccctggggccccgcctctgcaggcggagaccccaggcagcgcggtggactaccccctgcatgaccttgtcctccacaccanctacaccgccacagtgcgtggcctgcggggccccaacctcacttccccagccagcatcaccttcaccacaagggctagaggcccctcgggacttggaggccaaggaagtgaccccccgcaccgccctgctcacttggactgagcccccagtccggcccgcaggctacctgctcagcttccacacccctggtggacagaaccaggagatcctgctcccaggagggatcacatctcaccagctccttggcctctttccctccacctcctacaatgcacggctccaggccatgtggggccagagcctcctgccgcccgtgtccacctctttcaccacgggtgggctgcggatccccttccccagggactgcggggaggagatgcagaacggagccggtgcctccaggaccagcaccatcttcctcaacggcaaccgcgagcggcccctgaacgtgttttgcgacatggagactgatgggggcggctggctggtgttccagcgccgcatggatggacagacagacttctggagggactgggaggactatgcccatggttttgggaacatctctggagagttctggctgggcaatgaggccctgcacagcctgacacaggcaggtgactactccatgcgcgtggacctgcgggctggggacgaggctgtgttcgcccagtacgactccttccacgtagactcggctgcggagtactaccgcctccacttggagggctaccacggcaccgcaggggactccatgagctaccacagcggcagtgtcttctctgcccgtgatcgggaccccaacagcttgctcatctcctgcgctgtctcctaccgaggggcctggtggtacaggaactgccactacgccaacctcaacgggctctacgggagcacagtggaccatcagggagtgagctggtaccactggaagggcttcgagttctcggtgcccttcacggaaatgaagctgagaccaagaaactttcgctccccagcggggggaggctga

SEQ ID NO: 1639 - DNA, 5426 bp, Homo sapiens
agaaggtagcagacagacagacggatctaacctctcttggatcctccagccatgaggctgctctgggggctgatctgggcatccagcttcttcaccttatctctgcagaagcccaggttgctcttgttctctccttctgtggttcatctgggggtccccctatcggtgggggtgcagctccaggatgtgccccgaggacaggtagtgaaaggatcagtgttcctgagaaacccatctcgtaataatgtcccctgctccccaaaggtggacttcacccttagctcagaaagagacttcgcactcctcagtctccaggtgcccttgaaagatgcgaagagctgtggcctccatcaactcctcagaggccctgaggtccagctggtggcccattcgccatggctaaaggactctctgtccagaacgacaaacatccagggtatcaacctgctcttctcctctcgccgggggcacctctttttgcagacggaccagcccatttacaaccctggccagcgggttcggtaccgggtctttgctctggatcagaagatgcgcccgagcactgacaccatcacagtcatggtggagaactctcacggcctccgcgtgcggaagaaggaggtgtacatgccctcgtccatcttccaggatgactttgtgatcccagacatctcagagccagggacctggaagatctcagcccgattctcagatggcctggaatccaacagcagcacccagtttgaggtgaagaaatatgtccttcccaactttgaggtgaagatcacccctggaaagccctacatcctgacggtgccaggccatcttgatgaaatgcagttagacatccaggccaggtacatctatgggaagccagtgcagggggtggcatatgtgcgctttgggctcctagatgaggatggtaagaagactttctttcgggggctggagagtcagaccaagctggtgaatggacagagccacatttccctctcaaaggcagagttccaggacgccctggagaagctgaatatgggcattactgacctccaggggctgcgcctctacgttgctgcagccatcattgagtctccaggtggggagatggaggaggcagagctcacatcctggtattttgtgtcatctcccttctccttggatcttagcaagaccaagcgacaccttgtgcctggggcccccttcctgctgcaggccttggtccgtgagatgtcaggctccccagcttctggcattcctgtcaaagtttctgccacggtgtcttctcctgggtctgttcctgaagtccaggacattcagcaaaacacagacgggagcggccaagtcagcattccaataattatccctcagaccatctcagagctgcagctctcagtatctgcaggctccccacatccagcgatagccaggctcactgtggcagccccaccttcaggaggccccgggtttctgtctattgagcggccggattctcgacctcctcgtgttggggacactctgaacctgaacttgcgagccgtgggcagtggggccaccttttctcattactactacatgatcctatcccgagggcagatcgtgttcatgaatcgagagcccaagaggaccctgacctcggtctcggtgtttgtggaccatcacctggcaccctccttctactttgtggccttctactaccatggagaccacccagtggccaactccctgcgagtggatgtccaggctggggcctgcgagggcaagctggagctcagcgtggacggtgccaagcagtaccggaacggggagtccgtgaagctccacttagaaaccgactccctagccctggtggcgctgggagccttggacacagctctgtatgctgcaggcagcaagtcccacaagcccctcaacatgggcaaggtctttgaagctatgaacagctatgacctcggctgtggtcctgggggtggggacagtgcccttcaggtgttccaggcagcgggcctggccttttctgatggagaccagtggaccttatccagaaagagactaagctgtcccaaggagaagacaacccggaaaaagagaaacgtgaacttccaaaaggcgattaatgagaaattgggtcagtatgcttccccgacagccaagcgctgctgccaggatggggtgacacgtctgcccatgatgcgttcctgcgagcagcgggcagcccgcgtgcagcagccggactgccgggagcccttcctgtcctgctgccaatttgctgagagtctgcgcaagaagagcagggacaagggccaggcgggcctccaacgagccctggagatcctgcaggaggaggacctgattgatgaggatgacattcccgtgcgcagcttcttcccagagaactggctctggagagtggaaacagtggaccgctttcaaatattgacactgtggctccccgactctctgaccacgtgggagatccatggcctgagcctgtccaaaaccaaaggcctatgtgtggccaccccagtccagctccgggtgttccgcgagttccacctgcacctccgcctgcccatgtctgtccgccgctttgagcagctggagctgcggcctgtcctctataactacctggataaaaacctgactgtgagcgtccacgtgtccccagtggaggggctgtgcctggctgggggcggagggctggcccagcaggtgctggtgcctgcgggctctgcccggcctgttgccttctctgtggtgcccacggcagccaccgctgtgtctctgaaggtggtggctcgagggtccttcgaattccctgtgggagatgcggtgtccaaggttctgcagattgagaaggaaggggccatccatagagaggagctggtctatgaactcaaccccttggaccaccgaggccggaccttggaaatacctggcaactctgatcccaatatgatccctgatggggactttaacagctacgtcagggttacagcctcagatccattggacactttaggctctgagggggccttgtcaccaggaggcgtggcctccctcttgaggcttcctcgaggctgtggggagcaaaccatgatctacttggctccgacactggctgcttcccgctacctggacaagacagagcagtggagcacactgcctcccgagaccaaggaccacgccgtggatctgatccagaaaggctacatgcggatccagcagtttcggaaggcggatggttcctatgcggcttggttgtcacggggcagcagcacctggctcacagcctttgtgttgaaggtcctgagtttggcccaggagcaggtaggaggctcgcctgagaaactgcaggagacatctaactggcttctgtcccagcagcaggctgacggctcgttccaggacctctctccagtgatacataggagcatgcaggggggtttggtgggcaatgatgagactgtggcactcacagcctttgtgaccatcgcccttcatcatgggctggccgtcttccaggatgagggtgcagagccattgaagcagagagtggaagcctccatctcaaaggcaagctcatttttgggggagaaagcaagtgctgggctcctgggtgcccacgcagctgccatcacggcctatgccctgacactgaccaaggcccctgcggacctgcggggtgttgcccacaacaacctcatggcaatggcccaggagactggagataacctgtactggggctcagtcactggttctcagagcaatgccgtgtcgcccaccccggctcctcgcaacccatccgaccccatgccccaggccccagccctgtggattgaaaccacagcctacgccctgctgcacctcctgcttcacgagggcaaagcagagatggcagaccaggctgcggcctggctcacccgtcagggcagcttccaagggggattccgcagtacccaagacacggtgattgccctggatgccctgtctgcctactggattgcctcccacaccactgaggagaggggtctcaatgtgactctcagctccacaggccggaatgggttcaagtcccacgcgctgcagctgaacaaccgccagattcgcggcctggaggaggagctgcagttttccttgggcagcaagatcaatgtgaaggtgggaggaaacagcaaaggaaccctgaaggtccttcgtacctacaatgtcctggacatgaagaacacgacctgccaggacctacagatagaagtgacagtcaaaggccacgtcgagtacacgatggaagcaaacgaggactatgaggactatgagtacgatgagcttccagccaaggatgacccagatgcccctctgcagcccgtgacacccctgcagctgtttgagggtcggaggaaccgccgcaggagggaggcgcccaaggtggtggaggagcaggagtccagggtgcactacaccgtgtgcatctggcggaacggcaaggtggggctgtctggcatggccatcgcggacgtcaccctcctgagtggattccacgccctgcgtgctgacctggagaagctgacctccctctctgaccgttacgtgagtcactttgagaccgaggggccccacgtcctgctgtattttgactcggtccccacctcccgggagtgcgtgggctttgaggctgtgcaggaagtgccggtggggctggtgcagccggccagcgcaaccctgtacgactactacaaccccgagcgcagatgttctgtgttttacggggcaccaagtaagagcagactcttggccaccttgtgttctgctgaagtctgccagtgtgctgaggggaagtgccctcgccagcgtcgcgccctggagcggggtctgcaggacgaggatggctacaggatgaagtttgcctgctactacccccgtgtggagtacggcttccaggttaaggttctccgagaagacagcagagctgctttccgcctctttgagaccaagatcacccaagtcctgcacttcaccaaggatgtcaaggccgctgctaatcagatgcgcaacttcctggttcgagcctcctgccgccttcgcttggaacctgggaaagaatatttgatcatgggtctggatggggccacctatgacctcgagggacacccccagtacctgctggactcgaatagctggatcgaggagatgccctctgaacgcctgtgccggagcacccgccagcgggcagcctgtgcccagctcaacgacttcctccaggagtatggcactcaggggtgccaggtgtgagggctgccctcccacctccgctgggaggaacctgaacctgggaaccatgaagctggaagcactgctgtgtccgctttcatgaacacagcctgggaccagggcatattaaaggcttttggcagcaaagtgtcagtgttggc

SEQ ID NO: 1640 - protein, 1744 aa, Homo sapiens
MRLLWGLIWASSFFTLSLQKPRLLLFSPSVVHLGVPLSVGVQLQDVPRGQVVKGSVFLRNPSRNNVPCSPKVDFTLSSERDFALLSLQVPLKDAKSCGLHQLLRGPEVQLVAHSPWLKDSLSRTTNIQGINLLFSSRRGHLFLQTDQPIYNPGQRVRYRVFALDQKMRPSTDTITVMVENSHGLRVRKKEVYMPSSIFQDDFVIPDISEPGTWKISARFSDGLESNSSTQFEVKKYVLPNFEVKITPGKPYILTVPGHLDEMQLDIQARYIYGKPVQGVAYVRFGLLDEDGKKTFFRGLESQTKLVNGQSHISLSKAEFQDALEKLNMGITDLQGLRLYVAAAIIESPGGEMEEAELTSWYFVSSPFSLDLSKTKRHLVPGAPFLLQALVREMSGSPASGIPVKVSATVSSPGSVPEVQDIQQNTDGSGQVSIPIIIPQTISELQLSVSAGSPHPAIARLTVAAPPSGGPGFLSIERPDSRPPRVGDTLNLNLRAVGSGATFSHYYYMILSRGQIVFMNREPKRTLTSVSVFVDHHLAPSFYFVAFYYHGDHPVANSLRVDVQAGACEGKLELSVDGAKQYRNGESVKLHLETDSLALVALGALDTALYAAGSKSHKPLNMGKVFEAMNSYDLGCGPGGGDSALQVFQAAGLAFSDGDQWTLSRKRLSCPKEKTTRKKRNVNFQKAINEKLGQYASPTAKRCCQDGVTRLPMMRSCEQRAARVQQPDCREPFLSCCQFAESLRKKSRDKGQAGLQRALEILQEEDLIDEDDIPVRSFFPENWLWRVETVDRFQILTLWLPDSLTTWEIHGLSLSKTKGLCVATPVQLRVFREFHLHLRLPMSVRRFEQLELRPVLYNYLDKNLTVSVHVSPVEGLCLAGGGGLAQQVLVPAGSARPVAFSVVPTAATAVSLKVVARGSFEFPVGDAVSKVLQIEKEGAIHREELVYELNPLDHRGRTLEIPGNSDPNMIPDGDFNSYVRVTASDPLDTLGSEGALSPGGVASLLRLPRGCGEQTMIYLAPTLAASRYLDKTEQWSTLPPETKDHAVDLIQKGYMRIQQFRKADGSYAAWLSRGSSTWLTAFVLKVLSLAQEQVGGSPEKLQETSNWLLSQQQADGSFQDLSPVIHRSMQGGLVGNDETVALTAFVTIALHHGLAVFQDEGAEPLKQRVEASISKASSFLGEKASAGLLGAHAAAITAYALTLTKAPADLRGVAHNNLMAMAQETGDNLYWGSVTGSQSNAVSPTPAPRNPSDPMPQAPALWIETTAYALLHLLLHEGKAEMADQAAAWLTRQGSFQGGFRSTQDTVIALDALSAYWIASHTTEERGLNVTLSSTGRNGFKSHALQLNNRQIRGLEEELQFSLGSKINVKVGGNSKGTLKVLRTYNVLDMKNTTCQDLQIEVTVKGHVEYTMEANEDYEDYEYDELPAKDDPDAPLQPVTPLQLFEGRRNRRRREAPKVVEEQESRVHYTVCIWRNGKVGLSGMAIADVTLLSGFHALRADLEKLTSLSDRYVSHFETEGPHVLLYFDSVPTSRECVGFEAVQEVPVGLVQPASATLYDYYNPERRCSVFYGAPSKSRLLATLCSAEVCQCAEGKCPRQRRALERGLQDEDGYRMKFACYYPRVEYGFQVKVLREDSRAAFRLFETKITQVLHFTKDVKAAANQMRNFLVRASCRLRLEPGKEYLIMGLDGATYDLEGHPQYLLDSNSWIEEMPSERLCRSTRQRAACAQLNDFLQEYGTQGCQV

SEQ ID NO: 1641 - DNA, 2114 bp, Homo sapiens
tgggagggtacctgaaggtggggtcaagggaggccccaaaacagtctacacagcaggagggatggctggggctcttgagctataagtggcacctcagggccctgacgggcgtctcgccatgctgctcctgggcctgctgctgctgctgcccctgctggctggcgcccgcctgctgtggaactggtggaagctccggagcctccacctcccgcctcttgccccgggcttcttgcacctgctgcagcccgacctccccatctatctgcttggcctgactcagaaattcgggcccatctacaggctccaccttgggctgcaagatgtggtggtgctgaactccaagaggaccattgaggaagccatggtcaaaaagtgggcagactttgctggcagacctgagccacttacctacaagctggtgtctaggaactacccggacctgtccttgggagactactccctgctctggaaagcccacaagaagctcacccgctcagccctgctgctgggcatccgtgactccatggagccagtggtggagcagctgacccaggagttctgtgagcgcatgagagcccagcccggcacccctgtggccattgaggaggaattctctctcctcacctgcagcatcatctgttacctcaccttcggagacaagatcaaggacgacaacttaatgcctgcctattacaaatgtatccaggaggtgttaaaaacctggagccactggtccatccaaattgtggacgtgattccctttctcaggttcttccccaatccaggtctccggaggctgaagcaggccatagagaagagggatcacatcgtggagatgcagctgaggcagcacaaggagagcctcgtggcaggccagtggagggacatgatggactacatgctccaaggggtggcgcagccgagcatggaagagggctctggacagctcctggaagggcacgtgcacatggctgcagtggacctcctgatcggtggcactgagaccacagcaaacaccctctcctgggccgtggtttttttgcttcaccaccctgagattcagcagcgactgcaggaggagctagaccacgaactgggccctggtgcctccagctcccgggtcccctacaaggaccgtgcacggctgcccttgctcaatgccaccatcgccgaggtgctgcgcctgcggcccgttgtgcccttagccttgccccaccgcaccacacggcccagcagcatctccggctacgacatccctgagggcacagtcatcattccgaacctccaaggcgcccacctggatgagacggtctgggagaggccacatgagttctggcctgatcgcttcctggagccaggcaagaactccagagctctggccttcggctgcggtgcccgcgtgtgcctgggcgagccgctggcgcgcctggagctcttcgtggtgctgacccgactgctgcaggccttcacgctgctgccctccggggacgccctgccctccctgcagcccctgccccactgcagtgtcatcctcaagatgcagcctttccaagtgcggctgcagccccgggggatgggggcccacagcccgggccagagccagtgatggggcaggaccgatgccagccgggtacctcagtttctcctttattgctcccgtacgaacccctcccctcccccctgtaaacacagtgctgcgagatcgctggcagagaaggcttcctccagcggctgggtggtgaaggaccctggctcttctctcggggcgacccctcagtgctcggcagtcatactggggtgcgagagaggtgggcagcagctcagcctccccccgctggggagcgaaagtttcttggtctcagcttcatttccgtgaagggcaccgagaactcgaagcccttccagtggtaccagctcactccctgggaaaggggttgtcaagagagagtcaaagccggatgtcccatctgctcttcccgttccccttaaggaggtagctcccagcactcaaccaacctccccgcagagctcccttcctgaccctccgctgcagaggattgaggcttaattctgagctggccctttccagccaataaatcaactccagctccctc

SEQ ID NO: 1642 - protein, 495 aa, Homo sapiens
MLLLGLLLLLPLLAGARLLWNWWKLRSLHLPPLAPGFLHLLQPDLPIYLLGLTQKFGPIYRLHLGLQDVVVLNSKRTIEEAMVKKWADFAGRPEPLTYKLVSRNYPDLSLGDYSLLWKAHKKLTRSALLLGIRDSMEPVVEQLTQEFCERMRAQPGTPVAIEEEFSLLTCSIICYLTFGDKIKDDNLMPAYYKCIQEVLKTWSHWSIQIVDVIPFLRFFPNPGLRRLKQAIEKRDHIVEMQLRQHKESLVAGQWRDMMDYMLQGVAQPSMEEGSGQLLEGHVHMAAVDLLIGGTETTANTLSWAVVFLLHHPEIQQRLQEELDHELGPGASSSRVPYKDRARLPLLNATIAEVLRLRPVVPLALPHRTTRPSSISGYDIPEGTVIIPNLQGAHLDETVWERPHEFWPDRFLEPGKNSRALAFGCGARVCLGEPLARLELFVVLTRLLQAFTLLPSGDALPSLQPLPHCSVILKMQPFQVRLQPRGMGAHSPGQSQ

SEQ ID NO: 1643 - DNA, 8192 bp, Homo sapiens
ggtcctccccttctcctcccctgctcgctgcagactccctcctcactgtcgctgccgagatccacagtcggttgtggctcagcccctgttgcaggggacaagtgagggagacttccctgtcctgccctgagacgccgccctcccggggttggggacagagcaggtgcagaggcactgcagctgctcggttgcccagcctcctgaatgatgccagcccagtatgctctaacctccagcctggttctcctggtgctgctgagcacagccagagcaggccccttctcttcacggtccaatgtgacactgccagccccccggccccctccccagccagggggccacacagtgggggctggagtgggaagcccctcttctcagctttacgagcacacagtggaaggaggggagaagcaggtggtattcacccaccgcattaacctgcccccttccactggctgtggctgtcccccaggcaccgagcccccagtccttgcttcagaggtacaggccctgagggtccgtctagagatcctggaggagttggtgaaggggctcaaggaacagtgcactgggggatgttgtcctgcctctgcccaagctggcacaggtcagacagatgtgcggaccctctgcagtctccatggtgtgtttgatctgagccgctgcacctgttcctgtgagccaggctggggtgggcccacctgctcagaccccacagatgctgagatccctccctcttccccaccctcagcctcggggtcctgcccagatgactgcaatgatcagggtcgctgtgtccgtggtcgttgcgtgtgctttcccggctacactggccccagctgtggctggccatcctgtcccggggactgccaaggccgtgggcgctgcgtgcagggcgtgtgtgtgtgccgggcaggcttctcaggccccgactgcagccagcgctcctgccctcgaggttgcagccagaggggacgctgtgagggtgggcgctgcgtgtgtgacccaggctacactggtgacgactgtggcatgaggagctgccctcgcggttgcagtcagagggggcgctgtgagaatgggcgctgcgtgtgtaaccccggctacactggcgaggactgtggggtgaggagctgccctcggggctgcagccagcggggacgctgcaaggacgggcgctgcgtgtgtgaccccggctacactggcgaggactgtggtacgcggagctgcccctgggactgtggcgagggcgggcgctgcgtggacggccgctgcgtgtgctggcccgggtacacaggcgaggactgcagcacgcggacatgtccgagggactgccggggccgcgggcgctgcgaggacggcgaatgcatttgcgacacgggctacagcggggacgactgcggcgtgcgcagctgccctggcgactgcaaccaaaggggccgctgcgaggacggccgctgcgtgtgctggccggggtacactggaaccgattgcggctcgcgcgcctgcccacgcgactgtagaggtcgcgggcgctgcgagaacggcgtgtgtgtttgcaatgcgggctacagcggcgaggactgcggtgtgcgcagctgtcctggggactgtcgtggccggggccgctgtgagagtggccgctgcatgtgttggccggggtacacaggccgggactgcggcacgcgcgcctgtcctggcgactgtcgcgggcgcgggcgctgcgtggatggccgctgcgtgtgcaacccgggcttcaccggtgaggactgtgggagccgtcgctgtcccggggactgccgtgggcacggcctttgcgaggatggcgtgtgcgtgtgtgacgcaggctactcaggggaagactgcagcacgcgcagctgccccgggggctgccgaggccgcggccagtgcctagatgggcggtgtgtgtgcgaggacggctactctggcgaggattgcggtgtgaggcagtgcccgaatgactgcagccagcacggcgtgtgccaggacggtgtgtgcatctgttgggaaggctacgtgagtgaggactgcagcatccgcacctgcccctccaactgccacgggaggggccgctgtgaggaagggcgctgcctgtgcgacccaggctacaccggccctacctgtgccacccgcatgtgcccggctgactgccggggacgtgggcggtgtgtgcaaggagtgtgcctgtgccacgtgggctatggcggtgaggactgcgggcaggaagagcctccagccagcgcctgccctggaggctgcgggccccgggaactgtgccgggcaggccagtgtgtgtgtgtagagggcttccgaggccctgactgtgccatccagacatgcccaggggactgccgtggccgaggagagtgtcacgatggcagctgtgtctgcaaagatgggtatgctggcgaagactgcggagaagcacgggttccaagctctgcctcagcctatgaccagagaggactggcccctggacaggagtaccaggtcactgtccgagcccttcgagggaccagctggggccttcctgcctccaagaccatcaccaccatgatcgatgggccccaggacctccgagtggtggctgtgacaccgacaacactggagcttggctggctgcgtccccaggctgaggtggaccgatttgtggtgtcctacgtcagtgccggcaaccagagggtgaggctggaagtgccccctgaagcagacgggacgctgctgactgacctgatgccaggcgtagaatatgtggtgactgtcacagcggagcggggccgggcagtcagctacccagcttctgtcagggccaacacagaggaaagggaggaggagtccccgcccaggccaagcctgtcccagcccccacggcggccttggggcaacctgacggccgagctgagccgtttccgcggcacggtgcaggacctggagcgccacctgcgggctcacggctacccactgcgggccaaccagacttacacgtcggtggcgcgccacatccatgaatacttgcagcggcaggtgctgggcagttccgccgatggcgcgcttctcgtgtctctcgacgggctccgcggccagttcgagcgcgtggtgctgcgctggcggcctcagccgcctgcagagggccccggcggtgagctgactgtgccgggcaccacgcgcaccgtcagcctgcccgacctcaggcccggcaccacctaccacgtggaggtccacggggtgcgggcggggcagacctccaagtcctacgccttcatcaccaccacaggcccctcgacgacgcaaggggcccaggctcctctcctgcagcagcgcccccaggagctgggagagttgagggtgctgggcagagatgagacagggcgcctccgtgtggtctggaccgcccagcctgacacctttgcctacttccaactgcgcatgcgggtgcccgaggggccgggggcacatgaggaagtgctgccaggggacgtccgccaggctctggtgcctccaccccctcctggaaccccgtatgagctgtcacttcatggggtccctcctgggggcaagccctctgaccccatcatctaccaaggcattatggacaaggatgaggagaagcctgggaagtcctcaggcccaccacgcctgggtgagctgacggtgacagacaggacctccgactccttgctcctgcgctggacggtccccgagggcgagtttgactccttcgtgatccagtacaaagacagggacgggcagccccaggtggtgcccgtggaaggaccccagcgctcggccgtcatcacctccctggatcctggccgcaagtacaaatttgtcctgtatgggtttgttggcaagaagaggcatggtccgctggtggctgaagccaagatcttgcctcagagtgacccaagtccagggactccaccccacctgggaaacctgtgggtgacagaccctaccccagattcactgcacctctcctggactgtccctgagggccagtttgacaccttcatggtccagtacagggacagggatggacggccccaggtggtacctgtggaagggcccgagcgttcatttgttgtctcctcactggaccctgaccacaagtacagattcactctgtttggaattgcgaacaagaagcggtatggccccctcacggccgatggcaccactgctccagagaggaaagaggagcccccccgccctgagttcctggagcagcccctcctgggggaactgacagtgaccggcgtgaccccagactccttgcgtctctcatggacagtggcccagggccccttcgactcattcatggtccagtacaaggatgcacaggggcagccccaggcagtgcctgttgcgggggatgagaatgaggttactgtccccggcctggatcccgaccggaagtataagatgaacctctacgggcttcgtggcaggcagcgtgtggggcccgagtctgtggtggccaagactgctcctcaggaggatgtggacgagacccccagccccacagaactgggcacggaggccccggagtcccccgaggagccgctcctgggggagctgacagtgacaggatcctcccctgattcgctgagcctcttctggaccgtcccccagggcagcttcgactctttcaccgtgcagtacaaggacagggatgggcggccccgggcggtgcgtgttgggggcaaggagagtgaggtcaccgtgggaggcctagagcccgggcacaagtacaagatgcacctgtacggcctccacgaggggcagcgcgtgggcccggtgtccgccgtgggcgtgacagccccacaacaagaagagacccctccagccactgagtccccgctggagccacgcctaggagagctgacagtgacagatgtgacccccaactctgtgggcctctcctggacagtccccgagggccagtttgactccttcatagtccagtacaaggacaaggacgggcagccccaggtggtgccggtggcggcagaccagcgagaggtcacagtctacaacctggagcctgagagaaaatataagatgaacatgtatggactacatgatgggcaacgcatgggccccctgtctgtggtcatcgtgacggccccagccacagaggcctccaagcctcccctggagccacgcctaggggagctgacagtgacggatataacccctgactctgtgggcctctcatggacagtccctgagggtgaattcgactcctttgtggttcagtacaaggacagggacgggcagccccaggtggtgcccgtggctgcagatcagcgggaggtcactatccctgacctggaaccctcccgcaagtacaagttcctgctctttgggatccaggatgggaaacgacgcagcccagtctctgtggaggcaaagacggttgcccgaggtgacgccagcccaggggccccaccccgccttggggagctgtgggtgacagaccccaccccagactcactgcgcctctcctggacggttcctgagggccagttcgactcttttgtggtccagttcaaggacaaagacgggccccaggtggtgcccgtggagggccatgagcgctctgtcactgtcacccctctggatgccggccgcaagtacagattcctcctctatggcctcctgggcaagaagcgccatggccctctcactgccgacggcaccacggaagcccggagtgctatggatgatactggaacaaagcgtcccccaaaaccccgtctgggggaggagctgcaggtgaccaccgtgacccagaactccgtgggcctctcctggacagtccctgagggccagtttgactcctttgtggtccagtacaaagacagggacgggcagccccaggtggtgcccgtggagggcagcctcagggaggtcagcgtgccgggcctggaccctgcccacaggtacaagctgctgctctacgggctgcaccacggcaagcgtgtgggccccatctcggccgtcgccattactgccggcagggaagaaacggaaactgagaccacggccccgacccctccagcgcctgagccccacctcggggagttgacagtggaggaggccacgtcacacaccctgcatctctcctggatggtgactgagggagaatttgactccttcgaaatccagtacacagatagagacgggcaactccaaatggtccgcataggaggtgaccggaatgacatcaccctctctggcctggaatccgaccacagatacctggtgaccctgtatggtttcagtgatgggaagcatgtaggtcctgtccatgtcgaggccctgacagtcccggaggaggagaagccttcagaacctcccaccgcaacccccgagccccccatcaagcctcgcctgggggagctgaccgtgacagatgccacccctgactccctcagcctgtcctggacagttcccgagggacagtttgaccacttcctggtccagtacaggaatggagatgggcagcccaaggcagtgagggtgccagggcacgaggaaggggtcaccatctcgggcctggagccagaccataaatacaagatgaacctgtacggcttccacggtggccagcgcatgggccctgtgtctgtcgtcggggtgacagaacccagcatggaggccccggagcccgctgaggagccgctcctgggggagctaacagtgacaggatcctcccctgactcgctgagcctctcctggaccgtcccccagggccgcttcgactccttcaccgtgcagtacaaggacagggacgggcggccccaggtggtgcgtgttgggggcgaggagagtgaagtcaccgtggggggcctggagcctgggcgcaagtacaagatgcacctgtacggcctccacgaggggcggcgcgtgggcccagtgtctgctgtgggcgtcacggcccccgaagaggagtcccctgatgctcctcttgcaaagctgcgcctagggcagatgacagtgagagacatcacctccgactccctcagcctctcctggacagtccccgagggccagtttgaccatttcttggtccagtttaagaatggggacgggcagcccaaggcggtgcgggtgccgggacacgaggatggggtcaccatctcgggcctggagccagaccacaagtacaagatgaacctgtacggcttccacggtggccagcgcgtgggccccgtgtctgctgttggtttaactgcctcgacagaacctcccacccctgaaccccccatcaagcctcgcctggaggagctgaccgtgacagatgcgacccctgactccctcagcctgtcctggacggttcccgagggacagtttgaccacttcctggtccagtacaagaatggggatgggcagcccaaggcaacacgggtgccaggacatgaggacagggtcaccatctccggcctggagccagacaacaagtacaagatgaacctgtacggcttccacggtggccagcgtgtgggccccgtgtctgccatcggggtgacagaggaagagacccccagccccacagaacccagcatggaggccccggagccccctgaggagccgctcctgggggagctaacagtgacaggatcctcccctgactcgctgagcctctcctggaccgtcccccagggccgcttcgactccttcaccgtgcagtacaaggacagggacgggcggccccaggtggtgcgtgttgggggcgaggagagcgaggtcaccgtggggggcctggagcctgggcgcaaatacaagatgcacctgtatggcctccacgaggggcggcgcgtgggcccggtgtccaccgtgggcgtgactgccccacaagaggatgtggacgagacccccagccctacagaaccaggcacagaggccccagggccccccgaggagcctctcctgggggagctgacagtgacaggatcctcccctgactcgctgagcctttcctggaccgtcccccagggccgctttgactccttcaccgtgcagtacaaggacagggacgggcggccccaggcggtgcgtgttgggggccaggagagcaaggtcactgtgaggggcctggagcctgggcgcaagtacaagatgcacctgtacggcctccacgaggggcggcgcctgggcccggtgtc

SEQ ID NO: 1644 - protein, 4289 aa, Homo sapiens
MMPAQYALTSSLVLLVLLSTARAGPFSSRSNVTLPAPRPPPQPGGHTVGAGVGSPSSQLYEHTVEGGEKQVVFTHRINLPPSTGCGCPPGTEPPVLASEVQALRVRLEILEELVKGLKEQCTGGCCPASAQAGTGQTDVRTLCSLHGVFDLSRCTCSCEPGWGGPTCSDPTDAEIPPSSPPSASGSCPDDCNDQGRCVRGRCVCFPGYTGPSCGWPSCPGDCQGRGRCVQGVCVCRAGFSGPDCSQRSCPRGCSQRGRCEGGRCVCDPGYTGDDCGMRSCPRGCSQRGRCENGRCVCNPGYTGEDCGVRSCPRGCSQRGRCKDGRCVCDPGYTGEDCGTRSCPWDCGEGGRCVDGRCVCWPGYTGEDCSTRTCPRDCRGRGRCEDGECICDTGYSGDDCGVRSCPGDCNQRGRCEDGRCVCWPGYTGTDCGSRACPRDCRGRGRCENGVCVCNAGYSGEDCGVRSCPGDCRGRGRCESGRCMCWPGYTGRDCGTRACPGDCRGRGRCVDGRCVCNPGFTGEDCGSRRCPGDCRGHGLCEDGVCVCDAGYSGEDCSTRSCPGGCRGRGQCLDGRCVCEDGYSGEDCGVRQCPNDCSQHGVCQDGVCICWEGYVSEDCSIRTCPSNCHGRGRCEEGRCLCDPGYTGPTCATRMCPADCRGRGRCVQGVCLCHVGYGGEDCGQEEPPASACPGGCGPRELCRAGQCVCVEGFRGPDCAIQTCPGDCRGRGECHDGSCVCKDGYAGEDCGEARVPSSASAYDQRGLAPGQEYQVTVRALRGTSWGLPASKTITTMIDGPQDLRVVAVTPTTLELGWLRPQAEVDRFVVSYVSAGNQRVRLEVPPEADGTLLTDLMPGVEYVVTVTAERGRAVSYPASVRANTEEREEESPPRPSLSQPPRRPWGNLTAELSRFRGTVQDLERHLRAHGYPLRANQTYTSVARHIHEYLQRQVLGSSADGALLVSLDGLRGQFERVVLRWRPQPPAEGPGGELTVPGTTRTVSLPDLRPGTTYHVEVHGVRAGQTSKSYAFITTTGPSTTQGAQAPLLQQRPQELGELRVLGRDETGRLRVVWTAQPDTFAYFQLRMRVPEGPGAHEEVLPGDVRQALVPPPPPGTPYELSLHGVPPGGKPSDPIIYQGIMDKDEEKPGKSSGPPRLGELTVTDRTSDSLLLRWTVPEGEFDSFVIQYKDRDGQPQVVPVEGPQRSAVITSLDPGRKYKFVLYGFVGKKRHGPLVAEAKILPQSDPSPGTPPHLGNLWVTDPTPDSLHLSWTVPEGQFDTFMVQYRDRDGRPQVVPVEGPERSFVVSSLDPDHKYRFTLFGIANKKRYGPLTADGTTAPERKEEPPRPEFLEQPLLGELTVTGVTPDSLRLSWTVAQGPFDSFMVQYKDAQGQPQAVPVAGDENEVTVPGLDPDRKYKMNLYGLRGRQRVGPESVVAKTAPQEDVDETPSPTELGTEAPESPEEPLLGELTVTGSSPDSLSLFWTVPQGSFDSFTVQYKDRDGRPRAVRVGGKESEVTVGGLEPGHKYKMHLYGLHEGQRVGPVSAVGVTAPQQEETPPATESPLEPRLGELTVTDVTPNSVGLSWTVPEGQFDSFIVQYKDKDGQPQVVPVAADQREVTVYNLEPERKYKMNMYGLHDGQRMGPLSVVIVTAPATEASKPPLEPRLGELTVTDITPDSVGLSWTVPEGEFDSFVVQYKDRDGQPQVVPVAADQREVTIPDLEPSRKYKFLLFGIQDGKRRSPVSVEAKTVARGDASPGAPPRLGELWVTDPTPDSLRLSWTVPEGQFDSFVVQFKDKDGPQVVPVEGHERSVTVTPLDAGRKYRFLLYGLLGKKRHGPLTADGTTEARSAMDDTGTKRPPKPRLGEELQVTTVTQNSVGLSWTVPEGQFDSFVVQYKDRDGQPQVVPVEGSLREVSVPGLDPAHRYKLLLYGLHHGKRVGPISAVAITAGREETETETTAPTPPAPEPHLGELTVEEATSHTLHLSWMVTEGEFDSFEIQYTDRDGQLQMVRIGGDRNDITLSGLESDHRYLVTLYGFSDGKHVGPVHVEALTVPEEEKPSEPPTATPEPPIKPRLGELTVTDATPDSLSLSWTVPEGQFDHFLVQYRNGDGQPKAVRVPGHEEGVTISGLEPDHKYKMNLYGFHGGQRMGPVSVVGVTEPSMEAPEPAEEPLLGELTVTGSSPDSLSLSWTVPQGRFDSFTVQYKDRDGRPQVVRVGGEESEVTVGGLEPGRKYKMHLYGLHEGRRVGPVSAVGVTAPEEESPDAPLAKLRLGQMTVRDITSDSLSLSWTVPEGQFDHFLVQFKNGDGQPKAVRVPGHEDGVTISGLEPDHKYKMNLYGFHGGQRVGPVSAVGLTASTEPPTPEPPIKPRLEELTVTDATPDSLSLSWTVPEGQFDHFLVQYKNGDGQPKATRVPGHEDRVTISGLEPDNKYKMNLYGFHGGQRVGPVSAIGVTEEETPSPTEPSMEAPEPPEEPLLGELTVTGSSPDSLSLSWTVPQGRFDSFTVQYKDRDGRPQVVRVGGEESEVTVGGLEPGRKYKMHLYGLHEGRRVGPVSTVGVTAPQEDVDETPSPTEPGTEAPGPPEEPLLGELTVTGSSPDSLSLSWTVPQGRFDSFTVQYKDRDGRPQAVRVGGQESKVTVRGLEPGRKYKMHLYGLHEGRRLGPVSAVGVTEDEAETTQAVPTMTPEPPIKPRLGELTMTDATPDSLSLSWTVPEGQFDHFLVQYRNGDGQPKAVRVPGHEDGVTISGLEPDHKYKMNLYGFHGGQRVGPISVIGVTEEETPSPTELSTEAPEPPEEPLLGELTVTGSSPDSLSLSWTIPQGHFDSFTVQYKDRDGRPQVMRVRGEESEVTVGGLEPGRKYKMHLYGLHEGRRVGPVSTVGVTVPTTTPEPPNKPRLGELTVTDATPDSLSLSWMVPEGQFDHFLVQYRNGDGQPKVVRVPGHEDGVTISGLEPDHKYKMNLYGFHGGQRVGPISVIGVTEEETPAPTEPSTEAPEPPEEPLLGELTVTGSSPDSLSLSWTIPQGRFDSFTVQYKDRDGRPQVVRVRGEESEVTVGGLEPGCKYKMHLYGLHEGQRVGPVSAVGVTAPKDEAETTQAVPTMTPEPPIKPRLGELTVTDATPDSLSLSWMVPEGQFDHFLVQYRNGDGQPKAVRVPGHEDGVTISGLEPDHKYKMNLYGFHGGQRVGPVSAIGVTEEETPSPTEPSTEAPEAPEEPLLGELTVTGSSPDSLSLSWTVPQGRFDSFTVQYKDRDGQPQVVRVRGEESEVTVGGLEPGRKYKMHLYGLHEGQRVGPVSTVGITAPLPTPLPVEPRLGELAVAAVTSDSVGLSWTVAQGPFDSFLVQYRDAQGQPQAVPVSGDLRAVAVSGLDPARKYKFLLFGLQNGKRHGPVPVEARTAPDTKPSPRLGELTVTDATPDSVGLSWTVPEGEFDSFVVQYKDKDGRLQVVPVAANQREVTVQGLEPSRKYRFLLYGLSGRKRLGPISADSTTAPLEKELPPHLGELTVAEETSSSLRLSWTVAQGPFDSFVVQYRDTDGQPRAVPVAADQRTVTVEDLEPGKKYKFLLYGLLGGKRLGPVSALGMTAPEEDTPAPELAPEAPEPPEEPRLGVLTVTDTTPDSMRLSWSVAQGPFDSFVVQYEDTNGQPQALLVDGDQSKILISGLEPSTPYRFLLYGLHEGKRLGPLSAEGTTGLAPAGQTSEESRPRLSQLSVTDVTTSSLRLNWEAPPGAFDSFLLRFGVPSPSTLEPHPRPLLQRELMVPGTRHSAVLRDLRSGTLYSLTLYGLRGPHKADSIQGTARTLSPVLESPRDLQFSEIRETSAKVNWMPPPSRADSFKVSYQLADGGEPQSVQVDGQARTQKLQGLIPGARYEVTVVSVRGFEESEPLTGFLTTVPDGPTQLRALNLTEGFAVLHWKPPQNPVDTYDVQVTAPGAPPLQAETPGSAVDYPLHDLVLHTNYTATVRGLRGPNLTSPASITFTTGLEAPRDLEAKEVTPRTALLTWTEPPVRPAGYLLSFHTPGGQNQEILLPGGITSHQLLGLFPSTSYNARLQAMWGQSLLPPVSTSFTTGGLRIPFPRDCGEEMQNGAGASRTSTIFLNGNRERPLNVFCDMETDGGGWLVFQRRMDGQTDFWRDWEDYAHGFGNISGEFWLGNEALHSLTQAGDYSMRVDLRAGDEAVFAQYDSFHVDSAAEYYRLHLEGYHGTAGDSMSYHSGSVFSARDRDPNSLLISCAVSYRGAWWYRNCHYANLNGLYGSTVDHQGVSWYHWKGFEFSVPFTEMKLRPRNFRSPAGGG

SEQ ID NO: 1645 - DNA, 3129 bp, Homo sapiens
ccttgtgcatttgggctgaagacaaagatgactgcaggagtgggcaggccggagtggggcgccctggcctgtccccaggaaggaggaggagtctgcagccctgtgggcttcaacatccatcaaggagtccagagcaggagccaggccaggcgggagggaaaggccctgggaggggctctctaatctcccagccccgactctgccccgtcactgccactgctcctcattactcgctggggctgctgtcgcctccccgaagggtggccttgtccagatagcggcaaacctccctgccgtggatgagtcaggagcattttcttaagaggaacatcactggaaaacaaaatgagcggggacacagaaaccaacagcagtggctgcatttgtggtacaggctcctcttccagagctcgctgatgcccacctcagacaggcctgaccacggcacggctggtgggatttgccagtcacctcaaccagccagttccaccctcagcttctctcagaagggagcaccacactcctcaagctcagtgaatgtatcccggcatgggtggggccagagcctgtgatatctcgaggtgggctcggcaggacaccggggtgtggaagggggaagcgagcacctgactcagacagcgcgggagctcgcaggagtcacgaggccacagcgacttcattgtctgactgggcctggacctataaacttcccacctcagccttgggccaagcctggaagataaaaatggagcaccccatggcgcccctcactcagattctcccctgggcttctcccacgcagccccagaagaggacacaccagccccagagttagccccagaggcccctgagcctcctgaagagccccgcctaggagtgctgaccgtgaccgacacaaccccagactccatgcgcctctcgtggagcgtggcccagggcccctttgattccttcgtggtccagtatgaggacacgaacgggcagccccaggccttgctcgtggacggcgaccagagcaagatcctcatctcaggcctggagcccagcaccccctacaggttcctcctctatggcctccatgaagggaagcgcctggggcccctctcagctgagggcaccacagggctggctcctgctggtcagacctcagaggagtcaaggccccgcctgtcccagctgtctgtgactgacgtgaccaccagttcactgaggctcaactgggaggccccaccgggggccttcgactccttcctgctccgctttggggttccatcaccaagcactctggagccgcatccgcgtccactgctgcagcgcgagctgatggtgccggggacacggcactcggccgtgctccgggacctgcgttccgggactctgtacagcctgacactgtatgggctgcgaggaccccacaaggccgacagcatccagggaaccgcccgcaccctcagcccagttctggagagcccccgtgacctccaattcagtgaaatcagggagacctcagccaaggtcaactggatgcccccaccatcccgggcggacagcttcaaagtctcctaccagctggcggacggaggggagcctcagagtgtgcaggtggatggccaggcccggacccagaaactccaggggctgatcccaggcgctcgctatgaggtgaccgtggtctcggtccgaggctttgaggagagtgagcctctcacaggcttcctcaccacggttcctgacggtcccacacagttgcgtgcactgaacttgaccgagggattcgccgtgctgcactggaagcccccccagaatcctgtggacacctatgacgtccaggtcacagcccctggggccccgcctctgcaggcggagaccccaggcagcgcggtggactaccccctgcatgaccttgtcctccacaccaactacaccgccacagtgcgtggcctgcggggccccaacctcacttccccagccagcatcaccttcaccacagggctagaggcccctcgggacttggaggccaaggaagtgaccccccgcaccgccctgctcacttggactgagcccccagtccggcccgcaggctacctgctcagcttccacacccctggtggacagaaccaggagatcctgctcccaggagggatcacatctcaccagctccttggcctctttccctccacctcctacaatgcacggctccaggccatgtggggccagagcctcctgccgcccgtgtccacctctttcaccacgggtgggctgcggatccccttccccagggactgcggggaggagatgcagaacggagccggtgcctccaggaccagcaccatcttcctcaacggcaaccgcgagcggcccctgaacgtgttttgcgacatggagactgatgggggcggctggctggtgttccagcgccgcatggatggacagacagacttctggagggactgggaggactatgcccatggttttgggaacatctctggagagttctggctgggcaatgaggccctgcacagcctgacacaggcaggtgactactccatgcgcgtggacctgcgggctggggacgaggctgtgttcgcccagtacgactccttccacgtagactcggctgcggagtactaccgcctccacttggagggctaccacggcaccgcaggggactccatgagctaccacagcggcagtgtcttctctgcccgtgatcgggaccccaacagcttgctcatctcctgcgctgtctcctaccgaggggcctggtggtacaggaactgccactacgccaacctcaacgggctctacgggagcacagtggaccatcagggagtgagctggtaccactggaagggcttcgagttctcggtgcccttcacggaaatgaagctgagaccaagaaactttcgctccccagcggggggaggctgagctgctgcccacctctctcgcaccccagtatgactgccgagcactgaggggtcgccccgagagaagagccagggtccttcaccacccagccgctggaggaagccttctctgccagcgatctcgcagcactgtgtttacaggggggaggggaggggttcgtacaggagcaataaaggagaaactgaggtacccggaaaa

SEQ ID NO: 1646 - protein, 673 aa, Homo sapiens
MRLSWSVAQGPFDSFVVQYEDTNGQPQALLVDGDQSKILISGLEPSTPYRFLLYGLHEGKRLGPLSAEGTTGLAPAGQTSEESRPRLSQLSVTDVTTSSLRLNWEAPPGAFDSFLLRFGVPSPSTLEPHPRPLLQRELMVPGTRHSAVLRDLRSGTLYSLTLYGLRGPHKADSIQGTARTLSPVLESPRDLQFSEIRETSAKVNWMPPPSRADSFKVSYQLADGGEPQSVQVDGQARTQKLQGLIPGARYEVTVVSVRGFEESEPLTGFLTTVPDGPTQLRALNLTEGFAVLHWKPPQNPVDTYDVQVTAPGAPPLQAETPGSAVDYPLHDLVLHTNYTATVRGLRGPNLTSPASITFTTGLEAPRDLEAKEVTPRTALLTWTEPPVRPAGYLLSFHTPGGQNQEILLPGGITSHQLLGLFPSTSYNARLQAMWGQSLLPPVSTSFTTGGLRIPFPRDCGEEMQNGAGASRTSTIFLNGNRERPLNVFCDMETDGGGWLVFQRRMDGQTDFWRDWEDYAHGFGNISGEFWLGNEALHSLTQAGDYSMRVDLRAGDEAVFAQYDSFHVDSAAEYYRLHLEGYHGTAGDSMSYHSGSVFSARDRDPNSLLISCAVSYRGAWWYRNCHYANLNGLYGSTVDHQGVSWYHWKGFEFSVPFTEMKLRPRNFRSPAGGG

SEQ ID NO: 1647 - DNA, 2622 bp, Homo sapiens
aaccgtctcctggttggggggtgggggggaaagatggcggagctgatgctgctcagcgagattgctgacccgacgcgtttcttcaccgacaacctgcttagcccggaggactggggtctgcagaacagcaccttgtattctggcctagatgaagtggccgaggagcagacgcagctcttccgttgcccggagcaggatgtcccgtttgacggcagctccctggacgtggggatggatgtcagcccctctgagcccccatgggaactcctgccgatcttcccagatcttcaggtgaagtctgagccatcttccccctgctcttcctcctccctcagctccgagtcatcgcgtctctccacagagccatccagcgaggctcttggggtaggggaggtgctccatgtgaagacagagtccttggcacccccactgtgtctcctgggagatgacccaacatcctcatttgaaaccgtccagatcaatgttatccccacctctgatgattcctcagatgtccagaccaagatagaacctgtctctccatgttcttccgtcaactctgaggcctccctgctctcagccgactcctccagccaggcttttataggagaggaggtcctggaagtgaagacagagtccctgtccccttcaggatgcctcctgtgggatgtcccagccccctcacttggagctgtccagatcagcatgggcccatcccttgatggctcctcaggcaaagccctgcccacccggaagccgccactgcagcccaaacctgtagtgctaaccactgtcccaatgccatccagagctgtgcctcccagcaccacagtccttctgcagtccctcgtccagccacccccagtgtccccagttgtcctcatccagggtgctattcgagtccagcctgaagggccggctccctctctaccacggcctgagaggaagagcatcgttcccgctcctatgcctggaaactcctgcccgcctgaagtggatgcaaagctgctgaagcggcagcagcgaatgatcaagaaccgggagtcagcctgccagtcccggagaaagaagaaagagtatctgcagggactggaggctcggctgcaagcagtactggctgacaaccagcagctccgccgagagaatgctgccctccggcggcggctggaggccctgctggctgaaaacagcgagctcaagttagggtctggaaacaggaaggtggtctgcatcatggtcttccttctcttcattgccttcaactttggacctgtcagcatcagtgagcctccttcagctcccatctctcctcggatgaacaagggggagcctcaaccccggagacacttgctggggttctcagagcaagagccagttcagggagttgaacctctccaggggtcctcccagggccctaaggagccccagcccagccccacagaccagcccagtttcagcaacctgacagccttccctgggggcgccaaggagctactactaagagacctagaccagctcttcctctcctctgattgccggcacttcaaccgcactgagtccctgaggcttgctgacgagttgagtggctgggtccagcgccaccagagaggccggaggaagatccctcagagggcccaggagagacagaagtctcagccacggaagaagtcacctccagttaaggcagtccccatccaaccccctggacccccagaaagggattctgtgggccagctgcaactatatcgccacccagaccgttcgcagccagcattcttggatgcaattgaccgacgggaagacacattttatgttgtctctttccgaagggaccacctgctgctcccagccatcagccacaacaagacctcccggcccaagatgtccctggtgatgcctgccatggcccccaatgagaccctgtcaggccgtggggccccgggggactatgaggagatgatgcagatcgagtgtgaggtcatggacaccagggtgattcacatcaagacctccacagtgcccccctcgctccgaaaacagccatccccaaccccaggcaatgccacaggtggccccttgccagtctctgcagccagccaggcccaccaggcctcccaccagcccctctacctcaatcatccctgacctctgccattcacactgacttagaacggggggagggggtaccaggtggccaggtgggactgtttcaaatttccctgatccccaggcttggggcaattggtaaaggaaagagcaggtgtgggggttaagcacttatttgaggtgggggtgttcacctctcttctcatcccttttcagaatatagggctcctctcattcctgtgaacccccagtcctggcttctttgtttgaggggattgtgtgaggttcagttgtggggtgggtggtgagctgctgcatattttttattttgtttctctagtgttatggcagtggaggtgggaatttagtccccaggtgggacaagggaagttttttcattttggagctagttactgggagtaagggagggtggggtgggggggagttcaggtttatgtgtgtgcatttcttttttattattattaaataaacaacttggagggagttgaaaaaaaa

SEQ ID NO: 1648 - protein, 703 aa, Homo sapiens
MAELMLLSEIADPTRFFTDNLLSPEDWGLQNSTLYSGLDEVAEEQTQLFRCPEQDVPFDGSSLDVGMDVSPSEPPWELLPIFPDLQVKSEPSSPCSSSSLSSESSRLSTEPSSEALGVGEVLHVKTESLAPPLCLLGDDPTSSFETVQINVIPTSDDSSDVQTKIEPVSPCSSVNSEASLLSADSSSQAFIGEEVLEVKTESLSPSGCLLWDVPAPSLGAVQISMGPSLDGSSGKALPTRKPPLQPKPVVLTTVPMPSRAVPPSTTVLLQSLVQPPPVSPVVLIQGAIRVQPEGPAPSLPRPERKSIVPAPMPGNSCPPEVDAKLLKRQQRMIKNRESACQSRRKKKEYLQGLEARLQAVLADNQQLRRENAALRRRLEALLAENSELKLGSGNRKVVCIMVFLLFIAFNFGPVSISEPPSAPISPRMNKGEPQPRRHLLGFSEQEPVQGVEPLQGSSQGPKEPQPSPTDQPSFSNLTAFPGGAKELLLRDLDQLFLSSDCRHFNRTESLRLADELSGWVQRHQRGRRKIPQRAQERQKSQPRKKSPPVKAVPIQPPGPPERDSVGQLQLYRHPDRSQPAFLDAIDRREDTFYVVSFRRDHLLLPAISHNKTSRPKMSLVMPAMAPNETLSGRGAPGDYEEMMQIECEVMDTRVIHIKTSTVPPSLRKQPSPTPGNATGGPLPVSAASQAHQASHQPLYLNHP

SEQ ID NO: 1649 - DNA, 1357 bp, Homo sapiens
gggttagttgtcagtatctttcccagttgttccgccccctacccccgcctcccgcaccgcgcccctctccggctgccctctccgcgtggggcaaggctccgagggcagcattcagtagccatttagctttggaaggagaggtgattcgaatggcccggctcctcctgtcaccatgctaggcactttggccgcgcaggtgctgacctgaacctggttcatccctttctgaccaaaactgttcactcaccgtggaagggactaagcatccatatggagacgccaccagtcaatacaattggagaaaaggacacctctcagccgcaacaagagtgggaaaagaaccttcgggagaaccttgattcagttattcagattaggcagcagccccgagaccctcctaccgaaacgcttgagctggaagtaagcccagatccagccagccaaattctagagcatactcaaggagctgaaaaactggttgctgaacttgaaggagactctcataagtctcatggatcaaccagtcagatgccagaggcccttcaagcttctgatctctggtactgccccgatgggagctttgtcaagaagatcgtaatccgtggccatggcttggacaaacccaaactaggctcctgctgccgggtactggctttggggtttcctttcggatcagggccgccagagggctggacagagctaactatgggcgtagggccatggagggaggaaacttggggggagctcatagagaaatgcttggagtccatgtgtcaaggtgaggaagcagagcttcagctgcctgggcactctggacctcctgtcaggctcacactggcatccttcactcaaggccgagactcctgggagctggagactagcgagaaggaagccctggccagggaagaacgtgcaaggggcacagaactatttcgagctgggaaccctgaaggagctgcccgatgctatggacgggctcttcggctgctcctgactttacccccacctggccctccagaacgaactgtccttcatgccaatctggctgcctgtcagttgttgctagggcagcctcagttggcagcccagagctgtgaccgggtgttggagcgggagcctggccatttaaaggccttataccgaaggggggttgcccaggctgcccttgggaacctggaaaaagcaactgctgacctcaagaaggtgctggcgatagatcccaaaaaccgggcagcccaggaggaactggggaaggtggtcattcaggggaagaaccaggatgcagggctggctcagggtctgcgcaagatgtttggctgattaaaagttaaaccttaaaagagaaaaaaaaaaaaaa

SEQ ID NO: 1650 - protein, 349 aa, Homo sapiens
METPPVNTIGEKDTSQPQQEWEKNLRENLDSVIQIRQQPRDPPTETLELEVSPDPASQILEHTQGAEKLVAELEGDSHKSHGSTSQMPEALQASDLWYCPDGSFVKKIVIRGHGLDKPKLGSCCRVLALGFPFGSGPPEGWTELTMGVGPWREETWGELIEKCLESMCQGEEAELQLPGHSGPPVRLTLASFTQGRDSWELETSEKEALAREERARGTELFRAGNPEGAARCYGRALRLLLTLPPPGPPERTVLHANLAACQLLLGQPQLAAQSCDRVLEREPGHLKALYRRGVAQAALGNLEKATADLKKVLAIDPKNRAAQEELGKVVIQGKNQDAGLAQGLRKMFG

SEQ ID NO: 1651 - DNA, 1931 bp, Homo sapiens
cttcatctctccatctctgcgctgctgccggctgcgccatccagcacccagactccagcaccggccgaggacccccactccggctgcagggaccctgtcccagcgagaccgcaggcatgtcatccgaaaagtcaggactcccagactcagtccctcacacttctccgccgccctacaatgcccctcagcctccagccgaacccccagccccaccgccacaggcagccccttcctcacaccatcaccaccaccaccactaccatcagtctggcaccgccaccctcccgcgcttaggggcagggggcctggcctcttccgcggccaccgctcagcgcggtccctcctcctctgccacgctgccgaggcccccccaccacgcccctcccggccctgctgccggggcacccccacccggctgcgctaccttgccccgcatgccacccgacccttacctgcaggagactcgcttcgagggcccacttcccccgccgccgcccgctgccgccgccccgcccccgccggcgccagcccagactgcccaggcccctggcttcgtggtgcccacgcacgcggggactgtgggcacgctgccgctggggggctacgtagcgcccggataccccctgcagctgcagccttgcactgcttacgtgccggtctacccggtgggcacgccatatgcaggcgggaccccggggggaacaggagtgacctccactctccccccgccgccccagggcccagggctggccctactggagccgaggcgcccgccacacgactacatgcccatcgcggtgctgaccaccatctgttgcttctggcctactggcatcattgccatcttcaaggccgtgcaggtgcgcacggccttggcccgcggagacatggtgtcggccgagatcgcttcacgcgaggcccggaacttctccttcatctccctggccgtgggcatcgcggccatggtgctctgtaccatcctcaccgtagtcatcatcatcgccgcgcagcaccacgagaactactgggatccctaaaaacgcccctggtccggccccactctgcgcccctcgatctcccaggctctttctgcagtcataccgcggacccaatgggcgccctgcacacccgtttctggggccgtcagacttggatacatcgtaaactccgcctccacggaacgtctcgccttgcgagcaagctcggaatccagttcctcaggaacccctccaaaacccacacccccagggacgccgctttccgggatcccggccaaacgccggaccctcagtcgctccaggccccctcaccctcaaagtgtagcgcccccaaccgagcaacctcggtttggtccctaaaaccccgcctcctctataagcaccgccccagctctgacaaaaccccgcctccaggtcggcaggctccgccttcttttcttctccgcggggtgattcagtccagtgattgggtttgtggctccaggcctcgcccacagacggacagacccctccctttcttccggcaaaaggaccgagccctggggtagtaaggcccccacactcctgttttttgcaagtacatttttgtccctcctccacccaggtatctgcctattttcttgctaatcccagaacctttccttttgctttttttaaggacatttgggaagttcctggtgtaggacccttctccctgggataagaaacctgcctgtaaacgctctgtaaatactcccttccacccatcccagcccctgggcagccgggcagaagggaatccaggctatggacctcccaagtccccgctccccgctcccctcggcggccccgccttgttctgatctgtgtgtgagtgtgtgtgaacttctgaaagacaatattaaagagacttagttgaaaaaaaaaaaaaaaaaaaaaaaaaaaaaaaaaaaa

SEQ ID NO: 1652 - protein, 306 aa, Homo sapiens
MSSEKSGLPDSVPHTSPPPYNAPQPPAEPPAPPPQAAPSSHHHHHHHYHQSGTATLPRLGAGGLASSAATAQRGPSSSATLPRPPHHAPPGPAAGAPPPGCATLPRMPPDPYLQETRFEGPLPPPPPAAAAPPPPAPAQTAQAPGFVVPTHAGTVGTLPLGGYVAPGYPLQLQPCTAYVPVYPVGTPYAGGTPGGTGVTSTLPPPPQGPGLALLEPRRPPHDYMPIAVLTTICCFWPTGIIAIFKAVQVRTALARGDMVSAEIASREARNFSFISLAVGIAAMVLCTILTVVIIIAAQHHENYWDP

SEQ ID NO: 1653 - DNA, 2202 bp, Homo sapiens
ggaagtggggagaatcaaggcggggaaatcggactttcgggtcgctgggggcaacgaagcctggagaggccttctttccattcccagaatatgtttgctgctttttcctctccccactggcctaaatggatcgctccgcctgtttcctccccagcacctagggcgcaatggaatattccattgcccctcctgtcctgggtctgtgttgcggggaacgctcgcgcggttgccagagaaagccccggacgtgacggatttgcgcgaccccaagcagcccgcccttccccctcccatccgtcattcccctgcgttctctttcctcacccttccccccgccaccgtgggttccagacttgggataagtaaacagcgggtggagcgaggcctacggacccaggccaggtgggagtctgcactcttcaaggggcctgggctgctgctcacgggtattaaagaactccgcgttgttcatggctgaggcgatgcattaggaagatcctggacctagagaacaagtcccccgaacgctgagttggaggcgggacttcgggtgcgcgttggcgggagcatgctggggctctgggggcagcggctccccgcggcgtgggtcctgcttctgttgcctttcctgccgctgctgctgcttgcagcccccgcgccccaccgcgcgtcctacaagccggtcatcgtggtgcatgggctcttcgacagctcgtacagcttccgccacctgctggaatacatcaatgagacacaccccgggactgtggtgacagtgctcgatctcttcgatgggagagagagcttgcgacccctgtgggaacaggtgcaagggttccgagaggctgtggtccccatcatggcaaaggcccctcaaggggtgcatctcatctgctactcgcaggggggccttgtgtgccgggctctgctttctgtcatggatgatcacaacgtggattctttcatctccctctcctctccacagatgggacagtatggagacacggactacttgaagtggctgttccccacctccatgcggtctaacctctatcggatctgctatagcccctggggccaggaattctccatctgcaactactggcatgatccccaccacgatgacttgtacctcaatgccagcagcttcctggccctgatcaatggggaaagagaccatcccaatgccacagtatggcggaagaactttctgcgtgtgggccacctggtgctgattgggggccctgatgatggtgttattactccctggcagtccagcttctttggtttctatgatgcaaatgagaccgtcctggagatggaggagcaactggtttatctgcgggattcttttgggttgaagactctattggcccggggggccatagtgaggtgtccaatggccggtatctcccacacagcctggcactccaaccgtaccctttatgagacctgcattgaaccttggctctcctgaggatatattcaggggtccccaggaactcctcggtccagagaccaagtggtggccttggaaagcagatgtcaggctttggtgtgcctgtgaccacctcattgctcccatattatcccccatttttagtagagacggggttttagtagagacttggcctcccagaacccccttcctctgctcctccatgaatgacaattccaggcctcccctacctcatgtcctctcatttgggggattgctccgtgctgtccctttctctcaaggccgaagttgggaagtgagaaaccatgtttttaacttgtggctgcttttgctgctgctgctcctccgtatctggctgtatgggtggagaacccaccccctgcccaccacaggggtctccttccaggccactcaggacatttttagcttctctcctccccatgttcccttttttctctaaagtcccctgacatcagccctcccaactcctaagagggactacccatgagagtggggttctgaggctcccctatggggacagttccgttcttgaagtgtcagtgttggggaatatctgtggcctatgaggcccatctcaggtttggggatcccccagtccctatgatcagtgttggagtacccccctgggagagcctagtttctttgaggccccaggccctcttttaactacctttgaataggtgttatccctgtatttatggaaataaagttccatttcctca

SEQ ID NO: 1654 - protein, 302 aa, Homo sapiens
MLGLWGQRLPAAWVLLLLPFLPLLLLAAPAPHRASYKPVIVVHGLFDSSYSFRHLLEYINETHPGTVVTVLDLFDGRESLRPLWEQVQGFREAVVPIMAKAPQGVHLICYSQGGLVCRALLSVMDDHNVDSFISLSSPQMGQYGDTDYLKWLFPTSMRSNLYRICYSPWGQEFSICNYWHDPHHDDLYLNASSFLALINGERDHPNATVWRKNFLRVGHLVLIGGPDDGVITPWQSSFFGFYDANETVLEMEEQLVYLRDSFGLKTLLARGAIVRCPMAGISHTAWHSNRTLYETCIEPWLS

SEQ ID NO: 1655 - DNA, 1772 bp, Homo sapiens
gagtagagtagggcaggagaaactgggccaggctgcacttagctcaaggggcctcgaggactctctgcgtctctggagacaagggcactacacgcacttcagaatgaagagttgcgggagcatgctggggctctgggggcagcggctccccgcggcgtgggtcctgcttctgttgcctttcctgccgctgctgctgcttgcagcccccgcgccccaccgcgcgtcctacaagccggtcatcgtggtgcatgggctcttcgacagctcgtacagcttccgccacctgctggaatacatcaatgagacacaccccgggactgtggtgacagtgctcgatctcttcgatgggagagagagcttgcgacccctgtgggaacaggtgcaagggttccgagaggctgtggtccccatcatggcaaaggcccctcaaggggtgcatctcatctgctactcgcaggggggccttgtgtgccgggctctgctttctgtcatggatgatcacaacgtggattctttcatctccctctcctctccacagatgggacagtatggagacacggactacttgaagtggctgttccccacctccatgcggtctaacctctatcggatctgctatagcccctggggccaggaattctccatctgcaactactggcatgatccccaccacgatgacttgtacctcaatgccagcagcttcctggccctgatcaatggggaaagagaccatcccaatgccacagtatggcggaagaactttctgcgtgtgggccacctggtgctgattgggggccctgatgatggtgttattactccctggcagtccagcttctttggtttctatgatgcaaatgagaccgtcctggagatggaggagcaactggtttatctgcgggattcttttgggttgaagactctattggcccggggggccatagtgaggtgtccaatggccggtatctcccacacagcctggcactccaaccgtaccctttatgagacctgcattgaaccttggctctcctgaggatatattcaggggtccccaggaactcctcggtccagagaccaagtggtggccttggaaagcagatgtcaggctttggtgtgcctgtgaccacctcattgctcccatattatcccccatttttagtagagacggggttttagtagagacttggcctcccagaacccccttcctctgctcctccatgaatgacaattccaggcctcccctacctcatgtcctctcatttgggggattgctccgtgctgtccctttctctcaaggccgaagttgggaagtgagaaaccatgtttttaacttgtggctgcttttgctgctgctgctcctccgtatctggctgtatgggtggagaacccaccccctgcccaccacaggggtctccttccaggccactcaggacatttttagcttctctcctccccatgttcccttttttctctaaagtcccctgacatcagccctcccaactcctaagagggactacccatgagagtggggttctgaggctcccctatggggacagttccgttcttgaagtgtcagtgttggggaatatctgtggcctatgaggcccatctcaggtttggggatcccccagtccctatgatcagtgttggagtacccccctgggagagcctagtttctttgaggccccaggccctcttttaactacctttgaataggtgttatccctgtatttatggaaataaagttccatttcctcaaaaaaaaaaaaaaaaaa

SEQ ID NO: 1656 - protein, 308 aa, Homo sapiens
MKSCGSMLGLWGQRLPAAWVLLLLPFLPLLLLAAPAPHRASYKPVIVVHGLFDSSYSFRHLLEYINETHPGTVVTVLDLFDGRESLRPLWEQVQGFREAVVPIMAKAPQGVHLICYSQGGLVCRALLSVMDDHNVDSFISLSSPQMGQYGDTDYLKWLFPTSMRSNLYRICYSPWGQEFSICNYWHDPHHDDLYLNASSFLALINGERDHPNATVWRKNFLRVGHLVLIGGPDDGVITPWQSSFFGFYDANETVLEMEEQLVYLRDSFGLKTLLARGAIVRCPMAGISHTAWHSNRTLYETCIEPWLS

SEQ ID NO: 1657 - DNA, 1293 bp, Homo sapiens
gcttgaagcctcccaggagaaagaagccagcctgtagggtccagcgtcaaagcgaatcatggggtccagggctgagctgtgcactctcttaggcggattctccttcctcctgctactgataccaggcgagggggccaagggtggatccctcagagagagtcagggagtctgctccaagcagacactggtggtcccgctccactacaacgagtcctacagccaaccagtgtacaagccctacctgaccttgtgcgctgggaggcgcatctgcagcacttacaggaccatgtaccgcgttatgtggcgggaggtgaggcgggaggttcagcagacccatgcagtgtgctgccagggctggaagaagcggcacccgggggcgctcacctgtgaagccatctgcgccaagccttgcctgaacggaggcgtctgcgttaggcctgaccagtgcgagtgcgcccccggctggggagggaagcactgtcatgtggacgtggatgaatgtaggaccagcatcaccctctgctcgcaccattgttttaatacggcaggcagcttcacctgcggctgcccccatgacctagtgctaggcgtggacgggcgcacctgcatggaggggtccccagagcccccaaccagtgccagcatactcagcgtggccgttcgggaggcggaaaaagatgagcgcgctctgaagcaggagattcacgagctgcgagggcgcctggagcggctggagcagtgggccggtcaggctggggcctgggtcagagcggtgctgcccgtgccgcctgaagagctgcagccagaacaggtggctgagctgtggggccggggtgaccggatcgaatctctcagcgaccaggtgctgctgctggaggagaggctaggtgcctgctcctgtgaggacaacagcctgggcctcggcgtcaatcatcgataagaagcctctacagcacccctgccccctaatttatacagaaaccggacccactaatcctctgggattggccgactgtgagctgcagataaggctatcagccaccaaagagcaatgaacaatggaaacttcagagagctgaagaaagggggaggcctgtgttcttggcctgcccctgagtcttctggctgggggcaggttgcctgggcaagaactgcttcttcaattccttaacaaatgcaaccaccaacacccagatctctctctctctttattttcagtttttttgctgttatccagataattaataaaaaccaaccacgcaaaactggaaaaaaaaaaaaaaaaaaactcga

SEQ ID NO: 1658 - protein, 293 aa, Homo sapiens
MGSRAELCTLLGGFSFLLLLIPGEGAKGGSLRESQGVCSKQTLVVPLHYNESYSQPVYKPYLTLCAGRRICSTYRTMYRVMWREVRREVQQTHAVCCQGWKKRHPGALTCEAICAKPCLNGGVCVRPDQCECAPGWGGKHCHVDVDECRTSITLCSHHCFNTAGSFTCGCPHDLVLGVDGRTCMEGSPEPPTSASILSVAVREAEKDERALKQEIHELRGRLERLEQWAGQAGAWVRAVLPVPPEELQPEQVAELWGRGDRIESLSDQVLLLEERLGACSCEDNSLGLGVNHR

SEQ ID NO: 1659 - DNA, 2242 bp, Homo sapiens
ggaaaccagcaggcgttggggaggggtggcgggggaatagcggcggcagcagccccagccctcagagagacagcagaaagggagggagggagggtgctggggggacagccccccaccattcctaccgctatgggcccaacctcccactcccacctcccctccatcggccggggctaggacacccccaaatcccgtcgcccccttggcaccgacaccccgacagagacagagacacagccatccgccaccaccgctgccgcagcctggctggggagggggccagccccccaggccccctacccctctgaggtggccagaatggatttgtggccaggggcatggatgctgctgctgctgctcttcctgctgctgctcttcctgctgcccaccctgtggttctgcagccccagtgccaagtacttcttcaagatggccttctacaatggctggatcctcttcctggctgtgctcgccatccctgtgtgtgccgtgcgaggacgcaacgtcgagaacatgaagatcttgcgtctaatgctgctccacatcaaatacctgtacgggatccgagtggaggtgcgaggggctcaccacttccctccctcgcagccctatgttgttgtctccaaccaccagagctctctcgatctgcttgggatgatggaggtactgccaggccgctgtgtgcccattgccaagcgcgagctactgtgggctggctctgccgggctggcctgctggctggcaggagtcatcttcatcgaccggaagcgcacgggggatgccatcagtgtcatgtctgaggtcgcccagaccctgctcacccaggacgtgagggtctgggtgtttcctgagggaacgagaaaccacaatggctccatgctgcccttcaaacgtggcgccttccatcttgcagtgcaggcccaggttcccattgtccccatagtcatgtcctcctaccaagacttctactgcaagaaggagcgtcgcttcacctcgggacaatgtcaggtgcgggtgctgcccccagtgcccacggaagggctgacaccagatgacgtcccagctctggctgacagagtccggcactccatgctcactgttttccgggaaatctccactgatggccggggtggtggtgactatctgaagaagcctgggggcggtgggtgaaccctggctctgagctctcctcccatctgtccccatcttcctccccacacctacccacccagtgggccctgaagcagggccaaaccctcttccttgtctcccctctccccacttattctcctatttggaatcttcaacttctgaagtgaatgtggatacagcgccactcctgccccctcttggccccatccatggactcttgcctcggtgcagtctccactcttgacccccacctcctactgtcttgtctgtgggacagttgcctccccctcatctccagtgactcagcctacacaagggaggggaacattccatccccagtggagtctcttcctatgtggtcttctctacccctctaccccacattggccagtggactcatccattctttggaacaaatcccccccactccaaagtccatggattcaatggactcatccatttgtgaggaggacttctcgccctctggctggaagctgatacctgaagcactcccaggctcatcctgggagctttcctcagcaccttcaccttccctcccagtgtagcctcctgtcagtgggggctggacccttctaattcagaggtctcatgcctgcccttgcccagatgcccagggtcgtgcactctctgggataccagttcagtctccacatttctggttttctgtccccatagtacagttcttcagtggacatgaccccacccagccccctgcagccctgctgcaccatctcaccagacacaaggggaagaagcagacatcaggtgctgcactcacttctgccccctggggagttggggaaaggaacgaaccctggctggaggggataggagggcttttaatttatttctttttctgttgaggcttccccctctctgagccagttttcatttcttcctggtggcattagccactccctgcctctcactccagacctgttcccacaactggggaggtaggctgggagcaaaaggagagggtgggacccagttttgcgtggttggtttttattaattatctggataacagcaaaaaaactgaaaataaagagagagagagaaaaaaaaa

SEQ ID NO: 1660 - protein, 283 aa, Homo sapiens
MDLWPGAWMLLLLLFLLLLFLLPTLWFCSPSAKYFFKMAFYNGWILFLAVLAIPVCAVRGRNVENMKILRLMLLHIKYLYGIRVEVRGAHHFPPSQPYVVVSNHQSSLDLLGMMEVLPGRCVPIAKRELLWAGSAGLACWLAGVIFIDRKRTGDAISVMSEVAQTLLTQDVRVWVFPEGTRNHNGSMLPFKRGAFHLAVQAQVPIVPIVMSSYQDFYCKKERRFTSGQCQVRVLPPVPTEGLTPDDVPALADRVRHSMLTVFREISTDGRGGGDYLKKPGGGG

SEQ ID NO: 1661 - DNA, 2023 bp, Homo sapiens
ggactttggagcgtatggctccaaatcaactcattggctaaaacttgacggaaaatggtggttaggtggccagaatggatttgtggccaggggcatggatgctgctgctgctgctcttcctgctgctgctcttcctgctgcccaccctgtggttctgcagccccagtgccaagtacttcttcaagatggccttctacaatggctggatcctcttcctggctgtgctcgccatccctgtgtgtgccgtgcgaggacgcaacgtcgagaacatgaagatcttgcgtctaatgctgctccacatcaaatacctgtacgggatccgagtggaggtgcgaggggctcaccacttccctccctcgcagccctatgttgttgtctccaaccaccagagctctctcgatctgcttgggatgatggaggtactgccaggccgctgtgtgcccattgccaagcgcgagctactgtgggctggctctgccgggctggcctgctggctggcaggagtcatcttcatcgaccggaagcgcacgggggatgccatcagtgtcatgtctgaggtcgcccagaccctgctcacccaggacgtgagggtctgggtgtttcctgagggaacgagaaaccacaatggctccatgctgcccttcaaacgtggcgccttccatcttgcagtgcaggcccaggttcccattgtccccatagtcatgtcctcctaccaagacttctactgcaagaaggagcgtcgcttcacctcgggacaatgtcaggtgcgggtgctgcccccagtgcccacggaagggctgacaccagatgacgtcccagctctggctgacagagtccggcactccatgctcactgttttccgggaaatctccactgatggccggggtggtggtgactatctgaagaagcctgggggcggtgggtgaaccctggctctgagctctcctcccatctgtccccatcttcctccccacacctacccacccagtgggccctgaagcagggccaaaccctcttccttgtctcccctctccccacttattctcctatttggaatcttcaacttctgaagtgaatgtggatacagcgccactcctgccccctcttggccccatccatggactcttgcctcggtgcagtctccactcttgacccccacctcctactgtcttgtctgtgggacagttgcctccccctcatctccagtgactcagcctacacaagggaggggaacattccatccccagtggagtctcttcctatgtggtcttctctacccctctaccccacattggccagtggactcatccattctttggaacaaatcccccccactccaaagtccatggattcaatggactcatccatttgtgaggaggacttctcgccctctggctggaagctgatacctgaagcactcccaggctcatcctgggagctttcctcagcaccttcaccttccctcccagtgtagcctcctgtcagtgggggctggacccttctaattcagaggtctcatgcctgcccttgcccagatgcccagggtcgtgcactctctgggataccagttcagtctccacatttctggttttctgtccccatagtacagttcttcagtggacatgaccccacccagccccctgcagccctgctgcaccatctcaccagacacaaggggaagaagcagacatcaggtgctgcactcacttctgccccctggggagttggggaaaggaacgaaccctggctggaggggataggagggcttttaatttatttctttttctgttgaggcttccccctctctgagccagttttcatttcttcctggtggcattagccactccctgcctctcactccagacctgttcccacaactggggaggtaggctgggagcaaaaggagagggtgggacccagttttgcgtggttggtttttattaattatctggataacagcaaaaaaactgaaaataaagagagagagagaaaaaaaaaaaaaaaaaaaaaaaaaaaaaaaaaa

SEQ ID NO: 1662 - protein, 283 aa, Homo sapiens; identical to SEQ ID NO: 1660

SEQ ID NO: 1663 - DNA, 1179 bp, Homo sapiens
aggaaaccttgaagcctgcccaacgatcgtgggcaggaggtggtttctggtttgttggggcgtgtgtatgtgtatttggggggactgaagggtacgtggggcgaaacaaaaccgcaggcattcagaccaatagtgattggccatggcagcagcggaggaggaggacgggggccccgaagggccaaatcgcgagcggggcggggcgggcgcgaccttcgaatgtaatatatgtttggagactgctcgggaagctgtggtcagtgtgtgtggccacctgtactgttggccatgtcttcatcagtggctggagacacggccagaacggcaagagtgtccagtatgtaaagctgggatcagcagagagaaggttgtcccgctttatgggcgagggagccagaagccccaggatcccagattaaaaactccaccccgcccccagggccagagaccagctccggagagcagagggggattccagccatttggtgataccgggggcttccacttctcatttggtgttggtgcttttccctttggctttttcaccaccgtcttcaatgcccatgagcctttccgccggggtacaggtgtggatctgggacagggtcacccagcctccagctggcaggattccctcttcctgtttctcgccatcttcttctttttttggctgctcagtatttgagctatgtctgcttcctgcccacctccagccagagaagaatcagtattgagggtccctgctgacccttccgtactcctggacccccttgacccctctatttctgttggctaaggccagccctggacattgtccaggaaggcctggggaggaggagtgaagtctgtgcatagatgggagagccttctgctcagaggctcactcagtaacgttgtttaattctctgccctggggaaggaggatggattgagagaatgtctttctcctctcctaagtctttgctttccctgatttcttgatttgatcttcaaaggtgggcaaagttccctctgactcttcccccactccccatcttactgatttaatttaatttttcactccccagagtctaatatggattctgactcttaagtgcttccgccccctcactacctcctttaatacaaattcaataaaaaaggtgaaatataaaaaaaaaaaaaaaaaaaaaaaaaaaa

SEQ ID NO: 1664 - protein, 180 aa, Homo sapiens
MAAAEEEDGGPEGPNRERGGAGATFECNICLETAREAVVSVCGHLYCWPCLHQWLETRPERQECPVCKAGISREKVVPLYGRGSQKPQDPRLKTPPRPQGQRPAPESRGGFQPFGDTGGFHFSFGVGAFPFGFFTTVFNAHEPFRRGTGVDLGQGHPASSWQDSLFLFLAIFFFFWLLSI

SEQ ID NO: 1665 - DNA, 1414 bp, Homo sapiens
gccaggaccctggaaggaagcaggatggcagccggaacagcagttggagcctgggtgctggtcctcagtctgtggggggcagtagtaggtgctcaaaacatcacagcccggattggcgagccactggtgctgaagtgtaagggggcccccaagaaaccaccccagcggctggaatggaaactgaacacaggccggacagaagcttggaaggtcctgtctccccagggaggaggcccctgggacagtgtggctcgtgtccttcccaacggctccctcttccttccggctgtcgggatccaggatgaggggattttccggtgccaggcaatgaacaggaatggaaaggagaccaagtccaactaccgagtccgtgtctaccagattcctgggaagccagaaattgtagattctgcctctgaactcacggctggtgttcccaataaggtggggacatgtgtgtcagagggaagctaccctgcagggactcttagctggcacttggatgggaagcccctggtgcctaatgagaagggagtatctgtgaaggaacagaccaggagacaccctgagacagggctcttcacactgcagtcggagctaatggtgaccccagcccggggaggagatccccgtcccaccttctcctgtagcttcagcccaggccttccccgacaccgggccttgcgcacagcccccatccagccccgtgtctgggagcctgtgcctctggaggaggtccaattggtggtggagccagaaggtggagcagtagctcctggtggaaccgtaaccctgacctgtgaagtccctgcccagccctctcctcaaatccactggatgaaggatggtgtgcccttgccccttccccccagccctgtgctgatcctccctgagatagggcctcaggaccagggaacctacagctgtgtggccacccattccagccacgggccccaggaaagccgtgctgtcagcatcagcatcatcgaaccaggcgaggaggggccaactgcaggctctgtgggaggatcagggctgggaactctagccctggccctggggatcctgggaggcctggggacagccgccctgctcattggggtcatcttgtggcaaaggcggcaacgccgaggagaggagaggaaggccccagaaaaccaggaggaagaggaggagcgtgcagaactgaatcagtcggaggaacctgaggcaggcgagagtagtactggagggccttgaggggcccacagacagatcccatccatcagctcccttttctttttcccttgaactgttctggcctcagaccaactctctcctgtataatctctctcctgtataaccccaccttgccaagctttcttctacaaccagagccccccacaatgatgattaaacacctgacacatcttga

SEQ ID NO: 1666 - protein, 404 aa, Homo sapiens
MAAGTAVGAWVLVLSLWGAVVGAQNITARIGEPLVLKCKGAPKKPPQRLEWKLNTGRTEAWKVLSPQGGGPWDSVARVLPNGSLFLPAVGIQDEGIFRCQAMNRNGKETKSNYRVRVYQIPGKPEIVDSASELTAGVPNKVGTCVSEGSYPAGTLSWHLDGKPLVPNEKGVSVKEQTRRHPETGLFTLQSELMVTPARGGDPRPTFSCSFSPGLPRHRALRTAPIQPRVWEPVPLEEVQLVVEPEGGAVAPGGTVTLTCEVPAQPSPQIHWMKDGVPLPLPPSPVLILPEIGPQDQGTYSCVATHSSHGPQESRAVSISIIEPGEEGPTAGSVGGSGLGTLALALGILGGLGTAALLIGVILWQRRQRRGEERKAPENQEEEEERAELNQSEEPEAGESSTGGP

SEQ ID NO: 1667 - DNA, 1259 bp, Homo sapiens
gccaggaccctggaaggaagcaggatggcagccggaacagcagttggagcctgggtgctggtcctcagtctgtggggggcagtagtaggtgctcaaaacatcacagcccggattggcgagccactggtgctgaagtgtaagggggcccccaagaaaccaccccagcggctggaatggaaactgggaggaggcccctgggacagtgtggctcgtgtccttcccaacggctccctcttccttccggctgtcgggatccaggatgaggggattttccggtgccaggcaatgaacaggaatggaaaggagaccaagtccaactaccgagtccgtgtctaccagattcctgggaagccagaaattgtagattctgcctctgaactcacggctggtgttcccaataaggtggggacatgtgtgtcagagggaagctaccctgcagggactcttagctggcacttggatgggaagcccctggtgcctaatgagaagggagtatctgtgaaggaacagaccaggagacaccctgagacagggctcttcacactgcagtcggagctaatggtgaccccagcccggggaggagatccccgtcccaccttctcctgtagcttcagcccaggccttccccgacaccgggccttgcgcacagcccccatccagccccgtgtctgggagcctgtgcctctggaggaggtccaattggtggtggagccagaaggtggagcagtagctcctggtggaaccgtaaccctgacctgtgaagtccctgcccagccctctcctcaaatccactggatgaaggatgtgagtgacctggagagaggggctgggagaaccaggcgaggaggggccaactgcaggctctgtgggaggatcagggctgggaactctagccctggccctggggatcctgggaggcctggggacagccgccctgctcattggggtcatcttgtggcaaaggcggcaacgccgaggagaggagaggaaggccccagaaaaccaggaggaagaggaggagcgtgcagaactgaatcagtcggaggaacctgaggcaggcgagagtagtactggagggccttgaggggcccacagacagatcccatccatcagctcccttttctttttcccttgaactgttctggcctcagaccaactctctcctgtataatctctctcctgtataaccccaccttgccaagctttcttctacaaccagagccccccacaatgatgattaaacacctgacacatcttga

SEQ ID NO: 1668 - protein, 342 aa, Homo sapiens
MAAGTAVGAWVLVLSLWGAVVGAQNITARIGEPLVLKCKGAPKKPPQRLEWKLGGGPWDSVARVLPNGSLFLPAVGIQDEGIFRCQAMNRNGKETKSNYRVRVYQIPGKPEIVDSASELTAGVPNKVGTCVSEGSYPAGTLSWHLDGKPLVPNEKGVSVKEQTRRHPETGLFTLQSELMVTPARGGDPRPTFSCSFSPGLPRHRALRTAPIQPRVWEPVPLEEVQLVVEPEGGAVAPGGTVTLTCEVPAQPSPQIHWMKDVSDLERGAGRTRRGGANCRLCGRIRAGNSSPGPGDPGRPGDSRPAHWGHLVAKAATPRRGEEGPRKPGGRGGACRTESVGGT

SEQ ID NO: 1669 - DNA, 3210 bp, Homo sapiens
ctctctcacacacacccccgcttgggcctcctctctctctccggctccattttctccgccgccgggggccggggtctcctgtggggggcccagccggtatcccaggtctcccttcagtgccggggtgaacccccgggggagccgggagccgggggcagacgggcgggggttggggcggagggagcagcggccccagcgagtttggggggagaagtaaccaggcggggggaggggcggagcagggagggggcctcagggcccccccccagctatggacgaacggctactggggccgccccctccaggcgggggccgggggggcctgggattggtgagtggggagcctgggggccctggcgagcctcccggtggcggagaccccggtgggggtagcgggggggtcccgggaggccgagggaagcaagacatcggggacattctgcagcagataatgaccatcaccgaccagagcctggacgaggcccaggccaagaaacacgccctaaactgccaccgaatgaagcctgctctctttagcgtcctgtgtgaaatcaaggagaaaactggcctcagcattcggagctcccaggaggaggagccggtggacccacagctgatgcgcttggacaacatgcttctggcagagggtgtggctgggcccgagaaagggggcggctcagcagcagcagctgcagccgctgcagcctctggtggtggtgtgtcccctgacaactccatcgaacactcggactatcgcagcaaacttgcccagatccgtcacatataccactcggagctggagaagtatgagcaggcatgtaatgagttcacgacccatgtcatgaacctgctgagggagcagagccgcaccaggcccgtggcccccaaagagatggaacgcatggtgagcatcatccatcgaaagttcagcgccatccagatgcagctgaagcagagcacctgcgaggctgtgatgatcctgcgctcccgtttcctggatgccagacgaaagcgccgtaacttcagcaaacaggccactgaggtcctaaatgagtatttctactcccacctgagtaacccatatcctagtgaggaggccaaggaggagcttgccaagaagtgtggcatcaccgtgtctcaggtctccaactggtttggcaacaagaggattcgctataagaaaaacatcggaaagttccaagaggaggcaaacatctatgctgtcaagaccgccgtgtcagtcacccaggggggccacagccgcaccagctccccgacacccccttcctctgcaggctctggcggctctttcaatctctcaggatctggagacatgtttctggggatgcctgggctcaacggagattcctattctgcttcccaggtggaatcactccgacactcgatggggccagggggctatggggataacctcgggggaggccagatgtacagcccacgggaaatgagggcaaatggcagctggcaagaggctgtgaccccctcttcagtgacatccccaacggagggaccagggagtgttcactctgatacctccaactgatcttgcccctcagggtcacaggggtgggggctctcacaaggcgacttgaagaggacgcaggcttccagaggacaaaccccaatacaggagaagcacaagacagagaagggccaatggggtcatcccctccctaacgagactctctgtgctgggggtgctaattacatggcaggaagaatggggcctctaaggggagtgtggggtctgtctctcccttttttccatctttttcctctctcgctttctttcttacacagaaacatacacataccgagaaacctatttctcagacccctttttctcctctgtctttctctctccctctcccacacctcacacacacatactcccacttgcaactattctgtttctctcctgggctcccccactttcccttccccaccccacttgtatgctctggaatctgtggagacgccagccctgcccaatcagagatgccaaaaatggggacatgacttctggacagaggacatgggccacgcccccatgcatccccacccccgcccctccggacggcttacttacctcatacgcagctcatcttaaaccaatagaatcgctcggtggacgagagtgtctgactcagatatctacctcggagggagtttctgctactttagggaattattgactgggctttggggttgaacttttttttttttaaagaaagaaaaagaaaccctgggatccatctgttttttttgttgttgttgttgtttttgttgttgttggtggtggtggtggtggtggttcttaatttttaatttagtttggggaagtagcttgtttttttttttataaatatgttgatttcttgtcttttttttttatttcttactttcccatattaggggtgatagccaaaggggttctggtaagagaaagggggacaaacagaactggtaaagaggcccccctggctccaggcctgtccatcaggaagtaaattttacagggcaccaagctttgccccctaaaatcccttaggtgttctttgttcatgcaggcaggtttctgccgcatttgatgtggaggcagtgaagggcttgccctgctggcctctcatcccccttcttcccacaacccttgggcagggctggactcagtaattttgaggaaattgaagatgccatcttcccctgtgagtgacatgtctttaattttttaaaaaactactatttgaaaattggagggggaagaatgggaagggagttattgccaaatatgttaaatatgggttggggtgcttgtatatgtatcttcctcaatttccccataaatgaggtatctttttgtcacaccaaaatcaaggggtagggagagggaggaggttgcaaaaagccagatgtgggggaaaagtaacatcaacactgtcccatcctcagccctgaactagctaccatctgatcccctcagacattctcaggattttacaagactgtcagagtggggaacccctcccattaaagatccgggcaggactggggacaggttggaagtgtgatgggtgggggggtgggaggcatgggccgggggcagttctctcctcacttgtaaacttgtgtagtttcacagaaaaaaaacaaaatgcagttttaaataaagaaatttctttttaaaaaaaa

SEQ ID NO: 1670 - protein, 430 aa, Homo sapiens
MDERLLGPPPPGGGRGGLGLVSGEPGGPGEPPGGGDPGGGSGGVPGGRGKQDIGDILQQIMTITDQSLDEAQAKKHALNCHRMKPALFSVLCEIKEKTGLSIRSSQEEEPVDPQLMRLDNMLLAEGVAGPEKGGGSAAAAAAAAASGGGVSPDNSIEHSDYRSKLAQIRHIYHSELEKYEQACNEFTTHVMNLLREQSRTRPVAPKEMERMVSIIHRKFSAIQMQLKQSTCEAVMILRSRFLDARRKRRNFSKQATEVLNEYFYSHLSNPYPSEEAKEELAKKCGITVSQVSNWFGNKRIRYKKNIGKFQEEANIYAVKTAVSVTQGGHSRTSSPTPPSSAGSGGSFNLSGSGDMFLGMPGLNGDSYSASQVESLRHSMGPGGYGDNLGGGQMYSPREMRANGSWQEAVTPSSVTSPTEGPGSVHSDTSN

SEQ ID NO: 1671 - DNA, 1472 bp, Homo sapiens
ccggagcggggatcaccttaacttgactgtggtcccccagccctccaagaaatgcccataaaccaaggaggagagggtaaaaaatagaagaatacatggaattggggagaagaatgggaaaaaagatgggagtgactgcataatgtcagcattttgtgcttttggctcagcatttggattggatggaggattttcatcctgaaaccagccctccgtcgccaccgaccatggaataattgtcttccacgaaactcttccctggtgccaaaaagggttttatgtatatatttgagagctccacatccctggatctgaatcctccacttcccactggaaccatgcccctcccagtcccgtttctcccctctaggggatggaggctgagagaccccaggaagaagaggatggtgagcagggcccccctcaggatgaggaaggctggccccctccaaactccaccactcggccttggcgatctgctcctccatcccctcctcctccagggacccgccacacagccctgggaccccgctcggcctccctgctctccctgcagactgaactccttctggacctggtggctgaagcccagtcccgccgcctggaggagcagagggccaccttctacaccccccaaaacccctcaagcctagcccctgccccactccgtcctctcgaggacagagaacagctttacagcactatcctcagtcaccagtgccagcggatggaagcccagcggtcagagcctcccctccctccaggggggcaagagctcctggagttgctgctgagagttcagggtgggggtcgaatggaggagcaaaggtcccggccccccacacacacctgctgagacttgagccccaaccagcccttccttgccactggtctcaaagctgggcagcccattgcatgccctcaactcttgcttggcaggggtaccagagactgaaagacacggcacaaatctcaatattcatctcccacatcaccttccctgggaactggacagggtgaaagtcctcaaactctgggaacaggcgagatggaacagggatttaactccccgcccacaggtccatgggagcttgaggcagtaagggggatcccaggcacccatctcaaggagtggctgggagtcttttccctaacttgtggggacaccaccagttgtcaagctactaggcagtagggtctgagggctcaggcctccacctgagaggttataacctgagagacagctctacccttcctcccagtaagaagggaaggtgggtgggcacctgagagattaagactattctcccagtcccactaccagcacccccgatccctgagactgaggggtttacgggctgtgaatggaccttcagccctgcccaccctccctccccactgctgctgagtctgtctgatgttttggttgtgtgaataaatataattcccctctggaaaaaaaaaaaaaaaaa

SEQ ID NO: 1672 - protein, 160 aa, Homo sapiens
MEAERPQEEEDGEQGPPQDEEGWPPPNSTTRPWRSAPPSPPPPGTRHTALGPRSASLLSLQTELLLDLVAEAQSRRLEEQRATFYTPQNPSSLAPAPLRPLEDREQLYSTILSHQCQRMEAQRSEPPLPPGGQELLELLLRVQGGGRMEEQRSRPPTHTC

SEQ ID NO: 1673 - DNA, 6762 bp, Homo sapiens
agacgtgaggcttgcagcaggccgaggaggaagaagaggggcagtgggagcagaggaggtggctcctgccccagtgagagctctgagggtccctgcctgaagagggacagggaccggggcttggagaaggggctgtggaatgcagcccccttcactgctgctgctgctgctgctgctgctgctgctatgtgtctcagtggtcagacccagagggctgctgtgtgggagtttcccagaaccctgtgccaatggaggcacctgcctgagcctgtctctgggacaagggacctgccagtgtgcccctggcttcctgggtgagacgtgccagtttcctgacccctgccagaacgcccagctctgccaaaatggaggcagctgccaagccctgcttcccgctcccctagggctccccagctctccctctccattgacacccagcttcttgtgcacttgcctccctggcttcactggtgagagatgccaggccaagcttgaagacccttgtcctccctccttctgttccaaaaggggccgctgccacatccaggcctcgggccgcccacagtgctcctgcatgcctggatggacaggtgagcagtgccagcttcgggacttctgttcagccaacccatgtgttaatggaggggtgtgtctggccacatacccccagatccagtgccactgcccaccgggcttcgagggccatgcctgtgaacgtgatgtcaacgagtgcttccaggacccaggaccctgccccaaaggcacctcctgccataacaccctgggctccttccagtgcctctgccctgtggggcaggagggtccacgttgtgagctgcgggcaggaccctgccctcctaggggctgttcgaatgggggcacctgccagctgatgccagagaaagactccacctttcacctctgcctctgtcccccaggtttcataggcccagactgtgaggtgaatccagacaactgtgtcagccaccagtgtcagaatgggggcacttgccaggatgggctggacacctacacctgcctctgcccagaaacctggacaggctgggactgctccgaagatgtggatgagtgtgagacccagggtccccctcactgcagaaacgggggcacctgccagaactctgctggtagctttcactgcgtgtgtgtgagtggctggggcggcacaagctgtgaggagaacctggatgactgtattgctgccacctgtgccccgggatccacctgcattgaccgggtgggctctttctcctgcctctgcccacctggacgcacaggactcctgtgccacttggaagacatgtgtctgagccagccgtgccatggggatgcccaatgcagcaccaaccccctcacaggctccacactctgcctgtgtcagcctggctattcggggcccacctgccaccaggacctggacgagtgtctgatggcccagcaaggcccaagtccctgtgaacatggcggttcctgcctcaacactcctggctccttcaactgcctctgtccacctggctacacaggctcccgttgtgaggctgatcacaatgagtgcctctcccagccctgccacccaggaagcacctgtctggacctacttgccaccttccactgcctctgcccgccaggcttagaagggcagctctgtgaggtggagaccaacgagtgtgcctcagctccctgcctgaaccacgcggattgccatgacctgctcaacggcttccagtgcatctgcctgcctggattctccggcacccgatgtgaggaggatatcgatgagtgcagaagctctccctgtgccaatggtgggcagtgccaggaccagcctggagccttccactgcaagtgtctcccaggctttgaagggccacgctgtcaaacagaggtggatgagtgcctgagtgacccatgtcccgttggagccagctgccttgatcttccaggagccttcttttgcctctgcccctctggtttcacaggccagctctgtgaggttcccctgtgtgctcccaacctgtgccagcccaagcagatatgtaaggaccagaaagacaaggccaactgcctctgtcctgatggaagccctggctgtgccccacctgaggacaactgcacctgccaccacgggcactgccagagatcctcatgtgtgtgtgacgtgggttggacggggccagagtgtgaggcagagctagggggctgcatctctgcaccctgtgcccatggggggacctgctacccccagccctctggctacaactgcacctgccctacaggctacacaggacccacctgtagtgaggagatgacagcttgtcactcagggccatgtctcaatggcggctcctgcaaccctagccctggaggctactactgcacctgccctccaagccacacagggccccagtgccaaaccagcactgactactgtgtgtctgccccgtgcttcaatgggggtacctgtgtgaacaggcctggcaccttctcctgcctctgtgccatgggcttccagggcccgcgctgtgagggaaagctccgccccagctgtgcagacagcccctgtaggaatagggcaacctgccaggacagccctcagggtccccgctgcctctgccccactggctacaccggaggcagctgccagactctgatggacttatgtgcccagaagccctgcccacgcaattcccactgcctccagactgggccctccttccactgcttgtgcctccagggatggaccgggcctctctgcaaccttccactgtcctcctgccagaaggctgcactgagccaaggcatagacgtctcttccctttgccacaatggaggcctctgtgtcgacagcggcccctcctatttctgccactgcccccctggattccaaggcagcctgtgccaggatcacgtgaacccatgtgagtccaggccttgccagaacggggccacctgcatggcccagcccagtgggtatctctgccagtgtgccccaggctacgatggacagaactgctcaaaggaactcgatgcttgtcagtcccaaccctgtcacaaccatggaacctgtactcccaaacctggaggattccactgtgcctgccctccaggctttgtggggctacgctgtgagggagacgtggacgagtgtctggaccagccctgccaccccacaggcactgcagcctgccactctctggccaatgccttctactgccagtgtctgcctggacacacaggccagtggtgtgaggtggagatagacccctgccacagccaaccctgctttcatggagggacctgtgaggccacagcaggatcacccctgggtttcatctgccactgccccaagggttttgaaggccccacctgcagccacagggccccttcctgcggcttccatcactgccaccacggaggcctgtgtctgccctcccctaagccaggcttcccaccacgctgtgcctgcctcagtggctatgggggtcctgactgcctgaccccaccagctcctaaaggctgtggccctccctccccatgcctatacaatggcagctgctcagagaccacgggcttggggggcccaggctttcgatgctcctgccctcacagctctccagggccccggtgtcagaaacccggagccaaggggtgtgagggcagaagtggagatggggcctgcgatgctggctgcagtggcccgggaggaaactgggatggaggggactgctctctgggagtcccagacccctggaagggctgcccctcccactctcggtgctggcttctcttccgggacgggcagtgccacccacagtgtgactctgaagagtgtctgtttgatggctacgactgtgagacccctccagcctgcactccagcctatgaccagtactgccatgatcacttccacaacgggcactgtgagaaaggctgcaacactgcagagtgtggctgggatggaggtgactgcaggcctgaagatggggacccagagtgggggccctccctggccctgctggtggtactgagccccccagccctagaccagcagctgtttgccctggcccgggtgctgtccctgactctgagggtaggactctgggtaaggaaggatcgtgatggcagggacatggtgtacccctatcctggggcccgggctgaagaaaagctaggaggaactcgggaccccacctatcaggagagagcagcccctcaaacgcagcccctgggcaaggagaccgactccctcagtgctgggtttgtggtggtcatgggtgtggatttgtcccgctgtggccctgaccacccggcatcccgctgtccctgggaccctgggcttctactccgcttccttgctgcgatggctgcagtgggagccctggagcccctgctgcctggaccactgctggctgtccaccctcatgcagggaccgcaccccctgccaaccagcttccctggcctgtgctgtgctccccagtggccggggtgattctcctggccctaggggctcttctcgtcctccagctcatccggcgtcgacgccgagagcatggagctctctggctgccccctggtttcactcgacggcctcggactcagtcagctccccaccgacgccggcccccactaggcgaggacagcattggtctcaaggcactgaagccaaaggcagaagttgatgaggatggagttgtgatgtgctcaggccctgaggagggagaggaggtgggccaggctgaagaaacaggcccaccctccacgtgccagctctggtctctgagtggtggctgtggggcgctccctcaggcagccatgctaactcctccccaggaatctgagatggaagcccctgacctggacacccgtggacctgatggggtgacacccctgatgtcagcagtttgctgtggggaagtacagtccgggaccttccaaggggcatggttgggatgtcctgagccctgggaacctctgctggatggaggggcctgtccccaggctcacaccgtgggcactggggagacccccctgcacctggctgcccgattctcccggccaaccgctgcccgccgcctccttgaggctggagccaaccccaaccagccagaccgggcagggcgcacaccccttcatgctgctgtggctgctgatgctcgggaggtctgccagcttctgctccgtagcagacaaactgcagtggacgctcgcacagaggacgggaccacacccttgatgctggctgccaggctggcggtggaagacctggttgaagaactgattgcagcccaagcagacgtgggggccagagataaatgggggaaaactgcgctgcactgggctgctgccgtgaacaacgcccgagccgcccgctcgcttctccaggccggagccgataaagatgcccaggacaacagggagcagacgccgctattcctggcggcgcgggaaggagcggtggaagtagcccagctactgctggggctgggggcagcccgagagctgcgggaccaggctgggctagcgccggcggacgtcgctcaccaacgtaaccactgggatctgctgacgctgctggaaggggctgggccaccagaggcccgtcacaaagccacgccgggccgcgaggctgggcccttcccgcgcgcacggacggtgtcagtaagcgtgcccccgcatgggggcggggctctgccgcgctgccggacgctgtcagccggagcaggccctcgtgggggcggagcttgtctgcaggctcggacttggtccgtagacttggctgcgcgggggggcggggcctattctcattgccggagcctctcgggagtaggagcaggaggaggcccgacccctcgcggccgtaggttttctgcaggcatgcgcgggcctcggcccaaccctgcgataatgcgaggaagatacggagtggctgccgggcgcggaggcagggtctcaacggatgactggccctgtgattgggtggccctgggagcttgcggttctgcctccaacattccgatcccgcctccttgccttactccgtccccggagcggggatcacctcaacttgactgtggtcccccagccctccaagaaatgcccataaaccaaggaggagagggtaaaaaatagaagaatacatggtagggaggaattccaaaaatgattacccattaaaaggcaggctggaaggccttcctggttttaagatggatcccccaaaatgaagggttgtgagtttagtttctctcctaaaatgaatgtatgcccaccagagcagacatcttccacgtggagaagctgcagctctggaaagagggtttaagatgctaggatgaggcaggcccagtcctcctccagaaaataagacaggccacaggagggcagagtggagtggaaatacccctaagttggaaccaagaattgcaggcatatgggatgtaagatgttctttcctatatatggtttccaaagggtgcccctatgatccattgtccccactgcccacaaatggctgacaaatatttattgggcacctactatgtgccaggcactgtgtaggtgctgaaaagtggccaagggccacccccgctgatgactccttgcattccctcccctcacaacaaagaactccactgtggggatgaagcgcttcttctagccactgctatcgctatttaagaaccctaaatctgtcacccataataaagctgatttgaagtgttaaaaaaaaaaaaaaaaaa

SEQ ID NO: 1674 - protein, 2003 aa, Homo sapiens
MQPPSLLLLLLLLLLLCVSVVRPRGLLCGSFPEPCANGGTCLSLSLGQGTCQCAPGFLGETCQFPDPCQNAQLCQNGGSCQALLPAPLGLPSSPSPLTPSFLCTCLPGFTGERCQAKLEDPCPPSFCSKRGRCHIQASGRPQCSCMPGWTGEQCQLRDFCSANPCVNGGVCLATYPQIQCHCPPGFEGHACERDVNECFQDPGPCPKGTSCHNTLGSFQCLCPVGQEGPRCELRAGPCPPRGCSNGGTCQLMPEKDSTFHLCLCPPGFIGPDCEVNPDNCVSHQCQNGGTCQDGLDTYTCLCPETWTGWDCSEDVDECETQGPPHCRNGGTCQNSAGSFHCVCVSGWGGTSCEENLDDCIAATCAPGSTCIDRVGSFSCLCPPGRTGLLCHLEDMCLSQPCHGDAQCSTNPLTGSTLCLCQPGYSGPTCHQDLDECLMAQQGPSPCEHGGSCLNTPGSFNCLCPPGYTGSRCEADHNECLSQPCHPGSTCLDLLATFHCLCPPGLEGQLCEVETNECASAPCLNHADCHDLLNGFQCICLPGFSGTRCEEDIDECRSSPCANGGQCQDQPGAFHCKCLPGFEGPRCQTEVDECLSDPCPVGASCLDLPGAFFCLCPSGFTGQLCEVPLCAPNLCQPKQICKDQKDKANCLCPDGSPGCAPPEDNCTCHHGHCQRSSCVCDVGWTGPECEAELGGCISAPCAHGGTCYPQPSGYNCTCPTGYTGPTCSEEMTACHSGPCLNGGSCNPSPGGYYCTCPPSHTGPQCQTSTDYCVSAPCFNGGTCVNRPGTFSCLCAMGFQGPRCEGKLRPSCADSPCRNRATCQDSPQGPRCLCPTGYTGGSCQTLMDLCAQKPCPRNSHCLQTGPSFHCLCLQGWTGPLCNLPLSSCQKAALSQGIDVSSLCHNGGLCVDSGPSYFCHCPPGFQGSLCQDHVNPCESRPCQNGATCMAQPSGYLCQCAPGYDGQNCSKELDACQSQPCHNHGTCTPKPGGFHCACPPGFVGLRCEGDVDECLDQPCHPTGTAACHSLANAFYCQCLPGHTGQWCEVEIDPCHSQPCFHGGTCEATAGSPLGFICHCPKGFEGPTCSHRAPSCGFHHCHHGGLCLPSPKPGFPPRCACLSGYGGPDCLTPPAPKGCGPPSPCLYNGSCSETTGLGGPGFRCSCPHSSPGPRCQKPGAKGCEGRSGDGACDAGCSGPGGNWDGGDCSLGVPDPWKGCPSHSRCWLLFRDGQCHPQCDSEECLFDGYDCETPPACTPAYDQYCHDHFHNGHCEKGCNTAECGWDGGDCRPEDGDPEWGPSLALLVVLSPPALDQQLFALARVLSLTLRVGLWVRKDRDGRDMVYPYPGARAEEKLGGTRDPTYQERAAPQTQPLGKETDSLSAGFVVVMGVDLSRCGPDHPASRCPWDPGLLLRFLAAMAAVGALEPLLPGPLLAVHPHAGTAPPANQLPWPVLCSPVAGVILLALGALLVLQLIRRRRREHGALWLPPGFTRRPRTQSAPHRRRPPLGEDSIGLKALKPKAEVDEDGVVMCSGPEEGEEVGQAEETGPPSTCQLWSLSGGCGALPQAAMLTPPQESEMEAPDLDTRGPDGVTPLMSAVCCGEVQSGTFQGAWLGCPEPWEPLLDGGACPQAHTVGTGETPLHLAARFSRPTAARRLLEAGANPNQPDRAGRTPLHAAVAADAREVCQLLLRSRQTAVDARTEDGTTPLMLAARLAVEDLVEELIAAQADVGARDKWGKTALHWAAAVNNARAARSLLQAGADKDAQDNREQTPLFLAAREGAVEVAQLLLGLGAARELRDQAGLAPADVAHQRNHWDLLTLLEGAGPPEARHKATPGREAGPFPRARTVSVSVPPHGGGALPRCRTLSAGAGPRGGGACLQARTWSVDLAARGGGAYSHCRSLSGVGAGGGPTPRGRRFSAGMRGPRPNPAIMRGRYGVAAGRGGRVSTDDWPCDWVALGACGSASNIPIPPPCLTPSPERGSPQLDCGPPALQEMPINQGGEGKK

SEQ ID NO: 1675 - DNA, 3456 bp, Homo sapiens
aaaagatccatgggagaagcatggtttcctgaggtcgcaccatccctcacttcttcccttggctgggagtgggggttcctttggctctgtgtcgctcccaggggggctgtcgccccatccagcttttctttgttctctgtgggtcgagttgttttcctgatgagtcccaatgcaagtacctggatatttcagttgaagatgctgtattcacttgcctcttttgttcctctctgcccctttggtgccagtctgctggagtttgctggaggtccactcctgaccctgtttgcctgggtatcaccagcagaggctgcaaagcagcaaagattgctgcctgttctttcttctagaagcttcgacccagtggggcacctgtcagatgccagccagagctctcctgtatcaggtgtctgtcggtccaagctagaaggtatctcccagtcagtatacatggggatcagggacccacttgaggaggcagactgacccttagcagagcttcaataccgtgctgggaggtccactgctctcttcagagccatcaggcagggacgtttaagtctgctataagcccccgactggggttgctgccttttttacagagatgccctgtccagagaggagcaatctggcagtctggccacagcagccttgctgagctgcagtgagctctgcccagtttgaacttcccagcagctttgtttatactgtggccataaaaccatctactcaagcctcagcaatggtggacgtctcttccaccaccaagctcaatcatcccaggtgaatctcagattgctgctgtgctggcagcaagaatttcaagccagtggatcttagtttcctgggctccatggacgtgggaccagccaagccagaccacttggctccctggcttcagcccctctttccaggggagtgaacggttctgtctcgctggtgttccaggcgccactggggtatggaaaaaagaaaaaaagctcctacagctagttcagtgtctgcccaattggccacccagttttgtgcttgaaacccagggccctggtggggtagtcactggagggaatctcctggtttgtgggtttcgaagactgtgggacaagtgcagtatctgtgctggagttcctcaggctcagaccctcatggcttcccttgggtagaggggaaaattccccgaccccttgcacttcccaggtgaggtgatgccccaccctgcttcggcttgccctccgtgggctgcacccactgtccaaccagtcccagtgagatgaaccgtgtgcctcagttggaaatgcagaaatcacccaccttctgcctcgatctcgctgggagctgcagactggtgctgttcctattcggccatcttgaatcttgcctgttcatttttaattttttctttcagtgtattttcctctcagttcaggctggaaaatttcaattgctctatctttgagttcactgattgtttcttttgtcatattcattctgttattgaatccatccagtgagttttcattttggttattttattttccagctataaaatttccatttgcttctttctttcttttttttttagaaatgttcatctttttattttaagttccggggtacatatacaggatgtgcaggtttgttacataggtaaacatgtgccatgggtagtgttcatctatagctctatcaatgcttcttgtctttaagtctaccttgtttgagagctatgtcagcattcttttttttttaattatactttaagttctaggatatatatgcacaatgtgcaggttagttacatgtctatacatgtgccatgttggtgtgctgcacccattaactcgtcatttaacattaggtatatctcctaatgctatccctcccccctccgccaaccccacaacaggccctggtgtgtgatgttccctttcctgtgtccatgtgttctcattgttcaattcccatctatgagtgagaacatgtggtgtttggttttttgtccttgcgatagtttgctgagaatgatggtttccagcttcatccatgtccctacaaaggacatgaactcatcattttttatggctgcatagtattccatggtgtatatgtgccacattttcttaatccagtctatcattgttggacatttgggttggttccaagtctttgctattgtgaatagtgccacaataaacatacgtgtgcatgtgtctttatagcagcacgttttataatcctttgggtatatacccagtaatgggatggctgggtcaaatggtatttctagttctagatccctgaggaatcgccacactgacttccacaatggttgagctagtttacagtcccaccaacagtgtaaaagtgttcctatttctccacatcctctccagcacctgttgtttcctgactttttaatgattgccattctaactagtgtgagatggaatctcattgtggttttgatttgcatttctccgatggccagtgatgatgagcattttttcatgtgtcttttggctgtgtaaatgtcttcttttgagaagtgtctgttcatatccttcgcccacttgttgatggggttgtttgtttttttcttgtaaatttgtttgagttcattgtagattctggatattagccctttgtcagatgagtagatgcaaaaattttctcccattctgtaggttgcctgttcactctgatggtagtttcttttgctgtgcagaagctctttagtttaattagatcccatttgtcgattttggcatttgttgccattgcttttggtgttttagacatgaagtccttgcccatgcctatgtcctgaatggtgttgcctaggttttcttctagggtttttatggttttaggtctaacatttaagaggatacaaacaaatggaagaacattccatgctcatgggtaggaagaatcaatatcgtgaaaatggccatactgcccaaggtaatttatagattcaatgccatccccatcaagctaccaatgactttcttcacagaattggaaaaaactactttaaagttcatatggaaccaaaaaagagcccacattgccaagtcagtcctaagccaaaagaacaaagctggaggcatcacgctacctgacttcaaactatactacaaggctacagtaaccaaaacagcatggtactggtaccaaaacagagatatagaccctcagaaataatgccacatatctacaactatctgatctttgacaaacctgacaaaaacaagaaatggggaaaggattccctatttagtaaatggtgctgggaaaactggctagccatatgtagaaagctgaaaatggatcccttccttacaccttatacaaagattaattcaagatggattaaagacttaagtgcttctttcttatattttatatttgttgctaagatgttccattaaaaataatttcgaagttattcat

SEQ ID NO: 1676 - protein, 158 aa, Homo sapiens
MGEAWFPEVAPSLTSSLGWEWGFLWLCVAPRGAVAPSSFSLFSVGRVVFLMSPNASTWIFQLKMLYSLASFVPLCPFGASLLEFAGGPLLTLFAWVSPAEAAKQQRLLPVLSSRSFDPVGHLSDASQSSPVSGVCRSKLEGISQSVYMGIRDPLEEAD

SEQ ID NO: 1677 - DNA, 2222 bp, Homo sapiens
ctgctccacacaatttctcagtgatcctctgcatctctgcctacaagggcctccctgacacccaagttcatattgctcagaaacagtgaacttgagtttttcgttttatcttgatctctctctgacaaagaaatccagatgatgcgagacctgatgaagacaatacatggaaaatgacagtcttggaaataactttggctgtcatcctgactctactgggacttgccatcctggctattttgttaacaagatgggcacgacgtaagcaaagtgaaatgcatatctccagatacagttcagaacaaagtgctagacttctggactatgaggatggtagaggatcccgacatgcatattcaacacaaagtgacacttcatgtgataaccgagagagatccaaaagagattacacaccatcaaccaactctctagtgtctatggcatctaagttctccctgggacaaacagaactcattcttcttttgatgtgttttattttagcactgtctcgatcaagtattggtagtataaaatgtttacaaacaactgaagaacttccttccagaactgcaggagccatgatgcaattcacagcccctattcccggagctacaggacctatcaagctctctcaaaaaaccattgtgcaaactccaggacctattgtacaatatcctggacccaatgctggtccaccttcagcaccccgcggtccacccatggcacccataataatttcacagagaaccgcaagaatacctcaagttcacactatggacagttctggaaaaatcacactgactcctgtggttatattaacaggttacatggatgaagaacttgcaaaaaaaccttgttccaaaatccagattctaaaatgtggaggcactgcaaggtctcagaatagccgagaagaaaacaaggaagcactaaagaatgacatcatatttacgaattctgtagaatccttgaaatcagcacacataaaggagccagaaagagaaggaaaaggcactgatttagagaaagacaaaataggaatggaggtcaaggtagacagtgacgctggaataccaaaaagacaggaaacccaactaaaaatcagtgagatgagtataccacaaggacagggagcccaaataaagaaaagtgtgtcagatgtaccaagaggacaggagtcccaagtaaagaagagtgagtcaggtgtcccaaaaggacaagaagcccaagtaacgaagagtgggttggttgtactgaaaggacaggaagcccaggtagagaagagtgagatgggtgtgccaagaagacaggaatcccaagtaaagaagagtcagtctggtgtctcaaagggacaggaagcccaggtaaagaagagggagtcagttgtactgaaaggacaggaagcccaggtagagaagagtgagttgaaggtaccaaaaggacaagaaggccaagtagagaagactgaggcagatgtgccaaaggaacaagaggtccaagaaaagaagagtgaggcaggtgtactgaaaggaccagaatcccaagtaaagaacactgaggtgagtgtaccagaaacactggaatcccaagtaaagaagagtgagtcaggtgtactaaaaggacaggaagcccaagaaaagaaggagagttttgaggataaaggaaataatgataaagaaaaggagagagatgcagagaaagatccaaataaaaaagaaaaaggtgacaaaaacacaaaaggtgacaaaggaaaggacaaagttaaaggaaagagagaatcagaaatcaatggtgaaaaatcaaaaggctcgaaaagggcgaaggcaaatacaggaaggaagtacaacaaaaaagtggaagagtaaggataaattttttaaaggcccataagacaagtgattattatgattcccatactccagatacaaaccatatcccagccattgcctaaacagattacaattataaaatccctttcatcttcatatcacagtttctgctcttcagaagtttcaccctttttaatctctcagccacaaacctcagtttccaaatatttgtttcataagttaagacgtatatgattccgtcaagaaagactggatactttctgaagtaaaacattttaattaaaaaaaaaaaaaaaaaaaaaaaaaaaaaaaaaaaaaaaaaaaaaaaaaaaaaaaaaaaaaaaaaaaaaaaaaaaaaaaaaaaaaaaaaaa

SEQ ID NO: 1678 - protein, 563 aa, Homo sapiens
MTVLEITLAVILTLLGLAILAILLTRWARRKQSEMHISRYSSEQSARLLDYEDGRGSRHAYSTQSDTSCDNRERSKRDYTPSTNSLVSMASKFSLGQTELILLLMCFILALSRSSIGSIKCLQTTEELPSRTAGAMMQFTAPIPGATGPIKLSQKTIVQTPGPIVQYPGPNAGPPSAPRGPPMAPIIISQRTARIPQVHTMDSSGKITLTPVVILTGYMDEELAKKPCSKIQILKCGGTARSQNSREENKEALKNDIIFTNSVESLKSAHIKEPEREGKGTDLEKDKIGMEVKVDSDAGIPKRQETQLKISEMSIPQGQGAQIKKSVSDVPRGQESQVKKSESGVPKGQEAQVTKSGLVVLKGQEAQVEKSEMGVPRRQESQVKKSQSGVSKGQEAQVKKRESVVLKGQEAQVEKSELKVPKGQEGQVEKTEADVPKEQEVQEKKSEAGVLKGPESQVKNTEVSVPETLESQVKKSESGVLKGQEAQEKKESFEDKGNNDKEKERDAEKDPNKKEKGDKNTKGDKGKDKVKGKRESEINGEKSKGSKRAKANTGRKYNKKVEE

SEQ ID NO: 1679 - DNA, 1368 bp, Homo sapiens
atggtggattttccaggctacaatctgtctggtgcagtcgcctccttcctattcatcctgctgacaatgaagcagtcagaagactttagagtcattggccctgctcatcctatcctggccggggttggggaagatgccctgttaacctgccagctactccccaagaggaccacaatgcacgtggaggtgaggtggtaccgctcagagcccagcacacctgtgtttgtgcacagggatggagtggaggtgactgagatgcagatggaggagtacagaggctgggtagagtggatagagaatggcattgcaaagggaaatgtggcactgaagatacacaacatccagccctccgacaatggacaatactggtgccatttccaggatgggaactactgtggagaaacaagcttgctgctcaaagtagcaggtctggggtctgcccctagcatccacatggagggacctggggagagtggagtccagcttgtgtgcactgcaaggggctggttcccagagccccaggtgtattgggaagacatccggggagagaagctgctggccgtgtctgagcatcgcatccaagataaagatggcctgttctatgcggaagccaccctggtggtcaggaacgcctctgcagagtctgtgtcctgcttggtccacaaccccgtcctcactgaggagaaggggtcggtcatcagcctcccagagaaactccagactgagctggcttctttaaaagtgaatggaccttcccagcccatcctcgtcagagtgggagaagatatacagctaacctgttacctgtcccccaaggcgaatgcacagagcatggaggtgaggtgggaccgatcccaccgttaccctgctgtgcatgtgtatatggatggggaccatgtggctggagagcagatggcagagtacagagggaggactgtactggtgagtgacgccattgacgagggcagactgaccctgcagatactcagtgccagaccttcggacgacgggcagtaccgctgcctttttgaaaaagatgatgtctaccaggaggccagtttggatctgaaggtggtaagtctgggttcttccccactgatcactgtggaggggcaagaagatggagaaatgcagccgatgtgctcttcagatgggtggttcccacagccccacgtgccatggagggacatggaaggaaagacgataccatcatcttcccaggccctgactcaaggcagccacgggctgttccacgtgcagacattgctaagggtcacaaacatctccgctgtggacgtcacttgttccatcagcatcccctttttgggcgaggagaaaatcgcaactttttctctctcaggttggtga

SEQ ID NO: 1680 - protein, 455 aa, Homo sapiens
MVDFPGYNLSGAVASFLFILLTMKQSEDFRVIGPAHPILAGVGEDALLTCQLLPKRTTMHVEVRWYRSEPSTPVFVHRDGVEVTEMQMEEYRGWVEWIENGIAKGNVALKIHNIQPSDNGQYWCHFQDGNYCGETSLLLKVAGLGSAPSIHMEGPGESGVQLVCTARGWFPEPQVYWEDIRGEKLLAVSEHRIQDKDGLFYAEATLVVRNASAESVSCLVHNPVLTEEKGSVISLPEKLQTELASLKVNGPSQPILVRVGEDIQLTCYLSPKANAQSMEVRWDRSHRYPAVHVYMDGDHVAGEQMAEYRGRTVLVSDAIDEGRLTLQILSARPSDDGQYRCLFEKDDVYQEASLDLKVVSLGSSPLITVEGQEDGEMQPMCSSDGWFPQPHVPWRDMEGKTIPSSSQALTQGSHGLFHVQTLLRVTNISAVDVTCSISIPFLGEEKIATFSLSGW

SEQ ID NO: 1681 - DNA, 1267 bp, Homo sapiens
acattctcttttcttttattcttgtctgttctgcctcactcccgagctctactgactcccaacagagcgcccaagaagaaaatggccataagtggagtccctgtgctaggatttttcatcatagctgtgctgatgagcgctcaggaatcatgggctatcaaagaagaacatgtgatcatccaggccgagttctatctgaatcctgaccaatcaggcgagtttatgtttgactttgatggtgatgagattttccatgtggatatggcaaagaaggagacggtctggcggcttgaagaatttggacgatttgccagctttgaggctcaaggtgcattggccaacatagctgtggacaaagccaacctggaaatcatgacaaagcgctccaactatactccgatcaccaatgtacctccagaggtaactgtgctcacgaacagccctgtggaactgagagagcccaacgtcctcatctgtttcatagacaagttcaccccaccagtggtcaatgtcacgtggcttcgaaatggaaaacctgtcaccacaggagtgtcagagacagtcttcctgcccagggaagaccaccttttccgcaagttccactatctccccttcctgccctcaactgaggacgtttacgactgcagggtggagcactggggcttggatgagcctcttctcaagcactgggagtttgatgctccaagccctctcccagagactacagagaacgtggtgtgtgccctgggcctgactgtgggtctggtgggcatcattattgggaccatcttcatcatcaagggattgcgcaaaagcaatgcagcagaacgcagggggcctctgtaaggcacatggaggtgatggtgtttcttagagagaagatcactgaagaaacttctgctttaatggctttacaaagctggcaatattacaatccttgacctcagtgaaagcagtcatcttcagcattttccagccctatagccaccccaagtgtggatatgcctcttcgattgctccgtactctaacatctagctggcttccctgtctattgccttttcctgtatctattttcctctatttcctatcattttattatcaccatgcaatgcctctggaataaaacatacaggagtctgtctctgctatggaatgccccatggggcatctcttgtgtacttattgtttaaggtttcctcaaactgtgatttttctgaacacaataaactattttgatgatcttgggtggaaaaaaaaaaaaaaaaa

SEQ ID NO: 1682 - protein, 254 aa, Homo sapiens
MAISGVPVLGFFIIAVLMSAQESWAIKEEHVIIQAEFYLNPDQSGEFMFDFDGDEIFHVDMAKKETVWRLEEFGRFASFEAQGALANIAVDKANLEIMTKRSNYTPITNVPPEVTVLTNSPVELREPNVLICFIDKFTPPVVNVTWLRNGKPVTTGVSETVFLPREDHLFRKFHYLPFLPSTEDVYDCRVEHWGLDEPLLKHWEFDAPSPLPETTENVVCALGLTVGLVGIIIGTIFIIKGLRKSNAAERRGPL

SEQ ID NO: 1683 - DNA, 1171 bp, Homo sapiens
ccagcatggtgtgtctgaagctccctggaggttcctacatggcaaagctgacagtgacactgatggtgctgagctccccactggctttggctggggacacccgaccacgtttcttgcagcaggataagtatgagtgtcatttcttcaacgggacggagcgggtgcggttcctgcacagagacatctataaccaagaggaggacttgcgcttcgacagcgacgtgggggagtaccgggcggtgacggagctggggcggcctgacgctgagtactggaacagccagaaggacttcctggaagacaggcgcgccgcggtggacacctactgcagacacaactacggggttggtgagagcttcacagtgcagcggcgagttgagcctaaggtgactgtgtatcctgcaaggacccagaccctgcagcaccacaacctcctggtctgctctgtgaatggtttctatccaggcagcattgaagtcaggtggttccggaacagccaggaagagaaggctggggtggtgtccacaggcctgattcagaatggagactggaccttccagaccctggtgatgctggaaacagttcctcgaagtggagaggtttacacctgccaagtggagcacccaagcgtgacgagccctctcacagtggaatggagagcacagtctgaatctgcacagagcaagatgctgagtggagtcgggggctttgtgctgggcctgctcttccttggggccgggctattcatctacttcaagaatcagaaagggcactctggacttcacccaacaggactcgtgagctgaagtgcagatgaccacattcaagggggaaccttctgccccagctttgcatgatgaaaagctttcctgcttggctcttattcttccacaagagaggactttctcaggccctggttgctaccggttcagcaactctgcagaaaatgtccatccttgtggcttcctcagctcctgcccttggcctgaagtcccagcattgatggcagtgcctcatcttcaactttagtgctcccctttacctaaccctacggcctcccatgcatctgtactccccctgtgtgccacaaatgcactacgttattaaatttttctgaagcccagagttaaaaatcatctgtccacctggctccaaagacaaaaaataaaaa

SEQ ID NO: 1684 - protein, 266 aa, Homo sapiens
MVCLKLPGGSYMAKLTVTLMVLSSPLALAGDTRPRFLQQDKYECHFFNGTERVRFLHRDIYNQEEDLRFDSDVGEYRAVTELGRPDAEYWNSQKDFLEDRRAAVDTYCRHNYGVGESFTVQRRVEPKVTVYPARTQTLQHHNLLVCSVNGFYPGSIEVRWFRNSQEEKAGVVSTGLIQNGDWTFQTLVMLETVPRSGEVYTCQVEHPSVTSPLTVEWRAQSESAQSKMLSGVGGFVLGLLFLGAGLFIYFKNQKGHSGLHPTGLVS

SEQ ID NO: 1685 - DNA, 1235 bp, Homo sapiens
gaatacagaatgtgggcaaactcgcttctgtgccggccgccagaaggtttgctgagggcaatcactccctggtgccgggctccttgaggttatgcactgggacatctagagcctattgtttgaggaatgcagtcttgcaagcctgctctggatcaagccacagactgaaacacccccgaagagcaagcacgtttcttggagcaggctaagtgtgagtgtcatatcttcaatgggatgaagcgggtgcagtacctgaacagatacatccataaacgggaggagaacctgcgcttcgacagcaacgtggaggagttccaggcagttacggaactggggcggcctgtcgcagagaactggaacagccagaagggcatcccggaggagaagcgggacaagatggacgactactgcagatacaattacggggttttttgagagcttcacagtgcagccgcgagtccatcctaaggtgactgtgtatcctgcaaagacccagcccctgcatcaccgcaaccccctggtcggctctgtgagtggtttctatccaggcagcattaaagtcaggtggttccagaatggtcaggaagagaaggctgcggtggtctccataggcctgatccagaatggagattggaccttccagaccctggtgatgctggaaacagttcctcggagtggagaggtttacacctgccaagtggagcatccaagcgtgacgagccctctcacagtggaatggagtacacggactgaatctgcacagagcaagatgctgagtggagtcgggggctttgtgctgggcctgctcttccttgggacagggctgttcatctacttcaggaatcagaaaggacactctggacttcagccaacaggactcctgcgctggactcctgagctgaagtgcacatgaccacattcaaggaagaaccttctgccacagctttgcaggatgaaaagctttcccacttggctcttattcttccacaagagctctctcaggaccaggttgttactcgttcagcaactctgcagaaaatgccctcccttgtggcttcctcagctcctgttcttggcctgaaaccccacagccttgatggcagcgcctcgtcttcaacttttgtgcttccttttacctaaattttcctgcctcccctgggtctgtattccccttgtgccacaaacacattgcattattcaatgtttctcaaacatggagttaaaaattatctggt

SEQ ID NO: 1686 - DNA, 1182 bp, Homo sapiens
tagttctccctgagtgagacttgcctgcttctctggcccctggtcctgtcctgttctccagcatggtgtgtctgaagctccctggaggctcctgcatgacagcgctgacagtgacactgatggtgctgagctccccactggctttggctggggacacccgaccacgtttcttgtggcagcttaagtttgaatgtcatttcttcaatgggacggagcgggtgcggttgctggaaagatgcatctataaccaagaggagtccgtgcgcttcgacagcgacgtgggggagtaccgggcggtgacggagctggggcggcctgatgccgagtactggaacagccagaaggacctcctggagcagaggcgggccgcggtggacacctactgcagacacaactacggggttggtgagagcttcacagtgcagcggcgagttgagcctaaggtgactgtgtatccttcaaagacccagcccctgcagcaccacaacctcctggtctgctctgtgagtggtttctatccaggcagcattgaagtcaggtggttccggaacggccaggaagagaaggctggggtggtgtccacaggcctgatccagaatggagattggaccttccagaccctggtgatgctggaaacagttcctcggagtggagaggtttacacctgccaagtggagcacccaagtgtgacgagccctctcacagtggaatggagagcacggtctgaatctgcacagagcaagatgctgagtggagtcgggggcttcgtgctgggcctgctcttccttggggccgggctgttcatctacttcaggaatcagaaaggacactctggacttcagccaacaggattcctgagctgaaatgcagatgaccacattcaaggaagaaccttctgtcccagctttgcagaatgaaaagctttcctgcttggcagttattcttccacaagagagggctttctcaggacctggttgctactggttcggcaactgcagaaaatgtcctcccttgtggcttcctcagctcctgcccttggcctgaagtcccagcattgatgacagcgcctcatcttcaacttttgtgctcccctttgcctaaaccgtatggcctcccgtgcatctgtactcaccctgtacgacaaacacattacattattaaatgtttctcaaagatggagtt

SEQ ID NO: 1687 - protein, 266 aa, Homo sapiens
MVCLKLPGGSCMTALTVTLMVLSSPLALAGDTRPRFLWQLKFECHFFNGTERVRLLERCIYNQEESVRFDSDVGEYRAVTELGRPDAEYWNSQKDLLEQRRAAVDTYCRHNYGVGESFTVQRRVEPKVTVYPSKTQPLQHHNLLVCSVSGFYPGSIEVRWFRNGQEEKAGVVSTGLIQNGDWTFQTLVMLETVPRSGEVYTCQVEHPSVTSPLTVEWRARSESAQSKMLSGVGGFVLGLLFLGAGLFIYFRNQKGHSGLQPTGFLS

SEQ ID NO: 1688 - DNA, 1542 bp, Homo sapiens
acaattactctacagctcagaacaccaactgctgaggctgccttgggaagaggatgatcctaaacaaagctctgctgctgggggccctcgctctgaccaccgtgatgagcccctgtggaggtgaagacattgtggctgaccacgttgcctcttgtggtgtaaacttgtaccagttttacggtccctctggccagtacacccatgaatttgatggagatgagcagttctacgtggacctggagaggaaggagactgcctggcggtggcctgagttcagcaaatttggaggttttgacccgcagggtgcactgagaaacatggctgtggcaaaacacaacttgaacatcatgattaaacgctacaactctaccgctgctaccaatgaggttcctgaggtcacagtgttttccaagtctcccgtgacactgggtcagcccaacaccctcatttgtcttgtggacaacatctttcctcctgtggtcaacatcacatggctgagcaatgggcagtcagtcacagaaggtgtttctgagaccagcttcctctccaagagtgatcattccttcttcaagatcagttacctcaccttcctcccttctgctgatgagatttatgactgcaaggtggagcactggggcctggaccagcctcttctgaaacactgggagcctgagattccagcccctatgtcagagctcacagagactgtggtctgtgccctggggttgtctgtgggcctcatgggcattgtggtgggcactgtcttcatcatccaaggcctgcgttcagttggtgcttccagacaccaagggccattgtgaatcccatcctggaagggaaggtgcatcgccatctacaggagcagaagaatggacttgctaaatgacctagcactattctctggcccgatttatcatatcccttttctcctccaaatatttctcctctcaccttttctctgggacttaagctgctatatcccctcagagctcacaaatgcctttacattctttccctgacctcctgattttttttttcttttctcaaatgttacctacaaagacatgcctggggtaagccacccggctacctaattcctcagtaacctccatctaaaatctccaaggaagcaataaattccttttatgagatctatgtcaaatttttccatctttcatccagggctgactgaaactatggctaataattggggtactcttatgtttcaatccaatttaacctcatttcccagatcatttttcatgtccagtaacacagaagccaccaagtacagtatagcctgataatatgttgatttcttagctgacattaatatttcttgcttccttgtgttcccacccttggcactgccacccacccctcaattcaggcaacaatgaaattaatggataccgtctgcccttggcccagaattgttatagcaaaaattttagaaccaaaaaataagtctgtactaatttcaatgtggcttttaaaagtatgacagagaaataagttaggataaaggaaatttgaatctca

SEQ ID NO: 1689 - protein, 255 aa, Homo sapiens
MILNKALLLGALALTTVMSPCGGEDIVADHVASCGVNLYQFYGPSGQYTHEFDGDEQFYVDLERKETAWRWPEFSKFGGFDPQGALRNMAVAKHNLNIMIKRYNSTAATNEVPEVTVFSKSPVTLGQPNTLICLVDNIFPPVVNITWLSNGQSVTEGVSETSFLSKSDHSFFKISYLTFLPSADEIYDCKVEHWGLDQPLLKHWEPEIPAPMSELTETVVCALGLSVGLMGIVVGTVFIIQGLRSVGASRHQGPL

SEQ ID NO: 1690 - DNA, 1190 bp, Homo sapiens
cagatccatcaggtccgagctgtgttgactaccacttttcccttcgtctcaattatgtcttggaaaaaggctttgcggatccccggaggccttcgggcagcaactgtgaccttgatgctgtcgatgctgagcaccccagtggctgagggcagagactctcccgaggatttcgtgtaccagtttaagggcatgtgctacttcaccaacgggacagagcgcgtgcgtcttgtgagcagaagcatctataaccgagaagagatcgtgcgcttcgacagcgacgtgggggagttccgggcggtgacgctgctggggctgcctgccgccgagtactggaacagccagaaggacatcctggagaggaaacgggcggcggtggacagggtgtgcagacacaactaccagttggagctccgcacgaccttgcagcggcgagtggagcccacagtgaccatctccccatccaggacagaggccctcaaccaccacaacctgctggtctgctcggtgacagatttctatccagcccagatcaaagtccggtggtttcggaatgaccaggaggagacagctggcgttgtgtccaccccccttattaggaatggtgactggaccttccagatcctggtgatgctggaaatgactccccagcgtggagacgtctacacctgccacgtggagcaccccagcctccagagccccatcaccgtggagtggcgggctcaatctgaatctgcccagagcaagatgctgagtggcattggaggcttcgtgctggggctgatcttcctcgggctgggccttatcatccatcacaggagtcagaaagggctcctgcactgactcctgagactattttaactgggattggttatcacttttctgtaacgcctgcttgtccctgcccagaattcccagctgtctgtgtcagcctgtccccctgagatcagagtcctacagtggctgtcacgcagccaccaggtcatctcctttcatccccaccttgaggcggatggctgtgaccctacttcctgcactgacccacagcctctgcctgtgcacggccagctgcatctactcaggccccaaggggtttctgtttctattctctcctcagactgctcaagagaagcacatgaaaaccattacctgactttagagcttttttacataattaaacatgatcctgagtt

SEQ ID NO: 1691 - protein, 261 aa, Homo sapiens
MSWKKALRIPGGLRAATVTLMLSMLSTPVAEGRDSPEDFVYQFKGMCYFTNGTERVRLVSRSIYNREEIVRFDSDVGEFRAVTLLGLPAAEYWNSQKDILERKRAAVDRVCRHNYQLELRTTLQRRVEPTVTISPSRTEALNHHNLLVCSVTDFYPAQIKVRWFRNDQEETAGVVSTPLIRNGDWTFQILVMLEMTPQRGDVYTCHVEHPSLQSPITVEWRAQSESAQSKMLSGIGGFVLGLIFLGLGLIIHHRSQKGLLH

SEQ ID NO: 1692 - DNA, 1709 bp, Homo sapiens
tcctcacaattgctctacagctcagagcagcaactgctgaggctgccttgggaagaagatgatcctaaacaaagctctgctgctgggggccctcgccctgactgccgtgatgagcccctgtggaggtgaagacattgtggctgaccatgttgcctcctatggtgtgaacttctaccagtctcacggtccctctggccagtacacccatgaatttgatggagacgaggagttctacgtggacctggagacgaaagagactgtctggcagttgcctatgtttagcaaatttataagttttgacccgcagagtgcactgagaaatatggctgtgggaaaacacaccttggaattcatgatgagacagtccaactctaccgctgccaccaatgaggttcctgaggtcacagtgttttccaagtttcctgtgacgctgggtcagcccaacaccctcatctgtcttgtggacaacatctttcctcctgtggtcaacatcacctggctgagcaatgggcactcagtcacagaaggtgtttctgagaccagcttcctctccaagagtgatcattccttcttcaagatcagttacctcaccttcctcccttctgctgatgagatttatgactgcaaggtggagcactggggcctggacgagcctcttctgaaacactgggagcctgagattccagcccctatgtcagagctcacagagactttggtctgcgccctggggttgtctgtgggcctcatgggcattgtggtgggcactgtcttcatcatccaaggcctgcgttcagttggtgcttccagacaccaagggctcttatgaatctcatcctgaaaggaaggtgcatcaccatctacaggagaagaagaatggacttgctaaatgacctagcactattctctggcctgatttatcatatcccttttctcctccaaatgtttcttctctcacctcttctctgggacttaaggtgctatattccctcagagctcacaaatgcctttcaattctttccctgacctcctttcctgaatttttttattttctcaaatgttacctactaagggatgcctgagtaagccactcagctacctaattcctcaatgacctttatctaaaatctccatggaagcaataaattcccttttgatgcctctattgaatttttcccatctttcatctcagggctgactgagagcataacttagaatgggtgactcttatgttttaggccaatttcatgtcattccccagatcatatttcatgtccagtaacacaggagcaaccaagtacagtgtatcctgataatttgttgatttcttaactggtgttaatatttctttcttccttttgttcctacccttggccactgccacccacccctcaattcaggtaccaacgaaccctctgcccttggctcagaatggttatagcagaaatacaaaaaaaaaaaaaaaagtctgtactaatttcaatatggctcttaaaaggaatgacagagaaataggatacaagaattttgaatctcaaaagttatcaaaagtaaaaaattttgttaccaaaagtcaaactgcattctcaaaactttaaatttgtgaagaatgacaacagtagaagctttcctctccccttctcaccttgaggagataaaaattctctaggcaggaaaagaaatggaagccagttagaaaaacattgaaataa

SEQ ID NO: 1693 - protein, 255 aa, Homo sapiens
MILNKALLLGALALTAVMSPCGGEDIVADHVASYGVNFYQSHGPSGQYTHEFDGDEEFYVDLETKETVWQLPMFSKFISFDPQSALRNMAVGKHTLEFMMRQSNSTAATNEVPEVTVFSKFPVTLGQPNTLICLVDNIFPPVVNITWLSNGHSVTEGVSETSFLSKSDHSFFKISYLTFLPSADEIYDCKVEHWGLDEPLLKHWEPEIPAPMSELTETLVCALGLSVGLMGIVVGTVFIIQGLRSVGASRHQGLL

SEQ ID NO: 1694 - DNA, 1092 bp, Homo sapiens
tctcacttatgtcttggaagatggctctgcagatccctggaggcttttgggcagcagctgtgaccgtgatgctggtgatgctgagcaccccagtggctgaggccagagactttcccaaggatttcttggtccagtttaagggcatgtgctacttcaccaacgggacagagcgcgtgcggggtgtggccagatacatctataaccgcgaggagtacgggcgcttcgacagcgacgttggggagttccaggcggtgaccgagctggggcggagcatcgaggactggaacaactataaggacttcttggagcaggagcgggccgcggtggacaaggtgtgcagacacaactacgaggcggagctacgcacgaccttgcagcggcaagtggagcccacagtgaccatctccccatccaggacagaggccctcaaccaccacaacctgctggtctgctcagtgacagatttctatccagcccagatcaaagtccagtggtttcggaatgaccaggaggagacagccggtgttgtgtccacctccctcattaggaatggtgactggaccttccagattctggtgatgctggaaataactccccagcgtggagacatctacacctgccaagtggagcaccccagcctccagagccccatcaccgtggagtggcgacctcgagggcctccacctgcaggactcctgcactgactcctgaggacttttgtctgggattggtcatcactcttctgtaatgcccacctgcccctgcccagaattcctagctgcctgtgtcatcctgtcccactgaggtcagagtcctacagtggctcatgcagccacaggtcaccttctgtgatccccatcccaaggcactggcggtgactctgcttcctgtactgacccagagcctctgcctgtgcactgcaagctgtgtctactcaggccccaaggggcatctctgtttccattctccccccacagacctgtcaagagaagcatgacaaacaaaatcatttacctaactttagtgctttttcccataattaaacctgattctgagttaaaaaaaaaaaaaaaaaaaaaaaaaaaaaaaaaa

SEQ ID NO: 1695 - protein, 231 aa, Homo sapiens
MSWKMALQIPGGFWAAAVTVMLVMLSTPVAEARDFPKDFLVQFKGMCYFTNGTERVRGVARYIYNREEYGRFDSDVGEFQAVTELGRSIEDWNNYKDFLEQERAAVDKVCRHNYEAELRTTLQRQVEPTVTISPSRTEALNHHNLLVCSVTDFYPAQIKVQWFRNDQEETAGVVSTSLIRNGDWTFQILVMLEITPQRGDIYTCQVEHPSLQSPITVEWRPRGPPPAGLLH

SEQ ID NO: 1696 - DNA, 1501 bp, Homo sapiens
agcgagtccttcttttcctgactgcagctcttttcattttgccatccttttccagctccatgatggttctgcaggtttctgcggccccccggacagtggctctgacggcgttactgatggtgctgctcacatctgtggtccagggcagggccactccagagaattaccttttccagggacggcaggaatgctacgcgtttaatgggacacagcgcttcctggagagatacatctacaaccgggaggagttcgcgcgcttcgacagcgacgtgggggagttccgggcggtgacggagctggggcggcctgctgcggagtactggaacagccagaaggacatcctggaggagaagcgggcagtgccggacaggatgtgcagacacaactacgagctgggcgggcccatgaccctgcagcgccgagtccagcctagggtgaatgtttccccctccaagaaggggcccttgcagcaccacaacctgcttgtctgccacgtgacggatttctacccaggcagcattcaagtccgatggttcctgaatggacaggaggaaacagctggggtcgtgtccaccaacctgatccgtaatggagactggaccttccagatcctggtgatgctggaaatgaccccccagcagggagatgtctacacctgccaagtggagcacaccagcctggatagtcctgtcaccgtggagtggaaggcacagtctgattctgcccggagtaagacattgacgggagctgggggcttcgtgctggggctcatcatctgtggagtgggcatcttcatgcacaggaggagcaagaaagttcaacgaggatctgcataaacagggttcctgagctcactgaaaagactattgtgccttaggaaaagcatttgctgtgtttcgttagcatctggctccaggacagaccttcaacttccaaattggatactgctgccaagaagttgctctgaagtcagtttctatcattctgctctttgattcaaagcactgtttctctcactgggcctccaaccatgttcccttcttcttagcaccacaaataatcaaaacccaacatgactgtttgttttcctttaaaaatatgcaccaaatcatctctcatcacttttctctgagggttttagtagacagtaggagttaataaagaagttcattttggtttaaacataggaaagaagagaaccatgaaaatggggatatgttaactattgtataatggggcctgttacacatgacactcttctgaattgactgtatttcagtgagctgcccccaaatcaagtttagtgccctcatccatttatgtctcagaccactattcttaactattcaatggtgagcagactgcaaatctgcctgataggacccatattcccacagcactaattcaacatataccttactgagagcatgttttatcattaccattaagaagttaaatgaacatcagaatttaaaatcataaatataatctaatacacttt

SEQ ID NO: 1697 - protein, 258 aa, Homo sapiens
MMVLQVSAAPRTVALTALLMVLLTSVVQGRATPENYLFQGRQECYAFNGTQRFLERYIYNREEFARFDSDVGEFRAVTELGRPAAEYWNSQKDILEEKRAVPDRMCRHNYELGGPMTLQRRVQPRVNVSPSKKGPLQHHNLLVCHVTDFYPGSIQVRWFLNGQEETAGVVSTNLIRNGDWTFQILVMLEMTPQQGDVYTCQVEHTSLDSPVTVEWKAQSDSARSKTLTGAGGFVLGLIICGVGIFMHRRSKKVQRGSA

SEQ ID NO: 1698 - DNA, 805 bp, Homo sapiens
atgatgatcctgcaggtttcagcgggcccccggacagtggctctgacagcattactgatggtgcggctcatatctgtggtccagagcaggaccactccagagaattccgtctaccaggaacggcaggaatgctatgcgttcaatgggactcagcgcgttgtggacgggctcatctacaaccgggaggaatacgtgcattttgacagcgcagtgggggagttcctagcagtgatggagctggggcggcccataggcgagtacttcaatagccagaaggactttatggaacggaagcgagccgaggtggacaaggtgtgcagacacaagtacgagctgatggagccactcatccggcagcgccgagtccagcctagggtgaacatctcccctccaagaaggagccccagcagcaccacgacctgcttgtctaccacgtgacagatttctacccagacagcattcaagtccgatgcttcctgaatggacaggaggaaacagctggggtcgtgtccaccaacctgatccgtaatggagactggaccttccagatcctggagatgctggaaatgaccccccagcagggaaacatctacacctgccaagtggagcaccccagcctggacagtcctgtcaccgtggagtggaaggcacagtctgattctgtgcagagcaagatgctgacaggagctaggggcttcatgctggggctcatcatctgtggagtggacatcttcacgcacagaaggaggaagaaagttcaacaaggacctgcataaacaggcaatattcctgctttgatttcctt

SEQ ID NO: 1699 - DNA, 6093 bp, Homo sapiens
cacacagaagcggcagccaccgaggagggagcagtgccgggagccccgacggcgccttgctgcatggagctgggccgctgacagctgtcgtgcccgcagcctctgacctccctgggaccccggcgtctgaggctcatagtctgctccctgtcttctgtcagcctcagggcatccagcgtctcaggccgacctgtccctgggacccggcgtttcgcttctcagccatggagcggtgcagccgctgccatcgcctcctcctcctcctacctctggtgctggggctgagcgcggccccaggctgggcaggtgcaccccctgtggatgtgctccgggccctgaggttcccctccctccctgatggtgtccggagagcgaaaggcatctgtccagctgatgtggcctaccgagtggcacgacctgcccagctcagtgcacccactcgccagcttttcccaggaggatttcccaaagatttctctctgctgactgttgtccggacccgccctggtctccaagctcccctcctgactctctacagtgcccagggtgtccgacagctgggcctggagctgggccgacctgtccgcttcctgtatgaagaccagacagggcggcctcaacctccctctcagccagtcttccgaggcctcagcctagcagatggcaagtggcaccgtgtggctgtggctgtgaagggccagtctgtcaccctcattgttgactgcaagaagcgagtcacccggcctctcccccgaagtgctcgtccagtattggacacccatggagtgatcatctttggtgcccgtattctggatgaagaagtctttgagggtgatgtccaggagctggccattgtcccaggggtccaggcagcctatgaatcatgtgaacagaaggagctggaatgcgaggggggccagagggaaagaccccaaaaccaacagcctcacagagcccagagatctccacagcagcaaccatcaagacttcacaggccacaaaatcaggaaccccagagccaggctgcccatggaccccgagggctgaagggagagaaaggagagcctgcagtgttggaacctggtatgctcgtggaggggccccctggcccagaagggcctgcgggattgattggtccccctggcatccaggggaacccaggcccagttggagaccctggagagaggggcccccctggccgagcagggctccctggatcagatggggctcctggtcctcctggcacatctctcatgctcccattccggtttggcagtggtgggggtgacaagggccctgtggtggcggcccaggaggctcaggcccaggcgatcctgcagcaggcgaggctggcgctccgtggaccccctggccccatgggatacacagggcgccctggacccttgggccaacctgggagccctggcctgaaaggagagtctggagacttaggacctcagggccccagaggacctcagggcctcacaggctccctgggcaaggctgggcgaaggggccgggcaggtgctgatggagcccgagggatgcctggagatcctggagtgaagggtgaccgaggttttgatggactcccagggctccctggagagaagggccataggggtgatactggtgcccagggccttcctggtccccctggtgaggatggagagaggggagatgacggggagattgggcctcgagggctgcctggagagtcgggacctcgaggtctccttggccccaaaggcccacctggtattcctggaccccctggcgtccgaggcatggatggtccccagggccccaaagggagcttgggaccccagggagagccaggacctcctggacaacagggcacccctgggacccagggtcttcccgggccccagggtgccatcggccctcatggagagaagggtcctcaagggaagccagggctccccggcatgcctggctcagacggacccccgggtcacccagggaaggaaggtccccctggaaccaaaggaaaccagggtccctctggacctcagggacctctaggatacccaggacctcgaggggtcaagggtgtggacggaattcggggtctgaagggtcataagggtgagaagggtgaggatggctttcctgggttcaaaggtgacataggcgtgaaaggtgacaggggcgaagttggagtccctggttccaggggagaggatggtcctgaggggccaaagggacgcactggaccgactggagaccctgggcccccagggctcatgggcgagaagggcaagctgggtgttcctggtctgcctggctatcctggacgtcagggacccaaggggtccctaggatttcctggctttcctggtgccagtggagagaagggagcccggggcctgtcggggaagtcagggcctcggggagaacggggccccacgggtccacggggtcagcggggaccccgaggtgccactgggaagtctggagctaagggaacatctggtggtgatggcccccatggcccccctggagagaggggcctccctggacctcagggtcccaacgggtttcctggaccgaaaggacccccgggcccccctgggaaggacgggctgccgggacacccaggccaaagaggagaagtgggtttccaagggaagaccggcccccctggtcctccaggagtggtgggacctcagggagcagcaggagaaaccggccctatgggggagagaggtcacccaggccccccggggccccctggagagcagggactacctgggacagctggaaaagaaggaacaaagggtgaccctggtccccctggggccccagggaaggatggtcctgctggtctgaggggattcccaggagagagaggcctcccaggcactgctggtggacctggtttgaaggggaatgaaggtccgtctggcccccctggccctgcaggctcccctggggaacgaggtgcagcaggatcagggggacccattggtcgccaggggcgcccaggcccgcagggtccccctggagcagcaggagagaaaggtgtcccaggtgagaagggccccattggcccgactggccgagatggagtgcagggtcctgtggggcttcctggtcctgctgggcctccaggtgtggctggagaggatggagacaagggtgaggtgggggaccccggacagaagggcaccaaagggaacaagggtgaacatggccctcctggaccccctggacccattggtcctgtggggcagcctggagcagcgggagcagatggggagcccggagctcggggaccccagggacactttggagccaaaggtgatgaaggaacaagaggattcaatgggcccccaggacccattggcctacagggtttgccaggcccctctggggagaagggagaaacaggagatgtgggtcctatgggaccacctggccccccaggacctcgaggtccagctggacccaatggcgctgatggcccacaaggtcccccaggaggtgttgggaacctgggtccccctggagagaagggggaaccaggagagtcaggatctccagggatccagggcgagccaggtgtcaagggtccacgcggggaacgtggagagaaaggagagtcggggcagccaggagagccagggccaccaggcgctaaaggcccacagggcgatgatggccccaaagggaaccctggtcctgttggttttcctggtgaccctggcccccctggagaaggtggccctcggggccaggatggtgctaagggtgaccgaggcgaggatggtgagccaggacagcctggatcccctggtcccaccggggagaatggacccccagggccacttggaaagcgaggtcctgctggctcgcctggttccgaggggcgacaaggagggaagggagccaagggagatcctggcgctataggtgccccggggaagacaggcccggtgggtcctgcaggcccagcagggaaacctggccctgatggtctgagggggctcccaggctcagtgggtcagcaaggccgacctggagctacaggccaggctgggcccccaggtcctgtgggacccccagggctgcctggtctccggggcgatgctggagccaagggagagaagggccacccaggtctcattggactgattgggcccccgggtgagcagggagagaagggagatcggggacttcctgggcctcagggctcccctgggcagaagggtgagatgggtatcccaggagcatccggccccattggtcctggaggtccccccggcctccccggacctgctggccccaaaggagccaaaggagccacaggcccaggcggacccaagggagagaagggtgtgcagggccctccaggacacccgggtcccccaggcgaggtgatccagccactgcccattcagatgcccaagaagactcggcgctcggtggatggaagccgtctgatgcaggaagatgaggccataccgaccgggggagcccccggcagtcctggggggctggaggagatctttggctcactcgactccctgcgggaggagatcgagcagatgaggcggccaacagggacccaggacagccctgctcgcacctgccaggacctgaagctgtgccacccagagcttcccgatggagagtactgggtcgaccccaaccagggctgtgctcgggatgccttccgagttttctgcaacttcacagcagggggtgagacctgtgtgacgcctagggatgacgtcacgcagttctcttacgtggactcagagggctccccagtgggtgtggtccagctcaccttcctgcggctgctcagcgtctcagcccaccaggacgtctcctacccctgctctggagcagcccgtgacggtcccctgagactccgtggggccaatgaggatgagctgagcccggagactagcccctatgtcaaagaattcagagatggctgccagacacagcaaggccggacggtgctggaggtgcgaacgcctgtgctggagcagctgccagtgctggatgcctccttctcagacctgggagccccaccgaggcggggaggggtgctgctggggcctgtctgcttcatgggataggaccgtctctgtctgatcctgtccattcggtaccaggcccacctggaatcccacaacatcagctctgtgccacctcccaagagggctcctcactatctagggagccctgggccagggctggagagccctcagtcggggcaggccaggggaggggtgaagtggttgcctggacaccccacgggaggagtggcatctgggctcttggccctcccacctggagcctgttacccgttagagagctgagagcccttatttaaaactcacctcccaatcaccccaaacaaatggaagagaagagaaaggacatggcgtattttgtatttaaaagtaattgtattaattatttaaagtgtggaaagcaaaataacaaaaaagagaaacgccaacaaaaaatcagcagatgttgaagacaggggtctcgggggtgggctccggcacccacatctgagtcaggactttcctcagtgactgtgtgtaggggggttcagggctgaacccacctccctcccaccttcctcccacctcacctgtcgcacccactgtgaaagttggaatatgtggtctccctggcctcagggctctgactctgccagggtggggctctctaacccacaggtgttggctgcctggcccatgtgcccactgtctcttccacttggtctgggtttggcaggcactgctgctacttgagggccaggatgctcccccagggaagaaacggaatagtgtggggtgtgtgcagggctgcatccgcagatggctggaatattaaaattcttctatattggctggtaaattgccatggccctgagccactgagtatgttcattgccacccctgtcctcccctgggcacccctcactttccctgatcctgcaattaaagggttaatgtgtggcatatggaagggactcccaggaccctgtgcccagcttccatgctgactgatggttaaataatgtgattgtctcctcccagg

SEQ ID NO: 1700 - protein, 1629 aa, Homo sapiens
MERCSRCHRLLLLLPLVLGLSAAPGWAGAPPVDVLRALRFPSLPDGVRRAKGICPADVAYRVARPAQLSAPTRQLFPGGFPKDFSLLTVVRTRPGLQAPLLTLYSAQGVRQLGLELGRPVRFLYEDQTGRPQPPSQPVFRGLSLADGKWHRVAVAVKGQSVTLIVDCKKRVTRPLPRSARPVLDTHGVIIFGARILDEEVFEGDVQELAIVPGVQAAYESCEQKELECEGGQRERPQNQQPHRAQRSPQQQPSRLHRPQNQEPQSQAAHGPRGLKGEKGEPAVLEPGMLVEGPPGPEGPAGLIGPPGIQGNPGPVGDPGERGPPGRAGLPGSDGAPGPPGTSLMLPFRFGSGGGDKGPVVAAQEAQAQAILQQARLALRGPPGPMGYTGRPGPLGQPGSPGLKGESGDLGPQGPRGPQGLTGSLGKAGRRGRAGADGARGMPGDPGVKGDRGFDGLPGLPGEKGHRGDTGAQGLPGPPGEDGERGDDGEIGPRGLPGESGPRGLLGPKGPPGIPGPPGVRGMDGPQGPKGSLGPQGEPGPPGQQGTPGTQGLPGPQGAIGPHGEKGPQGKPGLPGMPGSDGPPGHPGKEGPPGTKGNQGPSGPQGPLGYPGPRGVKGVDGIRGLKGHKGEKGEDGFPGFKGDIGVKGDRGEVGVPGSRGEDGPEGPKGRTGPTGDPGPPGLMGEKGKLGVPGLPGYPGRQGPKGSLGFPGFPGASGEKGARGLSGKSGPRGERGPTGPRGQRGPRGATGKSGAKGTSGGDGPHGPPGERGLPGPQGPNGFPGPKGPPGPPGKDGLPGHPGQRGEVGFQGKTGPPGPPGVVGPQGAAGETGPMGERGHPGPPGPPGEQGLPGTAGKEGTKGDPGPPGAPGKDGPAGLRGFPGERGLPGTAGGPGLKGNEGPSGPPGPAGSPGERGAAGSGGPIGRQGRPGPQGPPGAAGEKGVPGEKGPIGPTGRDGVQGPVGLPGPAGPPGVAGEDGDKGEVGDPGQKGTKGNKGEHGPPGPPGPIGPVGQPGAAGADGEPGARGPQGHFGAKGDEGTRGFNGPPGPIGLQGLPGPSGEKGETGDVGPMGPPGPPGPRGPAGPNGADGPQGPPGGVGNLGPPGEKGEPGESGSPGIQGEPGVKGPRGERGEKGESGQPGEPGPPGAKGPQGDDGPKGNPGPVGFPGDPGPPGEGGPRGQDGAKGDRGEDGEPGQPGSPGPTGENGPPGPLGKRGPAGSPGSEGRQGGKGAKGDPGAIGAPGKTGPVGPAGPAGKPGPDGLRGLPGSVGQQGRPGATGQAGPPGPVGPPGLPGLRGDAGAKGEKGHPGLIGLIGPPGEQGEKGDRGLPGPQGSPGQKGEMGIPGASGPIGPGGPPGLPGPAGPKGAKGATGPGGPKGEKGVQGPPGHPGPPGEVIQPLPIQMPKKTRRSVDGSRLMQEDEAIPTGGAPGSPGGLEEIFGSLDSLREEIEQMRRPTGTQDSPARTCQDLKLCHPELPDGEYWVDPNQGCARDAFRVFCNFTAGGETCVTPRDDVTQFSYVDSEGSPVGVVQLTFLRLLSVSAHQDVSYPCSGAARDGPLRLRGANEDELSPETSPYVKEFRDGCQTQQGRTVLEVRTPVLEQLPVLDASFSDLGAPPRRGGVLLGPVCFMG

SEQ ID NO: 1701 - DNA, 6414 bp, Homo sapiens
cacacagaagcggcagccaccgaggagggagcagtgccgggagccccgacggcgccttgctgcatggagctgggccgctgacagctgtcgtgcccgcagcctctgacctccctgggaccccggcgtctgaggctcatagtctgctccctgtcttctgtcagcctcagggcatccagcgtctcaggccgacctgtccctgggacccggcgtttcgcttctcagccatggagcggtgcagccgctgccatcgcctcctcctcctcctacctctggtgctggggctgagcgcggccccaggctgggcaggtgcaccccctgtggatgtgctccgggccctgaggttcccctccctccctgatggtgtccggagagcgaaaggcatctgtccagctgatgtggcctaccgagtggcacgacctgcccagctcagtgcacccactcgccagcttttcccaggaggatttcccaaagatttctctctgctgactgttgtccggacccgccctggtctccaagctcccctcctgactctctacagtgcccagggtgtccgacagctgggcctggagctgggccgacctgtccgcttcctgtatgaagaccagacagggcggcctcaacctccctctcagccagtcttccgaggcctcagcctagcagatggcaagtggcaccgtgtggctgtggctgtgaagggccagtctgtcaccctcattgttgactgcaagaagcgagtcacccggcctctcccccgaagtgctcgtccagtattggacacccatggagtgatcatctttggtgcccgtattctggatgaagaagtctttgagggtgatgtccaggagctggccattgtcccaggggtccaggcagcctatgaatcatgtgaacagaaggagctggaatgcgaggggggccagagggaaagaccccaaaaccaacagcctcacagagcccagagatctccacagcagcaaccatcaagacttcacaggccacaaaatcaggaaccccagagccagcccactgagtctctctactatgactacgagcccccctattatgatgtgatgactacggggacaacccctgattatcaggaccccaccccaggtgaagaggaagaaatcctggagtcgagcctcttgccaccccttgaggaggagcagacagatctccaggtcccccccacagccgacaggttccaggcagaggaatatggggagggtggcacagacccccctgaagggccctacgattacacctatggctatggggatgattatcgtgaggagacagagcttggccctgccctctctgcggagacagcccactcaggagccgctgcccatggaccccgagggctgaagggagagaaaggagagcctgcagtgttggaacctggtatgctcgtggaggggccccctggcccagaagggcctgcgggattgattggtccccctggcatccaggggaacccaggcccagttggagaccctggagagaggggcccccctggccgagcagggctccctggatcagatggggctcctggtcctcctggcacatctctcatgctcccattccggtttggcagtggtgggggtgacaagggccctgtggtggcggcccaggaggctcaggcccaggcgatcctgcagcaggcgaggctggcgctccgtggaccccctggccccatgggatacacagggcgccctggacccttgggccaacctgggagccctggcctgaaaggagagtctggagacttaggacctcagggccccagaggacctcagggcctcacaggctccctgggcaaggctgggcgaaggggccgggcaggtgctgatggagcccgagggatgcctggagatcctggagtgaagggtgaccgaggttttgatggactcccagggctccctggagagaagggccataggggtgatactggtgcccagggccttcctggtccccctggtgaggatggagagaggggagatgacggggagattgggcctcgagggctgcctggagagtcgggacctcgaggtctccttggccccaaaggcccacctggtattcctggaccccctggcgtccgaggcatggatggtccccagggccccaaagggagcttgggaccccagggagagccaggacctcctggacaacagggcacccctgggacccagggtcttcccgggccccagggtgccatcggccctcatggagagaagggtcctcaagggaagccagggctccccggcatgcctggctcagacggacccccgggtcacccagggaaggaaggtccccctggaaccaaaggaaaccagggtccctctggacctcagggacctctaggatacccaggacctcgaggggtcaagggtgtggacggaattcggggtctgaagggtcataagggtgagaagggtgaggatggctttcctgggttcaaaggtgacataggcgtgaaaggtgacaggggcgaagttggagtccctggttccaggggagaggatggtcctgaggggccaaagggacgcactggaccgactggagaccctgggcccccagggctcatgggcgagaagggcaagctgggtgttcctggtctgcctggctatcctggacgtcagggacccaaggggtccctaggatttcctggctttcctggtgccagtggagagaagggagcccggggcctgtcggggaagtcagggcctcggggagaacggggccccacgggtccacggggtcagcggggaccccgaggtgccactgggaagtctggagctaagggaacatctggtggtgatggcccccatggcccccctggagagaggggcctccctggacctcagggtcccaacgggtttcctggaccgaaaggacccccgggcccccctgggaaggacgggctgccgggacacccaggccaaagaggagaagtgggtttccaagggaagaccggcccccctggtcctccaggagtggtgggacctcagggagcagcaggagaaaccggccctatgggggagagaggtcacccaggccccccggggccccctggagagcagggactacctgggacagctggaaaagaaggaacaaagggtgaccctggtccccctggggccccagggaaggatggtcctgctggtctgaggggattcccaggagagagaggcctcccaggcactgctggtggacctggtttgaaggggaatgaaggtccgtctggcccccctggccctgcaggctcccctggggaacgaggtgcagcaggatcagggggacccattggtcgccaggggcgcccaggcccgcagggtccccctggagcagcaggagagaaaggtgtcccaggtgagaagggccccattggcccgactggccgagatggagtgcagggtcctgtggggcttcctggtcctgctgggcctccaggtgtggctggagaggatggagacaagggtgaggtgggggaccccggacagaagggcaccaaagggaacaagggtgaacatggccctcctggaccccctggacccattggtcctgtggggcagcctggagcagcgggagcagatggggagcccggagctcggggaccccagggacactttggagccaaaggtgatgaaggaacaagaggattcaatgggcccccaggacccattggcctacagggtttgccaggcccctctggggagaagggagaaacaggagatgtgggtcctatgggaccacctggccccccaggacctcgaggtccagctggacccaatggcgctgatggcccacaaggtcccccaggaggtgttgggaacctgggtccccctggagagaagggggaaccaggagagtcaggatctccagggatccagggcgagccaggtgtcaagggtccacgcggggaacgtggagagaaaggagagtcggggcagccaggagagccagggccaccaggcgctaaaggcccacagggcgatgatggccccaaagggaaccctggtcctgttggttttcctggtgaccctggcccccctggagaaggtggccctcggggccaggatggtgctaagggtgaccgaggcgaggatggtgagccaggacagcctggatcccctggtcccaccggggagaatggacccccagggccacttggaaagcgaggtcctgctggctcgcctggttccgaggggcgacaaggagggaagggagccaagggagatcctggcgctataggtgccccggggaagacaggcccggtgggtcctgcaggcccagcagggaaacctggccctgatggtctgagggggctcccaggctcagtgggtcagcaaggccgacctggagctacaggccaggctgggcccccaggtcctgtgggacccccagggctgcctggtctccggggcgatgctggagccaagggagagaagggccacccaggtctcattggactgattgggcccccgggtgagcagggagagaagggagatcggggacttcctgggcctcagggctcccctgggcagaagggtgagatgggtatcccaggagcatccggccccattggtcctggaggtccccccggcctccccggacctgctggccccaaaggagccaaaggagccacaggcccaggcggacccaagggagagaagggtgtgcagggccctccaggacacccgggtcccccaggcgaggtgatccagccactgcccattcagatgcccaagaagactcggcgctcggtggatggaagccgtctgatgcaggaagatgaggccataccgaccgggggagcccccggcagtcctggggggctggaggagatctttggctcactcgactccctgcgggaggagatcgagcagatgaggcggccaacagggacccaggacagccctgctcgcacctgccaggacctgaagctgtgccacccagagcttcccgatggagagtactgggtcgaccccaaccagggctgtgctcgggatgccttccgagttttctgcaacttcacagcagggggtgagacctgtgtgacgcctagggatgacgtcacgcagttctcttacgtggactcagagggctccccagtgggtgtggtccagctcaccttcctgcggctgctcagcgtctcagcccaccaggacgtctcctacccctgctctggagcagcccgtgacggtcccctgagactccgtggggccaatgaggatgagctgagcccggagactagcccctatgtcaaagaattcagagatggctgccagacacagcaaggccggacggtgctggaggtgcgaacgcctgtgctggagcagctgccagtgctggatgcctccttctcagacctgggagccccaccgaggcggggaggggtgctgctggggcctgtctgcttcatgggataggaccgtctctgtctgatcctgtccattcggtaccaggcccacctggaatcccacaacatcagctctgtgccacctcccaagagggctcctcactatctagggagccctgggccagggctggagagccctcagtcggggcaggccaggggaggggtgaagtggttgcctggacaccccacgggaggagtggcatctgggctcttggccctcccacctggagcctgttacccgttagagagctgagagcccttatttaaaactcacctcccaatcaccccaaacaaatggaagagaagagaaaggacatggcgtattttgtatttaaaagtaattgtattaattatttaaagtgtggaaagcaaaataacaaaaaagagaaacgccaacaaaaaatcagcagatgttgaagacaggggtctcgggggtgggctccggcacccacatctgagtcaggactttcctcagtgactgtgtgtaggggggttcagggctgaacccacctccctcccaccttcctcccacctcacctgtcgcacccactgtgaaagttggaatatgtggtctccctggcctcagggctctgactctgccagggtggggctctctaacccacaggtgttggctgcctggcccatgtgcccactgtctcttccacttggtctgggtttggcaggcactgctgctacttgagggccaggatgctcccccagggaagaaacggaatagtgtggggtgtgtgcagggctgcatccgcagatggctggaatattaaaattcttctatattggctggtaaattgccatggccctgagccactgagtatgttcattgccacccctgtcctcccctgggcacccctcactttccctgatcctgcaattaaagggttaatgtgtggcatatggaagggactcccaggaccctgtgcccagcttccatgctgactgatggttaaataatgtgattgtctcctcccagg

SEQ ID NO: 1702 - protein, 1736 aa, Homo sapiens
MERCSRCHRLLLLLPLVLGLSAAPGWAGAPPVDVLRALRFPSLPDGVRRAKGICPADVAYRVARPAQLSAPTRQLFPGGFPKDFSLLTVVRTRPGLQAPLLTLYSAQGVRQLGLELGRPVRFLYEDQTGRPQPPSQPVFRGLSLADGKWHRVAVAVKGQSVTLIVDCKKRVTRPLPRSARPVLDTHGVIIFGARILDEEVFEGDVQELAIVPGVQAAYESCEQKELECEGGQRERPQNQQPHRAQRSPQQQPSRLHRPQNQEPQSQPTESLYYDYEPPYYDVMTTGTTPDYQDPTPGEEEEILESSLLPPLEEEQTDLQVPPTADRFQAEEYGEGGTDPPEGPYDYTYGYGDDYREETELGPALSAETAHSGAAAHGPRGLKGEKGEPAVLEPGMLVEGPPGPEGPAGLIGPPGIQGNPGPVGDPGERGPPGRAGLPGSDGAPGPPGTSLMLPFRFGSGGGDKGPVVAAQEAQAQAILQQARLALRGPPGPMGYTGRPGPLGQPGSPGLKGESGDLGPQGPRGPQGLTGSLGKAGRRGRAGADGARGMPGDPGVKGDRGFDGLPGLPGEKGHRGDTGAQGLPGPPGEDGERGDDGEIGPRGLPGESGPRGLLGPKGPPGIPGPPGVRGMDGPQGPKGSLGPQGEPGPPGQQGTPGTQGLPGPQGAIGPHGEKGPQGKPGLPGMPGSDGPPGHPGKEGPPGTKGNQGPSGPQGPLGYPGPRGVKGVDGIRGLKGHKGEKGEDGFPGFKGDIGVKGDRGEVGVPGSRGEDGPEGPKGRTGPTGDPGPPGLMGEKGKLGVPGLPGYPGRQGPKGSLGFPGFPGASGEKGARGLSGKSGPRGERGPTGPRGQRGPRGATGKSGAKGTSGGDGPHGPPGERGLPGPQGPNGFPGPKGPPGPPGKDGLPGHPGQRGEVGFQGKTGPPGPPGVVGPQGAAGETGPMGERGHPGPPGPPGEQGLPGTAGKEGTKGDPGPPGAPGKDGPAGLRGFPGERGLPGTAGGPGLKGNEGPSGPPGPAGSPGERGAAGSGGPIGRQGRPGPQGPPGAAGEKGVPGEKGPIGPTGRDGVQGPVGLPGPAGPPGVAGEDGDKGEVGDPGQKGTKGNKGEHGPPGPPGPIGPVGQPGAAGADGEPGARGPQGHFGAKGDEGTRGFNGPPGPIGLQGLPGPSGEKGETGDVGPMGPPGPPGPRGPAGPNGADGPQGPPGGVGNLGPPGEKGEPGESGSPGIQGEPGVKGPRGERGEKGESGQPGEPGPPGAKGPQGDDGPKGNPGPVGFPGDPGPPGEGGPRGQDGAKGDRGEDGEPGQPGSPGPTGENGPPGPLGKRGPAGSPGSEGRQGGKGAKGDPGAIGAPGKTGPVGPAGPAGKPGPDGLRGLPGSVGQQGRPGATGQAGPPGPVGPPGLPGLRGDAGAKGEKGHPGLIGLIGPPGEQGEKGDRGLPGPQGSPGQKGEMGIPGASGPIGPGGPPGLPGPAGPKGAKGATGPGGPKGEKGVQGPPGHPGPPGEVIQPLPIQMPKKTRRSVDGSRLMQEDEAIPTGGAPGSPGGLEEIFGSLDSLREEIEQMRRPTGTQDSPARTCQDLKLCHPELPDGEYWVDPNQGCARDAFRVFCNFTAGGETCVTPRDDVTQFSYVDSEGSPVGVVQLTFLRLLSVSAHQDVSYPCSGAARDGPLRLRGANEDELSPETSPYVKEFRDGCQTQQGRTVLEVRTPVLEQLPVLDASFSDLGAPPRRGGVLLGPVCFMG

SEQ ID NO: 1703 - DNA, 6156 bp, Homo sapiens
cacacagaagcggcagccaccgaggagggagcagtgccgggagccccgacggcgccttgctgcatggagctgggccgctgacagctgtcgtgcccgcagcctctgacctccctgggaccccggcgtctgaggctcatagtctgctccctgtcttctgtcagcctcagggcatccagcgtctcaggccgacctgtccctgggacccggcgtttcgcttctcagccatggagcggtgcagccgctgccatcgcctcctcctcctcctacctctggtgctggggctgagcgcggccccaggctgggcaggtgcaccccctgtggatgtgctccgggccctgaggttcccctccctccctgatggtgtccggagagcgaaaggcatctgtccagctgatgtggcctaccgagtggcacgacctgcccagctcagtgcacccactcgccagcttttcccaggaggatttcccaaagatttctctctgctgactgttgtccggacccgccctggtctccaagctcccctcctgactctctacagtgcccagggtgtccgacagctgggcctggagctgggccgacctgtccgcttcctgtatgaagaccagacagggcggcctcaacctccctctcagccagtcttccgaggcctcagcctagcagatggcaagtggcaccgtgtggctgtggctgtgaagggccagtctgtcaccctcattgttgactgcaagaagcgagtcacccggcctctcccccgaagtgctcgtccagtattggacacccatggagtgatcatctttggtgcccgtattctggatgaagaagtctttgagggtgatgtccaggagctggccattgtcccaggggtccaggcagcctatgaatcatgtgaacagaaggagctggaatgcgaggggggccagagggaaagaccccaaaaccaacagcctcacagagcccagagatctccacagcagcaaccatcaagacttcacaggccacaaaatcaggaaccccagagccaggaccccaccccaggtgaagaggaagaaatcctggagtcgagcctcttgccaccccttgaggaggctgcccatggaccccgagggctgaagggagagaaaggagagcctgcagtgttggaacctggtatgctcgtggaggggccccctggcccagaagggcctgcgggattgattggtccccctggcatccaggggaacccaggcccagttggagaccctggagagaggggcccccctggccgagcagggctccctggatcagatggggctcctggtcctcctggcacatctctcatgctcccattccggtttggcagtggtgggggtgacaagggccctgtggtggcggcccaggaggctcaggcccaggcgatcctgcagcaggcgaggctggcgctccgtggaccccctggccccatgggatacacagggcgccctggacccttgggccaacctgggagccctggcctgaaaggagagtctggagacttaggacctcagggccccagaggacctcagggcctcacaggctccctgggcaaggctgggcgaaggggccgggcaggtgctgatggagcccgagggatgcctggagatcctggagtgaagggtgaccgaggttttgatggactcccagggctccctggagagaagggccataggggtgatactggtgcccagggccttcctggtccccctggtgaggatggagagaggggagatgacggggagattgggcctcgagggctgcctggagagtcgggacctcgaggtctccttggccccaaaggcccacctggtattcctggaccccctggcgtccgaggcatggatggtccccagggccccaaagggagcttgggaccccagggagagccaggacctcctggacaacagggcacccctgggacccagggtcttcccgggccccagggtgccatcggccctcatggagagaagggtcctcaagggaagccagggctccccggcatgcctggctcagacggacccccgggtcacccagggaaggaaggtccccctggaaccaaaggaaaccagggtccctctggacctcagggacctctaggatacccaggacctcgaggggtcaagggtgtggacggaattcggggtctgaagggtcataagggtgagaagggtgaggatggctttcctgggttcaaaggtgacataggcgtgaaaggtgacaggggcgaagttggagtccctggttccaggggagaggatggtcctgaggggccaaagggacgcactggaccgactggagaccctgggcccccagggctcatgggcgagaagggcaagctgggtgttcctggtctgcctggctatcctggacgtcagggacccaaggggtccctaggatttcctggctttcctggtgccagtggagagaagggagcccggggcctgtcggggaagtcagggcctcggggagaacggggccccacgggtccacggggtcagcggggaccccgaggtgccactgggaagtctggagctaagggaacatctggtggtgatggcccccatggcccccctggagagaggggcctccctggacctcagggtcccaacgggtttcctggaccgaaaggacccccgggcccccctgggaaggacgggctgccgggacacccaggccaaagaggagaagtgggtttccaagggaagaccggcccccctggtcctccaggagtggtgggacctcagggagcagcaggagaaaccggccctatgggggagagaggtcacccaggccccccggggccccctggagagcagggactacctgggacagctggaaaagaaggaacaaagggtgaccctggtccccctggggccccagggaaggatggtcctgctggtctgaggggattcccaggagagagaggcctcccaggcactgctggtggacctggtttgaaggggaatgaaggtccgtctggcccccctggccctgcaggctcccctggggaacgaggtgcagcaggatcagggggacccattggtcgccaggggcgcccaggcccgcagggtccccctggagcagcaggagagaaaggtgtcccaggtgagaagggccccattggcccgactggccgagatggagtgcagggtcctgtggggcttcctggtcctgctgggcctccaggtgtggctggagaggatggagacaagggtgaggtgggggaccccggacagaagggcaccaaagggaacaagggtgaacatggccctcctggaccccctggacccattggtcctgtggggcagcctggagcagcgggagcagatggggagcccggagctcggggaccccagggacactttggagccaaaggtgatgaaggaacaagaggattcaatgggcccccaggacccattggcctacagggtttgccaggcccctctggggagaagggagaaacaggagatgtgggtcctatgggaccacctggccccccaggacctcgaggtccagctggacccaatggcgctgatggcccacaaggtcccccaggaggtgttgggaacctgggtccccctggagagaagggggaaccaggagagtcaggatctccagggatccagggcgagccaggtgtcaagggtccacgcggggaacgtggagagaaaggagagtcggggcagccaggagagccagggccaccaggcgctaaaggcccacagggcgatgatggccccaaagggaaccctggtcctgttggttttcctggtgaccctggcccccctggagaaggtggccctcggggccaggatggtgctaagggtgaccgaggcgaggatggtgagccaggacagcctggatcccctggtcccaccggggagaatggacccccagggccacttggaaagcgaggtcctgctggctcgcctggttccgaggggcgacaaggagggaagggagccaagggagatcctggcgctataggtgccccggggaagacaggcccggtgggtcctgcaggcccagcagggaaacctggccctgatggtctgagggggctcccaggctcagtgggtcagcaaggccgacctggagctacaggccaggctgggcccccaggtcctgtgggacccccagggctgcctggtctccggggcgatgctggagccaagggagagaagggccacccaggtctcattggactgattgggcccccgggtgagcagggagagaagggagatcggggacttcctgggcctcagggctcccctgggcagaagggtgagatgggtatcccaggagcatccggccccattggtcctggaggtccccccggcctccccggacctgctggccccaaaggagccaaaggagccacaggcccaggcggacccaagggagagaagggtgtgcagggccctccaggacacccgggtcccccaggcgaggtgatccagccactgcccattcagatgcccaagaagactcggcgctcggtggatggaagccgtctgatgcaggaagatgaggccataccgaccgggggagcccccggcagtcctggggggctggaggagatctttggctcactcgactccctgcgggaggagatcgagcagatgaggcggccaacagggacccaggacagccctgctcgcacctgccaggacctgaagctgtgccacccagagcttcccgatggagagtactgggtcgaccccaaccagggctgtgctcgggatgccttccgagttttctgcaacttcacagcagggggtgagacctgtgtgacgcctagggatgacgtcacgcagttctcttacgtggactcagagggctccccagtgggtgtggtccagctcaccttcctgcggctgctcagcgtctcagcccaccaggacgtctcctacccctgctctggagcagcccgtgacggtcccctgagactccgtggggccaatgaggatgagctgagcccggagactagcccctatgtcaaagaattcagagatggctgccagacacagcaaggccggacggtgctggaggtgcgaacgcctgtgctggagcagctgccagtgctggatgcctccttctcagacctgggagccccaccgaggcggggaggggtgctgctggggcctgtctgcttcatgggataggaccgtctctgtctgatcctgtccattcggtaccaggcccacctggaatcccacaacatcagctctgtgccacctcccaagagggctcctcactatctagggagccctgggccagggctggagagccctcagtcggggcaggccaggggaggggtgaagtggttgcctggacaccccacgggaggagtggcatctgggctcttggccctcccacctggagcctgttacccgttagagagctgagagcccttatttaaaactcacctcccaatcaccccaaacaaatggaagagaagagaaaggacatggcgtattttgtatttaaaagtaattgtattaattatttaaagtgtggaaagcaaaataacaaaaaagagaaacgccaacaaaaaatcagcagatgttgaagacaggggtctcgggggtgggctccggcacccacatctgagtcaggactttcctcagtgactgtgtgtaggggggttcagggctgaacccacctccctcccaccttcctcccacctcacctgtcgcacccactgtgaaagttggaatatgtggtctccctggcctcagggctctgactctgccagggtggggctctctaacccacaggtgttggctgcctggcccatgtgcccactgtctcttccacttggtctgggtttggcaggcactgctgctacttgagggccaggatgctcccccagggaagaaacggaatagtgtggggtgtgtgcagggctgcatccgcagatggctggaatattaaaattcttctatattggctggtaaattgccatggccctgagccactgagtatgttcattgccacccctgtcctcccctgggcacccctcactttccctgatcctgcaattaaagggttaatgtgtggcatatggaagggactcccaggaccctgtgcccagcttccatgctgactgatggttaaataatgtgattgtctcctcccagg

SEQ ID NO: 1704 - protein, 1650 aa, Homo sapiens
MERCSRCHRLLLLLPLVLGLSAAPGWAGAPPVDVLRALRFPSLPDGVRRAKGICPADVAYRVARPAQLSAPTRQLFPGGFPKDFSLLTVVRTRPGLQAPLLTLYSAQGVRQLGLELGRPVRFLYEDQTGRPQPPSQPVFRGLSLADGKWHRVAVAVKGQSVTLIVDCKKRVTRPLPRSARPVLDTHGVIIFGARILDEEVFEGDVQELAIVPGVQAAYESCEQKELECEGGQRERPQNQQPHRAQRSPQQQPSRLHRPQNQEPQSQDPTPGEEEEILESSLLPPLEEAAHGPRGLKGEKGEPAVLEPGMLVEGPPGPEGPAGLIGPPGIQGNPGPVGDPGERGPPGRAGLPGSDGAPGPPGTSLMLPFRFGSGGGDKGPVVAAQEAQAQAILQQARLALRGPPGPMGYTGRPGPLGQPGSPGLKGESGDLGPQGPRGPQGLTGSLGKAGRRGRAGADGARGMPGDPGVKGDRGFDGLPGLPGEKGHRGDTGAQGLPGPPGEDGERGDDGEIGPRGLPGESGPRGLLGPKGPPGIPGPPGVRGMDGPQGPKGSLGPQGEPGPPGQQGTPGTQGLPGPQGAIGPHGEKGPQGKPGLPGMPGSDGPPGHPGKEGPPGTKGNQGPSGPQGPLGYPGPRGVKGVDGIRGLKGHKGEKGEDGFPGFKGDIGVKGDRGEVGVPGSRGEDGPEGPKGRTGPTGDPGPPGLMGEKGKLGVPGLPGYPGRQGPKGSLGFPGFPGASGEKGARGLSGKSGPRGERGPTGPRGQRGPRGATGKSGAKGTSGGDGPHGPPGERGLPGPQGPNGFPGPKGPPGPPGKDGLPGHPGQRGEVGFQGKTGPPGPPGVVGPQGAAGETGPMGERGHPGPPGPPGEQGLPGTAGKEGTKGDPGPPGAPGKDGPAGLRGFPGERGLPGTAGGPGLKGNEGPSGPPGPAGSPGERGAAGSGGPIGRQGRPGPQGPPGAAGEKGVPGEKGPIGPTGRDGVQGPVGLPGPAGPPGVAGEDGDKGEVGDPGQKGTKGNKGEHGPPGPPGPIGPVGQPGAAGADGEPGARGPQGHFGAKGDEGTRGFNGPPGPIGLQGLPGPSGEKGETGDVGPMGPPGPPGPRGPAGPNGADGPQGPPGGVGNLGPPGEKGEPGESGSPGIQGEPGVKGPRGERGEKGESGQPGEPGPPGAKGPQGDDGPKGNPGPVGFPGDPGPPGEGGPRGQDGAKGDRGEDGEPGQPGSPGPTGENGPPGPLGKRGPAGSPGSEGRQGGKGAKGDPGAIGAPGKTGPVGPAGPAGKPGPDGLRGLPGSVGQQGRPGATGQAGPPGPVGPPGLPGLRGDAGAKGEKGHPGLIGLIGPPGEQGEKGDRGLPGPQGSPGQKGEMGIPGASGPIGPGGPPGLPGPAGPKGAKGATGPGGPKGEKGVQGPPGHPGPPGEVIQPLPIQMPKKTRRSVDGSRLMQEDEAIPTGGAPGSPGGLEEIFGSLDSLREEIEQMRRPTGTQDSPARTCQDLKLCHPELPDGEYWVDPNQGCARDAFRVFCNFTAGGETCVTPRDDVTQFSYVDSEGSPVGVVQLTFLRLLSVSAHQDVSYPCSGAARDGPLRLRGANEDELSPETSPYVKEFRDGCQTQQGRTVLEVRTPVLEQLPVLDASFSDLGAPPRRGGVLLGPVCFMG

SEQ ID NO: 1705 - DNA, 2892 bp, Homo sapiens
caaagatggctgccacattggcgctgtcattttggtactgagcagagcgacgggcttaattcgacccaatccaggccagagtctttctctcaggggcttcctcgtgctcagctaatcctccgatcaatccttgggaatccctgggacctcttcggtatccctactctcagccagggatcatgtcttgggccgctcgcccgcccttcctccctcagcggcatgccgcagggcagtgtgggccggtgggggtgcgaaaagaaatgcattgtggggtcgcgtcccggtggcggcggcgacggccctggctggatcccgcagcggcggcggcggcggcggtggcaggcggagaacaacaaaccccggagccggagccaggggaggctggacgggacgggatgggcgacagcgggcgggactcccgaagcccagacagctcctccccaaatccccttccccagggagtccctcccccttctcctcctgggccacccctacccccttcaacagctccatcccttggaggctctggggccccacccccacccccgatgccaccacccccactgggctctccctttccagtcatcagttcttccatggggtcccctggtctgccccctccagctcccccaggattctccgggcctgtcagcagcccccagattaactcaacagtgtcactccctgggggtgggtctggcccccctgaagatgtgaagccaccagtcttaggggtccggggcctgcactgtccaccccctccaggtggccctggggctggcaaacggctatgtgcaatctgcggggacagaagctcaggcaaacactacggggtttacagctgtgagggttgcaagggcttcttcaaacgcaccatccgcaaagaccttacatactcttgccgggacaacaaagactgcacagtggacaagcgccagcggaaccgctgtcagtactgccgctatcagaagtgcctggccactggcatgaagagggaggcggtacaggaggagcgtcagcggggaaaggacaaggatggggatggggagggggctgggggagcccccgaggagatgcctgtggacaggatcctggaggcagagcttgctgtggaacagaagagtgaccagggcgttgagggtcctgggggaaccgggggtagcggcagcagcccaaatgaccctgtgactaacatctgtcaggcagctgacaaacagctattcacgcttgttgagtgggcgaagaggatcccacacttttcctccttgcctctggatgatcaggtcatattgctgcgggcaggctggaatgaactcctcattgcctccttctcacaccgatccattgatgttcgagatggcatcctccttgccacaggtcttcacgtgcaccgcaactcagcccattcagcaggagtaggagccatctttgatcgggtgctgacagagctagtgtccaaaatgcgtgacatgaggatggacaagacagagcttggctgcctgagggcaatcattctgtttaatccagatgccaagggcctctccaaccctagtgaggtggaggtcctgcgggagaaagtgtatgcatcactggagacctactgcaaacagaagtaccctgagcagcagggacggtttgccaagctgctgctacgtcttcctgccctccggtccattggccttaagtgtctagagcatctgtttttcttcaagctcattggtgacacccccatcgacaccttcctcatggagatgcttgaggctccccatcaactggcctgagctcagacccagacgtggtgcttctcacactggaggagcacacatccaagagggactccaagccctggggcagggtggggggccatgttcccagaaccttgatggggtgagaagtacagggcagaaccaagaacataaaccctccaagggatctgcttgatatcccaagttggaagggaccccagatacctgtgaggactggttgtctctcttcggtggccttgagtctctgaatttgtcgggttctcccatgatttggggtgatttctcaccctctgtccttcccccagcacaaagcactggccttgcctccaggaccttgcttccttctcatcttgcctcattttgcttcccatctgaagagtggaaatggggaactcccccagaggtggatactggggggcaggcctcccaagctgatggacatgagagtagggccctgacaggccttcctcctctcaaacctggcagatgggggcctctctggaagagggaggggccctgtcactgtccagagtctctttttacacttcacctccttctgcagtcagactgaaatataaaaaaggtggtggtggtggtgaaggggctggtggagatgtaggaaccgatctgctatttttaatttcctgtgaggatagagacttgcagttagactcaaagaagtactgtactttcccaggttgactaagaaatgccagtggtggaggtgggtgtttgggaaaggcagggccctgaaatggcctgtccctagggctctccaagcactagccttcccagcttcccgccgccccccctatctcttcctgtctaacttggggaaggggcctgggctgtgaggacagggcccccacaggggatggtttcacgagtgtagtcccggaggccttccctttacagctctcctccagccctgggcacatagcataggctggggacacaggatcctggcctgagaattgaggggaggtggccagcccgcagaggtggggtgctggggctgcatgatttttgccctgcgtcccttctctttggggctcctttcccctctcatacataaaatcgctttcaaattaaaatcgctgttttctggaaaaaaaaaaaaaaaaaa

SEQ ID NO: 1706 - protein, 533 aa, Homo sapiens
MSWAARPPFLPQRHAAGQCGPVGVRKEMHCGVASRWRRRRPWLDPAAAAAAAVAGGEQQTPEPEPGEAGRDGMGDSGRDSRSPDSSSPNPLPQGVPPPSPPGPPLPPSTAPSLGGSGAPPPPPMPPPPLGSPFPVISSSMGSPGLPPPAPPGFSGPVSSPQINSTVSLPGGGSGPPEDVKPPVLGVRGLHCPPPPGGPGAGKRLCAICGDRSSGKHYGVYSCEGCKGFFKRTIRKDLTYSCRDNKDCTVDKRQRNRCQYCRYQKCLATGMKREAVQEERQRGKDKDGDGEGAGGAPEEMPVDRILEAELAVEQKSDQGVEGPGGTGGSGSSPNDPVTNICQAADKQLFTLVEWAKRIPHFSSLPLDDQVILLRAGWNELLIASFSHRSIDVRDGILLATGLHVHRNSAHSAGVGAIFDRVLTELVSKMRDMRMDKTELGCLRAIILFNPDAKGLSNPSEVEVLREKVYASLETYCKQKYPEQQGRFAKLLLRLPALRSIGLKCLEHLFFFKLIGDTPIDTFLMEMLEAPHQLA

SEQ ID NO: 1707 - DNA, 2358 bp, Homo sapiens
ggagaggatcccggagccggtgagaattctctgttttttctctaccatcctttccaggccttttcctcacctaatgagtcgtagagacgagggcccagagagtctgtaaagtggctggtgaaagattagtgtcccagggccctacatccgggaggtggttcgggataaagagaactagtcttgggaacaatgtaggtgggaacttaagggaatgggagagcggcccatagaggtggacggagggcgcgattggagtaaagcggaccctgtgtaggtatagagttgagtcaagtggagtcactgcctctgtccctctggtcagcgtgatggccagaggcctggggggcccccactgggtggccgtgggactgctgacctgggcgaccttggggcttctggtggctggactcgggggtcatgacgacctgcacgacgatctgcaagaggacttccatggccacagccacaggcactcacatgaagatttccaccatggtcacagccatgcccatggtcatggccacactcacgagagcatctggcatggacatacccacgatcacgaccatggacattcacatgaggatttacaccatggccatagccatggctactcccatgagagcctctaccacagaggacatggacatgaccatgagcatagccatggaggctatggggagtctggggctccaggcatcaagcaggacctggatgctgtcactctctgggcttatgcactgggggccacagtgctgatctcagcagctccattttttgtcctcttccttatccccgtggagtcgaactctccccggcatcgctctctacttcagatcttgctcagttttgcttccggtgggctcctgggagatgctttcctgcacctcattcctcatgctcttgaacctcattctcaccacactctggagcaacccggacatggacactcccacagtggccagggccccattctgtctgtgggcctgtgggttctcagtggaattgttgcctttcttgtcgtggagaaatttgtgagacatgtgaaaggaggacatggtcacagtcatggacatggacacgctcacagtcatacacgtggaagtcatggacatggaagacaagagcgttctaccaaggagaagcagagctcagaggaagaaggaaaggaaacaagaggggttcagaagaggcgaggagggagcacagtacccaaagatgggccagtgagacctcagaacgctgaagaagaaaaaagaggcttagacctgcgtgtgtcggggtacctgaatctggctgctgacttggcacacaacttcactgatggtctggccattggggcttcctttcgagggggccggggactagggatcctgaccacaatgactgtcctgctacatgaagtgccccacgaggtcggggactttgccatcttggtccagtctggctgcaccaaaaagcaggcgatgcgtctgcaactactgacagcagtaggggcactggcaggcacagctgtgcccttctcactgaaggaggagcagtggacagtgaaattgcaggtggtgcaggtcctggctgggtcctgccatttactgcaggtggctttatctacgtagcaacagtgtctgtgttgcccgagctgctgagggaggcatcaccattgcaatcacttctggaggtgctggggctgctggggggagttatcatgatggtgctgattgcccaccttgagtgaggggtggataaactaccctgccccaaacctctacccctaactccaggtcaggggtgcgtagaggttgggggccctggccagggacatctgccaaaggaaggaactgtagcctgggagcaatggttactttggcattagggccttcaagggctggcagtcttacagaggctggagcggtgagaatgagaggccagagggaccatagtgttgggcactgtctgaccatgttgcatttggaaggctaaatggggccatgaagaaggctggaagggacagggggtgatggcagcctacctggtgtcccctaccccacctgttctcggagaaccaagttgctacacaggaagttctccaaggtccagtttcctttctcccaccagttggtggaggcttcagggaagaccagagtcctggacagagagggtaacaggaggagtcggggataaacatcaaacatcaatcgtgtgtcctgatttgggagtgattggggggatggggtgggagagggttaattggtattctcatggcctgattttttttgtttctattccttttatatcactgtgtttgaatcgagggggaggggtggtaaccggaaataaagacctccgatcttccgcccc

SEQ ID NO: 1708 - protein, 429 aa, Homo sapiens
MARGLGGPHWVAVGLLTWATLGLLVAGLGGHDDLHDDLQEDFHGHSHRHSHEDFHHGHSHAHGHGHTHESIWHGHTHDHDHGHSHEDLHHGHSHGYSHESLYHRGHGHDHEHSHGGYGESGAPGIKQDLDAVTLWAYALGATVLISAAPFFVLFLIPVESNSPRHRSLLQILLSFASGGLLGDAFLHLIPHALEPHSHHTLEQPGHGHSHSGQGPILSVGLWVLSGIVAFLVVEKFVRHVKGGHGHSHGHGHAHSHTRGSHGHGRQERSTKEKQSSEEEGKETRGVQKRRGGSTVPKDGPVRPQNAEEEKRGLDLRVSGYLNLAADLAHNFTDGLAIGASFRGGRGLGILTTMTVLLHEVPHEVGDFAILVQSGCTKKQAMRLQLLTAVGALAGTAVPFSLKEEQWTVKLQVVQVLAGSCHLLQVALST

SEQ ID NO: 1709 - DNA, 989 bp, Homo sapiens
gggattcccacccacccacagcccgccatggcgtctcagctccagaaccgactccgctccgcactggccttggtcacaggtgcggggagcggcatcggccgagcggtcagtgtacgcctggccggagagggggccaccgtagctgcctgcgacctggaccgggcagcggcacaggagacggtgcggctgctgggcgggccagggagcaaggaggggccgccccgagggaaccatgctgccttccaggctgacgtgtctgaggccagggccgccaggtgcctgctggaacaagtgcaggcctgcttttctcgcccaccatctgtcgttgtgtcctgtgcgggcatcacccaggatgagtttctgctgcacatgtctgaggatgactgggacaaagtcatagctgtcaacctcaagggcaccttcctagtcactcaggctgcagcacaagccctggtgtccaatggttgtcgtggttccatcatcaacatcagtagcatcgtaggaaaggtggggaacgtggggcagacaaactatgcagcatccaaggctggagtgattgggctgacccagaccgcagcccgggagcttggacgacatgggatccgctgtaactctgtcctcccagggttcattgcaacacccatgacacagaaagtgccacagaaagtggtggacaagattactgaaatgatcccgatgggacacttgggggaccctgaggatgtggcagatgtggtcgcattcttggcatctgaagatagtggatacatcacagggacctcagtggaagtcactggaggtcttttcatgtaactgcctcaaggaccctggactctgctcacccccccaccactctgcctggcctcctgctgatgaggactctaagttcccaggatacaaaaggggtggcagtgtatggttcaggaatgctgaatatgggaagcaggggtgcttgtgaccctaataaattccaagtcctcttccctgcc

SEQ ID NO: 1710 - protein, 261 aa, Homo sapiens
MASQLQNRLRSALALVTGAGSGIGRAVSVRLAGEGATVAACDLDRAAAQETVRLLGGPGSKEGPPRGNHAAFQADVSEARAARCLLEQVQACFSRPPSVVVSCAGITQDEFLLHMSEDDWDKVIAVNLKGTFLVTQAAAQALVSNGCRGSIINISSIVGKVGNVGQTNYAASKAGVIGLTQTAARELGRHGIRCNSVLPGFIATPMTQKVPQKVVDKITEMIPMGHLGDPEDVADVVAFLASEDSGYITGTSVEVTGGLFM

SEQ ID NO: 1711 - DNA, 1744 bp, Homo sapiens
cagcgcccgggccatggcggcggcggtggcgggagctgctgtctgagcagcggttgcggaccgagcgaacttggcccaggagcccgggcctagggagaggcgcggcggcggcgggagcgcgaacggctggagctggccttcttcgccttctcctcggctgtggagccctggtggggggtctgcgcccggtcaccatgacgacgccggcgaatgcccagaatgccagcaaaacgtgggaactgagtctgtatgagctgcaccggaccccgcaggaagccataatggatggcacagagattgctgtttcccctcggtcactgcattcagaactcatgtgccctatctgcctggacatgctgaagaatacgatgaccaccaaggagtgcctccacagattctgctctgactgcattgtcacagccctacggagcgggaacaaggagtgtcctacctgccgaaagaagctggtgtccaagcgatccctacggccagaccccaactttgatgccctgatctctaagatctatcctagccgggaggaatacgaggcccatcaagaccgagtgcttatccgcctgagccgcctgcacaaccagcaggcattgagctccagcattgaggaggggctacgcatgcaggccatgcacagggcccagcgtgtgaggcggccgataccagggtcagatcagaccacaacgatgagtgggggggaaggagagcccggggagggagaaggggatggagaagatgtgagctcagactccgcccctgactctgccccaggccctgctcccaagcgaccccgtggagggggcgcaggggggagcagtgtagggacagggggaggcggcactggtggggtgggtgggggtgccggttcggaagactctggtgaccggggagggactctgggagggggaacgctgggccccccaagccctcctggggcccccagccccccagagccaggtggagaaattgagctcgtgttccggccccaccccctgctcgtggagaagggagaatactgccagacgaggtatgtgaagacaactgggaatgccacagtggaccacctctccaagtacttggccctgcgcattgccctcgagcggaggcaacagcaggaagcaggggagccaggagggcctggagggggcgcctctgacaccggaggacctgatgggtgtggcggggagggtgggggtgccggaggaggtgacggtcctgaggagcctgctttgcccagcctggagggcgtcagtgaaaagcagtacaccatctacatcgcacctggaggcggggcgttcacgacgttgaatggctcgctgaccctggagctggtgaatgagaaattctggaaggtgtcccggccactggagctgtgctatgctcccaccaaggatccaaagtgaccccaccaggggacagccagaggaaggggaccatggggtatccctgtgtcctggtctatcaccccagcttctttgtcccccagtacccccagcccagccagccaataagaggacacaaatgaggacacgtggcttttatacaaagtatctatatgagattcttctatattgtacagagtggggcaaaacacgcccccatctgctgccttttctattgccctgcaacgtcccatctatacgaggtgttggagaaggtgaagaaccctcccattcacgcccgcctaccaacaacaaacgtgcttttttcctctttgaaacctgcaaaaaaa

SEQ ID NO: 1712 - protein, 406 aa, Homo sapiens
MTTPANAQNASKTWELSLYELHRTPQEAIMDGTEIAVSPRSLHSELMCPICLDMLKNTMTTKECLHRFCSDCIVTALRSGNKECPTCRKKLVSKRSLRPDPNFDALISKIYPSREEYEAHQDRVLIRLSRLHNQQALSSSIEEGLRMQAMHRAQRVRRPIPGSDQTTTMSGGEGEPGEGEGDGEDVSSDSAPDSAPGPAPKRPRGGGAGGSSVGTGGGGTGGVGGGAGSEDSGDRGGTLGGGTLGPPSPPGAPSPPEPGGEIELVFRPHPLLVEKGEYCQTRYVKTTGNATVDHLSKYLALRIALERRQQQEAGEPGGPGGGASDTGGPDGCGGEGGGAGGGDGPEEPALPSLEGVSEKQYTIYIAPGGGAFTTLNGSLTLELVNEKFWKVSRPLELCYAPTKDPK

SEQ ID NO: 1713 - DNA, 2990 bp, Homo sapiens
tccggggctagtttgtgtttcagacttccatatttccatttgcagttgggtgaagtggttagagctgaaaggggacagctggagtcaaacaacttaactcaaatatctgggaacgatttcgcgctgaggaagaccctttgggacttgtagctccactccggggaacggactcgccgggactgacagttgccggaagtgaggctgcggggaatggccgccgctgcgaccatggcggctgcggcccgggaactggtgttgcgggctgggacctcagatatggaggaggaagagggcccgctggcgggtggtcctgggctccaggaaccactgcaacttggggagttggatatcacttctgatgaattcatcctggatgaagtggatgttcacattcaggcaaatctggaggatgagttagtaaaggaagctcttaaaacgggtgtagatctccgtcactattcaaagcaagttgagctggagctacagcagattgaacagaaatccattcgggattatattcaagagagtgagaatatagcatctctacacaaccagatcacagcctgtgatgctgtcctggagcgaatggagcagatgttgggagcttttcagagtgacctcagctccatcagctctgagatccggacactgcaggaacagtcaggagccatgaacattcgacttcgaaatcgccaggcagttcgggggaaacttggggagcttgttgatggtctggtggtgccttctgctctggtcacggcaattctggaggctccagtgacagagcccaggttcttggagcagctacaggagctggatgccaaggcagccgcagtcagagagcaggaagctagaggcacagcagcctgcgcagatgtcagaggcgtgctcgatcggctccgggtcaaggcagtgacgaagatccgagagtttatcctccagaagatttattccttcaggaaacccatgaccaactatcagatcccccagacggccctgctgaagtacaggttcttctatcagtttctgctgggcaatgaacgagcaacagcaaaggagatcagggatgaatatgtggagacgctgagcaagatttacctgtcttactaccgctcttacctggggcggctcatgaaggtgcagtatgaggaagtcgctgagaaagatgatctaatgggtgtggaagatacagcaaagaaaggattcttctcaaagccatcgctccgcagcaggaacaccattttcaccctaggaacccgcggctctgtcatctcccccactgaacttgaggcccccatcctggtgcctcacacagcgcagcgcggagagcagaggtatccatttgaggccctcttccgcagccagcactacgccctcctagacaattcctgccgcgaataccttttcatctgtgaattttttgttgtgtctggcccagctgcacacgacctgttccatgctgtcatgggccgtacactcagcatgaccctgaaacacctggattcttatctagctgactgctacgatgccattgctgtttttctctgtatccacattgttctccggttccgtaacattgcagcaaagagggatgttcctgccctggacaggtactgggaacaggtgcttgccttgctatggccacggtttgaactgatcctggagatgaatgttcagagcgtccgaagcactgacccccagcgcctaggggggttggatactcggccccactatatcacacgccgctatgcagagttctcctccgctcttgtcagtatcaaccagacaattcctaatgaacggaccatgcaattgctgggacagctgcaggtggaggtggagaattttgtcctccgagtggcagctgagttctcctcaaggaaggagcagcttgtgtttctgatcaacaactatgacatgatgctgggtgtgctgatggagcgggctgcagatgacagcaaagaggttgagagcttccagcagctgctcaatgctcggacacaggaattcattgaagagttgctgtctcccccttttgggggtttagtggcatttgtgaaggaggctgaggctttgattgagcgtggacaggctgagcgacttcgaggggaagaagcccgggtaactcagctgatccgtggctttggtagttcctggaaatcatcagtggaatctctgagtcaggatgtaatgcggagtttcaccaacttcagaaatggcaccagtatcattcagggagcgctgacccagctgatccagctctatcatcgcttccaccgggtgctgtcccagccgcagctccgagccctccctgcccgggctgagctcatcaacattcaccaccttatggtggagctcaagaagcataagcccaacttctgatgtgccagaaaccgccctgagatctgccggtcatctccatggacttctgcaccccattccatacccttcttcacctggggtaccccttccagttttccccttgcttcccaggcccttgacatggcttacctgccttcactcccagcaccttgcccaacaggataagctggatccccttggccttctgaatatcccagtgtcttcaggtttcccaagaccacttccctgtgggcttccaaaatggcctttatcatttctccagtctgtcaccctcctttcctgctcccatacacccaaggcttgtttcttcccctgtaaaaaccactgcctcaatctctggttcactcaactagtcaccatgtcctgaggcatgaagcctcctcagctcttggaattgctggcaaggggtgactgcctctgagtcattgtgtttttcaaagtgatttcttttctgtagctttttgacctaagatctcagcaatttgaacactaacctctcccctcctggctcaagaattactccgaagtcagtctgcagaaaataaatatttagtatgacatgacacttaaaaaaaaaaaaaaaaaaaaaaaaaaaaaaaaaaaaaaaa

SEQ ID NO: 1714 - protein, 723 aa, Homo sapiens
MAAAATMAAAARELVLRAGTSDMEEEEGPLAGGPGLQEPLQLGELDITSDEFILDEVDVHIQANLEDELVKEALKTGVDLRHYSKQVELELQQIEQKSIRDYIQESENIASLHNQITACDAVLERMEQMLGAFQSDLSSISSEIRTLQEQSGAMNIRLRNRQAVRGKLGELVDGLVVPSALVTAILEAPVTEPRFLEQLQELDAKAAAVREQEARGTAACADVRGVLDRLRVKAVTKIREFILQKIYSFRKPMTNYQIPQTALLKYRFFYQFLLGNERATAKEIRDEYVETLSKIYLSYYRSYLGRLMKVQYEEVAEKDDLMGVEDTAKKGFFSKPSLRSRNTIFTLGTRGSVISPTELEAPILVPHTAQRGEQRYPFEALFRSQHYALLDNSCREYLFICEFFVVSGPAAHDLFHAVMGRTLSMTLKHLDSYLADCYDAIAVFLCIHIVLRFRNIAAKRDVPALDRYWEQVLALLWPRFELILEMNVQSVRSTDPQRLGGLDTRPHYITRRYAEFSSALVSINQTIPNERTMQLLGQLQVEVENFVLRVAAEFSSRKEQLVFLINNYDMMLGVLMERAADDSKEVESFQQLLNARTQEFIEELLSPPFGGLVAFVKEAEALIERGQAERLRGEEARVTQLIRGFGSSWKSSVESLSQDVMRSFTNFRNGTSIIQGALTQLIQLYHRFHRVLSQPQLRALPARAELINIHHLMVELKKHKPNF

SEQ ID NO: 1715 - DNA, 549 bp, Homo sapiens
ctctcttccacaggaggcctacacgccgccgcttgtgctgcagccatgtctctagtgatccctgaaaagttccagcatattttgcgagtactcaacaccaacatcgatgggcggcggaaaatagcctttgccatcactgccattaagggtgtgggccgaagatatgctcatgtggtgttgaggaaagcagacattgacctcaccaagagggcgggagaactcactgaggatgaggtggaacgtgtgatcaccattatgcagaatccacgccagtacaagatcccagactggttcttgaacagacagaaggatgtaaaggatggaaaatacagccaggtcctagccaatggtctggacaacaagctccgtgaagacctggagcgactgaagaagattcgggcccatagagggctgcgtcacttctggggccttcgtgtccgaggccagcacaccaagaccactggccgccgtggccgcaccgtgggtgtgtccaagaagaaataagtctgtaggccttgtctgttaataaatagtttatatacaaaaaaa

SEQ ID NO: 1716 - protein, 152 aa, Homo sapiens [sequence omitted]

SEQ ID NO: 1717 - DNA, 1704 bp, Homo sapiens
gaggcgggggaggggccgtgagtgccgcagtcggccagccatggagcggagcttgctggcggcgaggccgcggcgacaaggtagccacccccgcagcatgcctcgaccgcggtccgcagctgcaccgcctctccccgccccccagggtgcgctggtcccggtcgcgcgctcagacctccgcatcccgggcgtggtcggttaagtccccggccgtgacccaggcccggggagctagtctccgcccttcgctcttacggatcccctcggagtacgccgcaccatgcagctcaggctcttccggcgcctccttctcgccgctttgctgctggtgatcgtctggaccctcttcgggccttcggggttgggggaggagctgctgagcctctcactagcctccctgctcccagcccccgcctcaccggggccgcccctggccctgccccgcctcttgatccccaaccaggaagcttgcagtggtcccggggcccctcccttcctgctcatcctggtgtgcacggctccggagaacctgaaccagagaaacgccattcgggcttcgtggggcgggctgcgcgaggcccgggggctcagggtacagacgctattcttgctgggagagccgaacgcacagcaccccgtgtggggttcccaggggagtgacctggcctcggagtcagcagcccagggggatatcttgcaggccgccttccaggactcctaccgcaacctcaccctaaagaccctcagcgggctgaactgggctgagaaacactgccccatggcccgatacgtcctcaagacggacgatgatgtgtatgtcaacgtccctgaactggtatcagagctggtcttgcgagggggccgttgggggcaatgggagagaagcacggaaccccagagagaggctgagcaggaaggaggccaggttttgcacagcgaggaagtgcctcttctgtacttgggccgggtgcactggcgcgtgaacccctctcggacaccggggggcaggcaccgcgtatcagaggagcagtggcctcacacctggggcccctttccaccctatgcctcaggcacggggtatgtgctgtcagcgtctgctgtgcagctcattctcaaggtggccagccgggcaccccttctcccattagaggatgtctttgtgggggtaagtgcccgacgaggaggcctcgccccaacacagtgtgtcaagctggctggtgccacccactacccgctagaccggtgctgctatgggaaattcctgctgacgtcccacaggctggacccctggaagatgcaggaagcctggaagctggtgggtggctctgacggggaaaggactgcgcccttttgctcctggttccagggagtcctgggcatcctgcggtgtcgagcaatagcctggcttcagagctgagagtgcctggggccacaggaaaggcaggaacaggaccttctctctcccaggcccaacgcaggggccctcactggctgcagctgatctgtttccttataccagatcctcagtctcactaaagacagcgatatgggagacacccaggggcctggcccgccagcccaaaagatggtcatcgggaagagaaaaagaaaaaaatgctgcagttgttctctcaagctagggcagaagaggggtgtcaagctcctcaataaacttgtctccacttcaaaaaaaaaaaaaaaaaa

SEQ ID NO: 1718 - protein, 378 aa, Homo sapiens
MQLRLFRRLLLAALLLVIVWTLFGPSGLGEELLSLSLASLLPAPASPGPPLALPRLLIPNQEACSGPGAPPFLLILVCTAPENLNQRNAIRASWGGLREARGLRVQTLFLLGEPNAQHPVWGSQGSDLASESAAQGDILQAAFQDSYRNLTLKTLSGLNWAEKHCPMARYVLKTDDDVYVNVPELVSELVLRGGRWGQWERSTEPQREAEQEGGQVLHSEEVPLLYLGRVHWRVNPSRTPGGRHRVSEEQWPHTWGPFPPYASGTGYVLSASAVQLILKVASRAPLLPLEDVFVGVSARRGGLAPTQCVKLAGATHYPLDRCCYGKFLLTSHRLDPWKMQEAWKLVGGSDGERTAPFCSWFQGVLGILRCRAIAWLQS

SEQ ID NO: 1719 - DNA, 2065 bp, Homo sapiens
gctgagaagagttttgcacgtggatcgccgttcgggtgggcgagatggagacagcccccaagccgggcaaggatgtcccgcccaagaaagacaaacttcagaccaagagaaagaaaccgcggcgatactgggaggaagagaccgttccgaccacagccggagcctctccagggcctcctcgtaacaagaagaatcgggagctccgtcctcagagaccaaaaaatgcttacatcttaaagaagtctcggatctctaagaagcctcaggtcccgaagaaaccccgagaatggaagaacccggagtcccagcgcggcttgtccggggcccaagatccattcccaggccccgcccccgtccctgtggaagtggtccagaagttctgtcgcattgacaaatcccgaaagctaccacattctaaagccaaaactcgaagccgacttgaggtggctgaagctgaggaagaggaaacaagtatcaaagctgctcgttctgagctgctgcttgctgaagaacctgggtttctggaaggggaggatggggaagacacagcaaagatatgccaggctgacattgtggaggctgtggacattgcaagtgcagccaagcactttgacttgaatctgcggcagtttggaccctacagactaaactactctcgaactggaagacacctggcttttggagggcgccgaggtcatgtggctgcccttgattgggtaacaaagaagcttatgtgcgagatcaacgtcatggaggcggtgcgggacatccggtttctccattctgaggcactgcttgctgttgctcagaaccgctggctccacatctatgacaatcagggcattgagctccactgtatccgccgctgtgaccgagtaacacggcttgagttcctgcccttccacttcctcctggctacagcttcagaaacagggtttctaacctacctggatgtgtcagtggggaagattgtggcagctctgaatgctcgagctgggcggctcgatgttatgagtcagaacccttacaatgccgtcatccatctcggacacagcaatggtactgtgtctttatggagtccagctatgaaggagccactggcaaagattctctgtcatcgtggtggggtccgggctgtggcagtagattctacaggcacgtacatggccacctctggcctagaccaccagctgaagatctttgacttgcgagggacgtaccagcctctgagcactcggaccctgccccatggagcagggcacctggccttctcccagaggggactgctggtggcgggaatgggtgacgttgtcaacatctgggcagggcagggcaaggccagcccaccctcccttgaacagccctacctcacccaccggctctcaggccctgtgcatggccttcagttctgcccctttgaagatgtgctgggggtggggcacactgggggcatcaccagcatgctggtccctggggccggtgagcccaacttcgatggcctggagagtaatccatacagaagccggaagcagcgccaggagtgggaggtgaaggccctgctagagaaggtacctgcagagcttatttgtctggacccacgagccctggccgaggtggatgtcatctccctggagcagggaaagaaggagcagatagagaggctgggctatgacccgcaggctaaggctcccttccagccaaagccaaagcagaagggccgcagctccacggcaagcctggtgaagaggaagaggaaggtcatggatgaggaacacagggacaaggtccggcagagccttcagcagcagcatcataaggaggcgaaggccaagcccacgggggcccggccatctgccctggacagatttgtgcgctgagccagactccagggttgcctgggaacagtctctccccaagatcacctgtagggaaatgagtgttccctggaacaaggaggtgggggcagtgtggccccttccccaactgggggtggacagctgtctcctggggtgggttggtattaaagaggaaagcgattttttggaaaaaaaaaaaaaaaaaaaaa

SEQ ID NO: 1720 - protein, 610 aa, Homo sapiens
METAPKPGKDVPPKKDKLQTKRKKPRRYWEEETVPTTAGASPGPPRNKKNRELRPQRPKNAYILKKSRISKKPQVPKKPREWKNPESQRGLSGAQDPFPGPAPVPVEVVQKFCRIDKSRKLPHSKAKTRSRLEVAEAEEEETSIKAARSELLLAEEPGFLEGEDGEDTAKICQADIVEAVDIASAAKHFDLNLRQFGPYRLNYSRTGRHLAFGGRRGHVAALDWVTKKLMCEINVMEAVRDIRFLHSEALLAVAQNRWLHIYDNQGIELHCIRRCDRVTRLEFLPFHFLLATASETGFLTYLDVSVGKIVAALNARAGRLDVMSQNPYNAVIHLGHSNGTVSLWSPAMKEPLAKILCHRGGVRAVAVDSTGTYMATSGLDHQLKIFDLRGTYQPLSTRTLPHGAGHLAFSQRGLLVAGMGDVVNIWAGQGKASPPSLEQPYLTHRLSGPVHGLQFCPFEDVLGVGHTGGITSMLVPGAGEPNFDGLESNPYRSRKQRQEWEVKALLEKVPAELICLDPRALAEVDVISLEQGKKEQIERLGYDPQAKAPFQPKPKQKGRSSTASLVKRKRKVMDEEHRDKVRQSLQQQHHKEAKAKPTGARPSALDRFVR

SEQ ID NO: 1721 - DNA, 605 bp, Homo sapiens
attactactgaaggaagaacgtgagtaggccagatcagaaaagggagctcaggtaccttccagagagtgagacccagcgcccttgtctcgcacccagtaggctttcatccccgccatggcggagctgatccagaagaagctacagggagaagtggagaaatatcaacagctacagaaggacttaagtaaatccatgtcggggaggcagaaacttgaagcacaactaacagaaaataatatcgtgaaagaggaactggccctgctggatgggtccaacgtggtctttaaacttctgggtccggtgctagtcaaacaggagctgggggaggctcgggccacagtagggaagaggctggactatatcacagctgaaattaagcgatacgaatcccagcttcgggatcttgagcggcagtcagagcaacagagggagacccttgctcagctgcagcaggagttccagcgggcccaggcagcaaaggcaggggctcctggcaaggcctgaccccatggtggggggaggggaggggaggggagggaatgaggcagctctaggatctatactgtagctaataaaatgtaaaaacacctggcaaaaaaaaaaa

SEQ ID NO: 1722 - protein, 129 aa, Homo sapiens
MAELIQKKLQGEVEKYQQLQKDLSKSMSGRQKLEAQLTENNIVKEELALLDGSNVVFKLLGPVLVKQELGEARATVGKRLDYITAEIKRYESQLRDLERQSEQQRETLAQLQQEFQRAQAAKAGAPGKA

SEQ ID NO: 1723 - DNA, 2918 bp, Homo sapiens
acggaaaagccggggaggggactcggtccggggccggagaccgacggcaacagcggctcaggacccacgctgcccccacccctcccgagcaggcgcccccatggcccgaccccgctgattccttcactcggccatgctcccgcggcccctgcggctgcttttggacacgagcccccccgggggagtcgtactgagcagcttccgaagccgggaccccgaagagggtgggggcccaggtggcctggtcgtgggcggggggcaggaggaagaggaggaggaagaagaagaggcccctgtgtccgtctgggatgaggaggaggatggtgccgtgtttaccgtcacaagccgccaatatcgacctcttgatcccttggtccctatgcctcccccacgttcctcccgacggctccgagctggcactctggaggccctggtcagacacctactggatacccggacatcagggactgatgtgagcttcatgtcagccttcctggctacccaccgggccttcacctccacgcctgccttgctagggcttatggctgacaggctggaagcccttgaatctcatcctaccgacgaactagagaggacaacagaggtagccatctctgtactgtcaacctggctggcctctcaccctgaggattttggctctgaggccaagggtcagcttgaccggcttgagagcttcttacttcagacagggtatgcagcagggaagggtgttggggggggcagcgctgacctcatccgcaatctccggtcccgggtggacccccaggcccccgaccttcctaagcccctggccctccccggcgatccccctgctgaccccacggatgtcctggtgttcctcgctgaccacttggccgaacagctgaccctgctagatgcggaactttttctcaatttgatcccctctcagtgcctgggaggcctgtggggtcacagagaccggccaggacattctcacctctgcccatctgtccgagctactgtcacacagtttaacaaggtggcaggggcagtggttagttctgtcctgggggctacttccactggagagggacctggggaggtgaccatacggccactccgtcccccacagagggcccggctcctggagaagtggatccgcgtggcagaggagtgccggctgctccgaaacttctcttcagtttatgccgtggtgtcagccctgcagtccagccccatccacaggcttcgggcagcctggggggaagcaaccagggacagcctcagagtcttttccagcctctgccagattttctccgaggaggataattattcccagagtcgggagctgctcgtgcaggaggtgaagctgcagtctcctctggagccacactccaagaaggccccgaggtctggctcccggggtgggggtgtggtcccataccttggcaccttcctgaaggaccttgtgatgctggatgcagcctccaaggatgagttggagaatggatacatcaattttgacaagcggaggaaggagtttgcagtcctttctgagttgcgacggctccagaatgaatgtcgtggctataacctccaacctgaccatgatatccagaggtggctacaggggctccggccactgacagaggctcagagccatcgtgtatcctgtgaggtggagccacctggttccagtgaccctcctgccccacgggtgcttcggccaacattggtcatctcgcagtggacagaggttttgggctctgttggggtccctaccccgcttgtgtcctgtgaccggcccagtactgggggagatgaggcgcctacaactcctgctcctctgctgactcggctggcccagcacatgaagtggccatctgtctcgtcactagactctgccttggaaagcagtccatccctgcacagtccagctgaccccagccacctctccccaccagcctcctcccctaggccttctcgaggtcaccgccgctcagcctcctgtggctccccgctgagtgggggtgcagaagaggcctccggggggactggatatgggggagagggatctgggccaggggcctctgattgccgtatcatccgagtccagatggagttgggggaagatggcagtgtctataagagcattttggtgacaagccaggacaaggctccaagtgtcatcagtcgtgtccttaagaaaaacaatcgtgactctgcagtggcttcagagtatgagctggtacagctgctaccaggggagcgagagctgactatcccagcctcggctaatgtattctacgccatggatggagcttcacacgatttcctcctgcggcagcggcgaaggtcctctactgctacacctggcgtcaccagtggcccgtctgcctcaggaactcctccgagtgagggaggagggggctcctttcccaggatcaaggccacagggaggaagattgcacgggcactgttctgaggaggaagccccgttggcttacagaagtcatggtgttcataccagatgtgggtagccatcctgaatggtggcaattatatcacattgagacagaaattcagaaagggagccagccaccctggggcagtgaagtgccactggtttaccagacagctgagaaatccagccctgtgggaactggtgtcttataaccaagttggatacctgtgtatagcttcccaccttccatgagtgcagcacacaggtagtgctggaaaaacgcatcagtttctgattcttggccatatcctaacatgcaagggccaagcaaaggcttcaaggctctgagccccagggcagaggggaatggcaaaatgtaggtcctcgcaggagctcttcttcccactctgggggtttctatcactgtgacaacactaagataataaaccaaaacactacctgaaaaaaaaaa

SEQ ID NO: 1724 - protein, 777 aa, Homo sapiens
MLPRPLRLLLDTSPPGGVVLSSFRSRDPEEGGGPGGLVVGGGQEEEEEEEEEAPVSVWDEEEDGAVFTVTSRQYRPLDPLVPMPPPRSSRRLRAGTLEALVRHLLDTRTSGTDVSFMSAFLATHRAFTSTPALLGLMADRLEALESHPTDELERTTEVAISVLSTWLASHPEDFGSEAKGQLDRLESFLLQTGYAAGKGVGGGSADLIRNLRSRVDPQAPDLPKPLALPGDPPADPTDVLVFLADHLAEQLTLLDAELFLNLIPSQCLGGLWGHRDRPGHSHLCPSVRATVTQFNKVAGAVVSSVLGATSTGEGPGEVTIRPLRPPQRARLLEKWIRVAEECRLLRNFSSVYAVVSALQSSPIHRLRAAWGEATRDSLRVFSSLCQIFSEEDNYSQSRELLVQEVKLQSPLEPHSKKAPRSGSRGGGVVPYLGTFLKDLVMLDAASKDELENGYINFDKRRKEFAVLSELRRLQNECRGYNLQPDHDIQRWLQGLRPLTEAQSHRVSCEVEPPGSSDPPAPRVLRPTLVISQWTEVLGSVGVPTPLVSCDRPSTGGDEAPTTPAPLLTRLAQHMKWPSVSSLDSALESSPSLHSPADPSHLSPPASSPRPSRGHRRSASCGSPLSGGAEEASGGTGYGGEGSGPGASDCRIIRVQMELGEDGSVYKSILVTSQDKAPSVISRVLKKNNRDSAVASEYELVQLLPGERELTIPASANVFYAMDGASHDFLLRQRRRSSTATPGVTSGPSASGTPPSEGGGGSFPRIKATGRKIARALF

SEQ ID NO: 1725 - DNA, 3629 bp, Homo sapiens
ctggagaggatctacccgggtccctgcctggccagtggggaaacaccggtcccccaggcaccttcacctaaccagagcggggatttccaccgcccctcatgccgccctttggaggaaagtgaaagtgaaaggaggaagaggaggcttcatggctgaggaggtcgcagcgccatgaagtccctgtctctgctcctcgctgtggctttgggcctggcgaccgccgtctcagcaggacccgcggtgatcgagtgttggttcgtggaggatgcgagcggaaagggcctggccaagagacccggtgcactgctgttgcgccagggaccgggggaaccgccgccccggccggacctcgaccctgagctctatctcagtgtacacgaccccgcgggcgccctccaggctgccttcaggcggtatccccggggcgcccccgcaccacactgcgagatgagccgcttcgtgcctctccccgcctctgcgaaatgggccagcggcctgacccccgcgcagaactgcccgcgggccctggatggggcttggctgatggtcagcatatccagcccagtcctcagcctctccagcctcttgcgaccacagccagagcctcagcaggagcctgttctcatcaccatggcaacagtggtactgactgtcctcacccacacccctgcccctcgagtgagactgggacaagatgctctgctggacttgagctttgcctacatgccccccacctccgaggccgcctcatctctggctccgggtccccctccctttgggctagagtggcgacgccagcacctgggtaagggacatctgctcctggctgcaactcctgggctgaatggccagatgccagcagcccaagaaggggccgtggcatttgctgcttgggatgatgatgagccatggggcccatggaccggaaatgggaccttctggctgcctacagttcaaccctttcaggagggcacctatctggccaccatacacctgccatacctgcaaggacaggtcaccctggagcttgctgtgtacaaaccccccaaagtgtccctgatgccagcaacccttgcacgggccgccccaggggaggcacccccggaattgctctgccttgtgtcccacttctacccttctgggggcctggaggtggagtgggaactccggggtggcccagggggccgctctcagaaggccgaggggcagaggtggctctcggccctgcgccaccattccgatggctctgtcagcctctctgggcacttgcagccgcccccagtcaccactgagcagcatggggcacgctatgcctgtcgaattcaccatcccagcctgcctgcctcggggcgcagcgctgaggtcaccctggaggtagcaggtctttcagggccctcccttgaggacagcgtaggccttttcctgtctgcctttcttctgcttgggctcttcaaggcactgggctgggctgctgtctacctgtccacctgcaaggattcaaagaagaaagcagagtgagggcactcactgccatcctgtggaagccaccatcatctctggcccaagcttctgtagtagctccctaaaataataccctatcatctgctcctaatccctccaatctctctccactgagtggctggaatgcttttttttttttctttcacttatataagggataatttttcttttttttttttttttgagacggagtctcactcttccgcccaggctgcagtgcagtggcatgatcttggcttactgcaacctccgcctcctgggttcaagcaattctgtggcttcagcctccggagtagctgggattacaggcacatgccaccacacccagtgaatttttgtatttttagtagagacggggtttcaccatgttggccaggctggtcttgaattcctgacctcaggtgatctgcccacctcagcctcccaaagtgctgggattacaggcgtgagccaccacaccaggcccgagaaatgcttttttaaaaaacacacatcttatggcattcaccttcttggagctctaggacagtggttctcaaaatttttttctctcaggacctcttaaaaatcatcaaggaccccaaaaagcttttgggtatgtgggttatagctatcaatatttatggtactagaacttaaaagtgagaaaaatttaaaacacgagaatacataggcacacattctattcatcgtgggaaccatggtgtcaatacatatcatgtagcttctgaaaaactccactgtacacttatagaatgaagaaggcaaaaaacttttttttttttttttttgagacggagtctcgctctgtcgcccaggctggagtgcagtggcgcgatctcggctcactgcaagctccgcctctcgggttcacgccattctcctgcctcagcctcccaagtagctcggactacaggcgtcctccaccatgcctggctaatattttgtattttttagtagagacggggtttcaccgtgttagccaggatggtctcgatctcctaacctggtgatccgcccgcctcggcctcccaaagtattgggattacccgcgtgagccaccgcgcccggctgcaaataatctttctttttttctgagacagagtctcgctctgttgcccaggctggagtgcagtggcacgatctcggctcacggcacgctccgcctcccgggttcacgccattctcctgcctcagcttcccgagtagctgggactacaggggcccgccaccacgcccggctaactttttgtgtttttagtagagacggggtttcaccgtgttagccaggatggtctcgatctcctgaccttgtgatctgcccgcctcggcctcccaaagtgctgggattacaggcgtgagccaccgcgcccggcggcgaaacacgatattgtactaacatcttaattttgttataaaatctcacaaaccccctgacatagtctcagagatctgtagggccgaggttacatttggagaacccgtactctagggccaaatccattcttcttgccctggctcacttgtcccccccaccgccccgcgctggagccactgcctagttcttcagccctagatggtgctcgccagacctcctctcaatgctcatcacacacagggctattcctttcctccaatgaaccaaacgcctcccgcccacctccaggtcccagtcctctgttccctttgcctggtccacccttgccctccctgggtcgcagacgaggtcggcctcgtcattccccgcagaccgccgcgcgtccctcttgtgcggttcaccacagttgtatttaagtgatcgtgtgagtcgtcgttaaatgcctgtctccccgcggatcatgggctcctcgaggacagggactggcctgtctgtccactgctgtaaccccgcgccggcatagggacctaaggcccactggagggcgctcatcaagtagctgctggatgttgacgaaggaagcggcggcgcagctcagggatctccgagtcaggacggtcggccagacccacggggtaacgggtctaatcgtgtaggaataaagctgtattccagtgcttccaaaaaaaaaaaaaaaaaaaaaaaaaaaaaaaaaaaaaaaaaaaaaaaa

SEQ ID NO: 1726 - protein, 448 aa, Homo sapiens
MKSLSLLLAVALGLATAVSAGPAVIECWFVEDASGKGLAKRPGALLLRQGPGEPPPRPDLDPELYLSVHDPAGALQAAFRRYPRGAPAPHCEMSRFVPLPASAKWASGLTPAQNCPRALDGAWLMVSISSPVLSLSSLLRPQPEPQQEPVLITMATVVLTVLTHTPAPRVRLGQDALLDLSFAYMPPTSEAASSLAPGPPPFGLEWRRQHLGKGHLLLAATPGLNGQMPAAQEGAVAFAAWDDDEPWGPWTGNGTFWLPTVQPFQEGTYLATIHLPYLQGQVTLELAVYKPPKVSLMPATLARAAPGEAPPELLCLVSHFYPSGGLEVEWELRGGPGGRSQKAEGQRWLSALRHHSDGSVSLSGHLQPPPVTTEQHGARYACRIHHPSLPASGRSAEVTLEVAGLSGPSLEDSVGLFLSAFLLLGLFKALGWAAVYLSTCKDSKKKAE

SEQ ID NO: 1727 - DNA, 2404 bp, Homo sapiens
ctggagaggatctacccgggtccctgcctggccagtggggaaacaccggtcccccaggcaccttcacctaaccagagcggggatttccaccgcccctcatgccgccctttggaggaaagtgaaagtgaaaggaggaagaggaggcttcatggctgaggaggtcgcagcgccatgaagtccctgtctctgctcctcgctgtggctttgggcctggcgaccgccgtctcagcaggacccgcggtgatcgagtgttggttcgtggaggatgcgagcggaaagggcctggccaagagacccggtgcactgctgttgcgccagggaccgggggaaccgccgccccggccggacctcgaccctgagctctatctcagtgtacacgaccccgcgggcgccctccaggctgccttcaggcggtatccccggggcgcccccgcaccacactgcgagatgagccgcttcgtgcctctccccgcctctgcgaaatgggccagcggcctgacccccgcgcagaactgcccgcgggccctggatggggcttggctgatggtcagcatatccagcccagtcctcagcctctccagcctcttgcgaccacagccagagcctcagcaggagcctgttctcatcaccatggcaacagtggtactgactgtcctcacccacacccctgcccctcgagtgagactgggacaagatgctctgctggacttgagctttgcctacatgccccccacctccgaggccgcctcatctctggctccgggtccccctccctttgggctagagtggcgacgccagcacctgggtaagggacatctgctcctggctgcaactcctgggctgaatggccagatgccagcagcccaagaaggggccgtggcatttgctgcttgggatgatgatgagccatggggcccatggaccggaaatgggaccttctggctgcctacagttcaaccctttcaggagggcacctatctggccaccatacacctgccatacctgcaaggacaggtcaccctggagcttgctgtgtacagtgagttgggggacagaggtctccaggggtagagggtgggcactggattgtggggaccgtaatagggggagggatgatggataagagggtgcctgggcaagtaagtagagatagaaagaggttcctgggagttagaggggtaatgggaggctagaagtttcctggaaatttgaggggctttgacatgggtatttctgtgacgcaccaatggagagacagtgggttccctatttcaggagaagaaacctaaccttctttagttctgaggaagccagcaggcaaactgagggtctcttagggaggacagtatggactgatttccctatgctcatttcgtcctctttccccagaaccccccaaagtgtccctgatgccagcaacccttgcacgggccgccccaggggaggcacccccggaattgctctgccttgtgtcccacttctacccttctgggggcctggaggtggagtgggaactccggggtggcccagggggccgctctcagaaggccgaggggcagaggtggctctcggccctgcgccaccattccgatggctctgtcagcctctctgggcacttgcagccgcccccagtcaccactgagcagcatggggcacgctatgcctgtcgaattcaccatcccagcctgcctgcctcggggcgcagcgctgaggtcaccctggaggtagcaggtaagagctgggagctctgcggaatctgagccagcacccaggaagacaggagctcactctcaccccttctgcctgccaggtctttcagggccctcccttgaggacagcgtaggccttttcctgtctgcctttcttctgcttgggctcttcaaggcactgggctgggctggtaagtgtcagccctaccctgaccatgacctgaggttggtggactttccccacctactcccaagagcctgacacccatccctctgccctccacctctaccactccagcatcccatcccttctcaatctttccccacagctgtctacctgtccacctgcaaggattcaaagaaggtacagtgctccacctctctgtatctttcccttgtcactttatctcctcatcctatctcaaaacccatggagggaggctgctggtgtggtaggcagaacctaggcttggaattcacactgatctgggttaaaacctggcactatatcctaactgtaggactctttgagcatgctacttaatctatatgtttccttgggtgtagggattttaaaaagttacttaggcagtgctgtccaatagaaagataatgcaagccacatatgtaaatttaaatactctagtactcacattaaaaaaataagcagaaacaggtaaaaaaaaaaaaaaaaa

SEQ ID NO: 1728 - protein, 299 aa, Homo sapiens
MKSLSLLLAVALGLATAVSAGPAVIECWFVEDASGKGLAKRPGALLLRQGPGEPPPRPDLDPELYLSVHDPAGALQAAFRRYPRGAPAPHCEMSRFVPLPASAKWASGLTPAQNCPRALDGAWLMVSISSPVLSLSSLLRPQPEPQQEPVLITMATVVLTVLTHTPAPRVRLGQDALLDLSFAYMPPTSEAASSLAPGPPPFGLEWRRQHLGKGHLLLAATPGLNGQMPAAQEGAVAFAAWDDDEPWGPWTGNGTFWLPTVQPFQEGTYLATIHLPYLQGQVTLELAVYSELGDRGLQG

SEQ ID NO: 1729 - DNA, 1410 bp, Homo sapiens
ctggagaggatctacccgggtccctgcctggccagtggggaaacaccggtcccccaggcaccttcacctaaccagagcggggatttccaccgcccctcatgccgccctttggaggaaagtgaaagtgaaaggaggaagaggaggcttcatggctgaggaggtcgcagcgccatgaagtccctgtctctgctcctcgctgtggctttgggcctggcgaccgccgtctcagcaggacccgcggtgatcgagtgttggttcgtggaggatgcgagcggaaagggcctggccaagagacccggtgcactgctgttgcgccagggaccgggggaaccgccgccccggccggacctcgaccctgagctctatctcagtgtacacgaccccgcgggcgccctccaggctgccttcaggcggtatccccggggcgcccccgcaccacactgcgagatgagccgcttcgtgcctctccccgcctctgcgaaatgggccagcggcctgacccccgcgcagaactgcccgcgggccctggatggggcttggctgatggtcagcatatccagcccagtcctcagcctctccagcctcttgcgaccacagccagagcctcagcaggagcctgttctcatcaccatggcaacagtggtactgactgtcctcacccacacccctgcccctcgagtgagactgggacaagatgctctgctggacttgagctttgcctacatgccccccacctccgaggccgcctcatctctggctccgggtccccctccctttgggctagagtggcgacgccagcacctgggtaagggacatctgctcctggctgcaactcctgggctgaatggccagatgccagcagcccaagaaggggccgtggcatttgctgcttgggatgatgatgagccatggggcccatggaccggaaatgggaccttctggctgcctacagttcaaccctttcaggagggcacctatctggccaccatacacctgccatacctgcaaggacaggtcaccctggagcttgctgtgtacaaaccccccaaagtgtccctgatgccagcaacccttgcacgggccgccccaggggaggcacccccggaattgctctgccttgtgtcccacttctacccttctgggggcctggaggtggagtgggaactccggggtggcccagggggccgctctcagaaggccgaggggcagaggtggctctcggccctgcgccaccattccgatggctctgtcagcctctctgggcacttgcagccgcccccagtcaccactgagcagcatggggcacgctatgcctgtcgaattcaccatcccagcctgcctgcctcggggcgcagcgctgaggtcaccctggaggtagcaggtaagagctgggagctctgcggaatctga

SEQ ID NO: 1730 - protein, 412 aa, Homo sapiens
MKSLSLLLAVALGLATAVSAGPAVIECWFVEDASGKGLAKRPGALLLRQGPGEPPPRPDLDPELYLSVHDPAGALQAAFRRYPRGAPAPHCEMSRFVPLPASAKWASGLTPAQNCPRALDGAWLMVSISSPVLSLSSLLRPQPEPQQEPVLITMATVVLTVLTHTPAPRVRLGQDALLDLSFAYMPPTSEAASSLAPGPPPFGLEWRRQHLGKGHLLLAATPGLNGQMPAAQEGAVAFAAWDDDEPWGPWTGNGTFWLPTVQPFQEGTYLATIHLPYLQGQVTLELAVYKPPKVSLMPATLARAAPGEAPPELLCLVSHFYPSGGLEVEWELRGGPGGRSQKAEGQRWLSALRHHSDGSVSLSGHLQPPPVTTEQHGARYACRIHHPSLPASGRSAEVTLEVAGKSWELCGI

SEQ ID NO: 1731 - DNA, 2647 bp, Homo sapiens
ggggcccaggttgctgctctggccgccgagtgaggggcggggggggcccgggggcgcgcggcccgagacccccccggccgccctcctcctttctttgttcctgtggctgggggggtatcccctccctccacaacatggagccatctcctctgtctcccagtggggcagcacttcccctgccgctgtcgctggctccgcccccactacccctgccagcagctgcagtggtacatgtgtccttccctgaggtgaccagtgccctcttggagtccctcaatcagcagcgtctgcagggccagctctgcgatgtatctatcagagtgcagggccgggagttccgggctcatcgggctgtcctggctgcctcctccccttacttccatgatcaggtcctactcaaaggcatgacctccatctcgctgcccagtgtcatggacccaggcgcctttgagactgtcctagcctccgcttacactggccgcctcagcatggctgctgctgacattgtcaacttccttacagtggggtctgtgctccaaatgtggcacattgtggacaagtgcactgaactactccgagaaggccgggcctcagctaccaccaccatcactactgctgcagccacctctgtcactgtccctggtgctggggtgccatccgggagtgggggcactgtggcccctgctaccatgggctctgcgcgctcccatgcctccagccgggccagtgagaatcaatctcccagcagcagcaactacttcagccccagggagtccactgatttctcatcttcctcccaagaggcatttgcagcttctgcagtgggcagtggggagcgtcgaggaggtggccctgtattcccagcccctgtcgttggcagtggaggggccacatctggaaagctgctgctggaggcagatgagctgtgcgatgatggtggggatgggaggggggcagtggttcctggggctgggctccggagacccacctacacaccccctagcatcatgccacagaaacactgggtatacgtgaagcgaggtggtaattgcccagcgccagcacccctggttccccaagacccagatctggaggaggaagaggaggaggaagatctggtgttgacctgtgaggatgatgaagatgaagaactagggggtagctccagggttccagtggggggagggcctgaggctaccctcagcataagtgatgtccgtaccctgagtgagcccccagacaagggggaggagcaggtcaacttctgtgagtcctccaatgactttggcccatatgagggtgggggtcctgtggcaggtcttgatgactcaggggggccaactccctcttcctatgccccctcccaccctcctcgaccgctccttcccttggacatgcagggcaaccagatcctggtcttcccgtcgtcgtcttcatcctcatcctcacaggctcctggccaaccaccagggaaccaagcagaacacggggcagtgaccgtggggggcacgtcggtggggagcctgggtgtgccgggtagcgttggtggggtccctggagggactggcagtggggacgggaataagatctttctgtgccattgtgggaaggccttctcccacaagagcatgcgggaccggcacgtgaacatgcacctcaatctgcggccgtttgactgccccgtgtgcaacaaaaagttcaagatgaagcaccatctgactgagcacatgaagacgcacacaggtctcaagccctacgagtgcggagtctgcgccaagaagttcatgtggcgagacagcttcatgcgccaccgaggacactgtgagcgccggcaccgcctgggcggggtcggggccgtacctgggcctgggactcccacggggccatccttgccgtccaagagagagtctcccggagtgggcgggggcagcggcgacgaagcgagtgcggccacgcccccgtccagcagacgtgtctggtccccacccagagtccacaaggtggagatgggcttcggtggaggtggaggagcaaactgaaggggcaggctactggggtggggtagctttcgggaaagggaataaggagcacgatgcaagggcgctgtggcccccgggtgatctcccaccacacttactgtcttcctttatctctgtggacttgtatatattctggaaggggaaccacagtttcaccatcacccgcccattctactactcaacccctcccccccaaggtatttccagaactaaacccttcctttccctctgatgggtacactgaagcccctgctccacagagtagattgcacatggagggagggagagggggcgtgttgaacatcctgcagtcacagggtcaggggtcaggtggttgtagtctgtgcctgaagtctgtgtttgtgttgtcgtggagacaaggcctttgagccccacccttgtcctagaacctaccccctctcaaggatgcgctctttatttctaccctgtctctccccgccacccccgacttcccgtggaaattcccaactcggttctcatggaggagtgggtggagacaaggagggagtaagtcgtaggagtacaaggtttttattttttttaacagtgattaaaatatttattggtcatttaaaaaaaaaaaaaaa

SEQ ID NO: 1732 - protein, 634 aa, Homo sapiens
MEPSPLSPSGAALPLPLSLAPPPLPLPAAAVVHVSFPEVTSALLESLNQQRLQGQLCDVSIRVQGREFRAHRAVLAASSPYFHDQVLLKGMTSISLPSVMDPGAFETVLASAYTGRLSMAAADIVNFLTVGSVLQMWHIVDKCTELLREGRASATTTITTAAATSVTVPGAGVPSGSGGTVAPATMGSARSHASSRASENQSPSSSNYFSPRESTDFSSSSQEAFAASAVGSGERRGGGPVFPAPVVGSGGATSGKLLLEADELCDDGGDGRGAVVPGAGLRRPTYTPPSIMPQKHWVYVKRGGNCPAPAPLVPQDPDLEEEEEEEDLVLTCEDDEDEELGGSSRVPVGGGPEATLSISDVRTLSEPPDKGEEQVNFCESSNDFGPYEGGGPVAGLDDSGGPTPSSYAPSHPPRPLLPLDMQGNQILVFPSSSSSSSSQAPGQPPGNQAEHGAVTVGGTSVGSLGVPGSVGGVPGGTGSGDGNKIFLCHCGKAFSHKSMRDRHVNMHLNLRPFDCPVCNKKFKMKHHLTEHMKTHTGLKPYECGVCAKKFMWRDSFMRHRGHCERRHRLGGVGAVPGPGTPTGPSLPSKRESPGVGGGSGDEASAATPPSSRRVWSPPRVHKVEMGFGGGGGAN

SEQ ID NO: 1733 - DNA, 2477 bp, Homo sapiens
ggcggagggaaccatgcgaggttctgagaattgcggcgagggtcgcctcgagagacggtttctgaggaattctgaaatccccaccacttcctccctccgggggatttgatcccctatggccaccgctaacagcatcatcgtgctggatgatgatgacgaagatgaagcagctgctcagccagggccctcccacccactccccaatgcggcctcacctggggcagaagcccctagctcctctgagcctcatggggccagaggaagcagtagttcgggcggcaagaaatgctacaagctggagaatgagaagctgttcgaagagttccttgaactttgtaagatgcagacagcagaccaccctgaggtggtcccattcctctataaccggcagcaacgtgcccactctctgtttttggcctcggcggagttctgcaacatcctctctagggtcctgtctcgggcccggagccggccagccaagctctatgtctacatcaatgagctctgcactgttctcaaggcccactcagccaaaaagaagctgaacttggcccctgccgccaccacctccaatgagccctctgggaataaccctcccacacacctctccttggaccccacaaatgctgaaaacactgcctctcagtctccaaggacccgtggttcccggcggcagatccagcgtttggagcagctgctggcgctctatgtggcagagatccggcggctgcaggaaaaggagttggatctctcagaattggatgacccagactccgcatacctgcaggaggcacggttgaagcgtaagctgatccgcctctttgggcgactatgtgagctgaaagactgctcttcactgaccggccgtgtcatagagcagcgcatcccctaccgtggcacccgctacccagaggttaacaggcgcattgagcggctcatcaacaagccagggcctgataccttccctgactatggggatgtgcttcgggctgtagagaaggcagctgcccgacacagccttggcctcccccgacagcagctccagctcatggctcaggatgccttccgagatgtgggcatcaggttacaggagcgacgtcacctcgatctcatctacaactttggctgccacctcacagatgactataggccaggcgttgaccctgcactatcagatcctgtgttggcccggcgccttcgggaaaaccggagtttggccatgagtcggctggatgaggtcatctccaaatatgcaatgttgcaagacaaaagtgaggagggcgagagaaaaaagagaagagctcggctccaaggcacctcttcccactctgcagacacccccgaagcctccttggattctggtgagggccctagtggaatggcatcccaggggtgcccttctgcctccagagctgagacagatgacgaagacgatgaggagagtgatgaggaagaggaggaggaggaggaagaagaagaggaggaggccacagattctgaagaggaggaggatctggaacagatgcaggagggtcaggaggatgatgaagaggaggacgaagaggaagaagcagcagcaggtaaagatggagacaagagccccatgtcctcactacagatctccaatgaaaagaacctggaacctggcaaacagatcagcagatcttcaggggagcagcaaaacaaaggacgcatagtgtcaccatcgttactgtcagaagaacccctggccccctccagcatagatgctgaaagcaatggagaacagcctgaggagctgaccctggaggaagaaagccctgtgtctcagctctttgagctagagattgaagctttgcccctggataccccttcctctgtggagacggacatttcctcttccaggaagcaatcagaggagcccttcaccactgtcttagagaatggagcaggcatggtctcttctacttccttcaatggaggcgtctctcctcacaactggggagattctggtcccccctgcaaaaaatctcggaaggagaagaagcaaacaggatcagggccattaggaaacagctatgtggaaaggcaaaggtcagtgcatgagaagaatgggaaaaagatatgtaccctgcccagcccaccttcccccttggcttccttggccccagttgctgattcctccacgagggtggactctcccagccatggcctggtgaccagctccctctgcatcccttctccagcccggctgtcccaaaccccccattcacagcctcctcggcctggtacttgcaagacaagtgtggccacacaatgcgatccagaagagatcatcgtgctctcagactctgattagctgcctccccttctccctgcctccagaatgttctgggataacatttggaggaaggtgggaagcagatgactgaggaagggatggactaagctaatccccttttggtggtgtttctttaaaaaaaaaaaaaaaaaaaaaa

SEQ ID NO: 1734 - protein, 740 aa, Homo sapiens
MATANSIIVLDDDDEDEAAAQPGPSHPLPNAASPGAEAPSSSEPHGARGSSSSGGKKCYKLENEKLFEEFLELCKMQTADHPEVVPFLYNRQQRAHSLFLASAEFCNILSRVLSRARSRPAKLYVYINELCTVLKAHSAKKKLNLAPAATTSNEPSGNNPPTHLSLDPTNAENTASQSPRTRGSRRQIQRLEQLLALYVAEIRRLQEKELDLSELDDPDSAYLQEARLKRKLIRLFGRLCELKDCSSLTGRVIEQRIPYRGTRYPEVNRRIERLINKPGPDTFPDYGDVLRAVEKAAARHSLGLPRQQLQLMAQDAFRDVGIRLQERRHLDLIYNFGCHLTDDYRPGVDPALSDPVLARRLRENRSLAMSRLDEVISKYAMLQDKSEEGERKKRRARLQGTSSHSADTPEASLDSGEGPSGMASQGCPSASRAETDDEDDEESDEEEEEEEEEEEEEATDSEEEEDLEQMQEGQEDDEEEDEEEEAAAGKDGDKSPMSSLQISNEKNLEPGKQISRSSGEQQNKGRIVSPSLLSEEPLAPSSIDAESNGEQPEELTLEEESPVSQLFELEIEALPLDTPSSVETDISSSRKQSEEPFTTVLENGAGMVSSTSFNGGVSPHNWGDSGPPCKKSRKEKKQTGSGPLGNSYVERQRSVHEKNGKKICTLPSPPSPLASLAPVADSSTRVDSPSHGLVTSSLCIPSPARLSQTPHSQPPRPGTCKTSVATQCDPEEIIVLSDSD

SEQ ID NO: 1735 - DNA, 570 bp, Homo sapiens
atgcatctggcagcccacttctggtgtttggcgctggaattaaacaaccaccatgtggagcaaaaaggcaagaccaagaccaccaaaaagctccctcagcgcacaacatccaacgtgtttgccatgtttgaccagtcacagattcaggagttcaaagaggccttcaacatgattgatcagaacagagatggtttcatcaacaaagaagatttgcatgatatgcttgtttccctagggaagaatcccaccgatgcataccttgatgccataatgaatgaggcaccagggcccatcgatttcaccatgttcctcaccatatttggtgagaagttaaatggcacagatcctgaagatgtcattggaaatgcttttgcttgctttgatgaagaagcaacaggcattattcaggaagattacctgagagagctgctgataaccatgtgggatcggtttacggatgaggaagtggatgagctgtacagagaagcgcctattaacaaaaaggggaatttcaattacatcgagttcacatgcatcctgaaacatggagcaaaagacaaagacgactga

SEQ ID NO: 1736 - protein, 189 aa, Homo sapiens
MHLAAHFWCLALELNNHHVEQKGKTKTTKKLPQRTTSNVFAMFDQSQIQEFKEAFNMIDQNRDGFINKEDLHDMLVSLGKNPTDAYLDAIMNEAPGPIDFTMFLTIFGEKLNGTDPEDVIGNAFACFDEEATGIIQEDYLRELLITMWDRFTDEEVDELYREAPINKKGNFNYIEFTCILKHGAKDKDD

SEQ ID NO: 1737 - DNA, 2391 bp, Homo sapiens
tcaaaagtggcgggtgtggcgcggggctggtagcggccggagccgtgcgagttctctaccctgcttcgcgagcgggcgagagaacgcgagtcccaggatccccggcacccagttctcttccactgcattcccccggcgcgtgtgggaccgaggtggacatggatccgcagaggtcccccctattggaagtaaaggggaacatagaactgaagagacctctgattaaggccccttcccagctgcctctctcaggaagcagactcaagaggaggcctgaccagatggaagatggcctggagcctgagaagaaacggacaagaggcctgggtgcaacgaccaaaattaccacatcccacccaagagttccatccctcactacagtgccacagacacaaggccagaccacagctcaaaaagtttccaagaagacaggaccccggtgttccacagctattgccacagggttgaagaaccagaagccagttcctgctgttcctgtccagaagtctggcacatcaggtgttcctcccatggcaggagggaagaaacccagcaaacgtccagcctgggacttaaagggtcagttatgtgacctaaatgcagaactaaaacggtgccgtgagaggactcaaacgttggaccaagagaaccagcagcttcaggaccagctcagagatgcccagcagcaggtcaaggccctggggacagagcgcacaacactggaggggcatttagccaaggtacaggcccaggctgagcagggccaacaggagctgaagaacttgcgtgcttgtgtcctggagctggaagagcggctgagcacgcaggagggcttggtgcaagagcttcagaaaaaacaggtggaattgcaggaagaacggaggggactgatgtcccaactagaggagaaggagaggaggctgcagacatcagaagcagccctgtcaagcagccaagcagaggtggcatctctgcggcaggagactgtggcccaggcagccttactgactgagcgggaagaacgtcttcatgggctagaaatggagcgccggcgactgcacaaccagctgcaggaactcaagggcaacatccgtgtattctgccgggtccgccctgtcctgccgggggagcccactccaccccctggcctcctcctgtttccctctggccctggtgggccctctgatcctccaacccgccttagcctctcccggtctgacgagcggcgtgggaccctgagtggggcaccagctcccccacctcgccatgatttttcctttgaccgggtattcccaccaggaagtggacaggatgaagtgtttgaagagattgccatgcttgtccagtcagccctggatggctatccagtatgcatctttgcctatggccagacaggcagtggcaagaccttcacaatggagggtgggcctgggggagacccccagttggaggggctgatccctcgggccctgcggcacctcttctctgtggctcaggagctgagtggtcagggctggacctacagctttgtagcaagctacgtagagatctacaatgagactgtccgggacctgctggccactggaacccggaagggtcaagggggcgagtgtgagattcgccgtgcagggccagggagtgaggagctcactgtcaccaatgctcgatatgtccctgtctcctgtgagaaagaagtggacgccctgcttcatctggcccgccagaatcgggctgtggcccgcacagcccagaatgaacggtcatcacgcagccacagtgtattccagctacagatttctggggagcactccagccgaggcctgcagtgtggggcccccctcagtcttgtggacctggccgggagtgagcgacttgaccccggcttagccctcggccccggggagcgggaacgccttcgggaaacacaggccattaacagcagcctgtccacgctggggctggttatcatggccctgagcaacaaggagtcccacgtgccttaccggaacagcaaactgacctacctgctgcagaactctctgggtggtagtgctaagatgctcatgtttgtgaacatttctccactggaagagaacgtctccgagtccctcaactctctacgctttgcctccaaggtgaaccagtgtgttattggtactgctcaggccaacaggaagtgaagacggatccagatctgtgtgtgtgtgtgtgtgtgtgtgtgtgtgtgtgtgtgtgtgtgtgtgtgtgtccctatgtctatgtatcgggtgaggggtgggagggttgctggagggtgctttattgggtggagggcaccatgtcccagggctatcaaataaagaatagtttggttttttttttaaaaaaaaaaaaaaaaaaaaaaaaaaaaaa

SEQ ID NO: 1738 - protein, 673 aa, Homo sapiens
MDPQRSPLLEVKGNIELKRPLIKAPSQLPLSGSRLKRRPDQMEDGLEPEKKRTRGLGATTKITTSHPRVPSLTTVPQTQGQTTAQKVSKKTGPRCSTAIATGLKNQKPVPAVPVQKSGTSGVPPMAGGKKPSKRPAWDLKGQLCDLNAELKRCRERTQTLDQENQQLQDQLRDAQQQVKALGTERTTLEGHLAKVQAQAEQGQQELKNLRACVLELEERLSTQEGLVQELQKKQVELQEERRGLMSQLEEKERRLQTSEAALSSSQAEVASLRQETVAQAALLTEREERLHGLEMERRRLHNQLQELKGNIRVFCRVRPVLPGEPTPPPGLLLFPSGPGGPSDPPTRLSLSRSDERRGTLSGAPAPPPRHDFSFDRVFPPGSGQDEVFEEIAMLVQSALDGYPVCIFAYGQTGSGKTFTMEGGPGGDPQLEGLIPRALRHLFSVAQELSGQGWTYSFVASYVEIYNETVRDLLATGTRKGQGGECEIRRAGPGSEELTVTNARYVPVSCEKEVDALLHLARQNRAVARTAQNERSSRSHSVFQLQISGEHSSRGLQCGAPLSLVDLAGSERLDPGLALGPGERERLRETQAINSSLSTLGLVIMALSNKESHVPYRNSKLTYLLQNSLGGSAKMLMFVNISPLEENVSESLNSLRFASKVNQCVIGTAQANRK

SEQ ID NO: 1739 - DNA, 2008 bp, Homo sapiens
gcccctgcccggctcccggcggccccagctgtcaccggcccccccaggatgcaatggcgcagcccccccggctgagccgctctggtgcctcctcactttgggacccagcttctcctgctcccacctctggccccaggcctcggctttgggagggtcaagatgtgctggccagatggactgatgggctgctatacttgggtaccatcaaaaaggtggacagtgctagggaggtgtgtctggtccagtttgaggatgattcgcagtttctggttctatggaaagacattagccctgctgccctccctggagaggaactcctctgttgtgtctgtcgctctgagactgtggtccctgggaaccggctggtcagctgtgagaagtgtcgccatgcttatcaccaggactgccatgttcccagggctccagcccctggagagggagagggcacatcctgggtatgccgccagtgtgtctttgcgatcgccaccaagaggggaggtgccctgaagaagggcccctatgcccgggccatgctgggtatgaagctttctctgccatatggactgaaggggctggactgggatgctggacatctgagcaaccgacagcagagttactgttactgtggtggccctggggagtggaacctgaaaatgctgcagtgccggagctgcctgcagtggttccatgaggcctgcacccagtgtctgagcaagcccctcctctatggggacaggttctatgaatttgaatgctgtgtgtgtcgcgggggccctgagaaagtccggagactacagcttcgctgggtggatgtggcccatcttgtcctgtatcacctcagtgtttgctgtaagaagaaatactttgattttgatcgtgagatcctccccttcacttctgagaattgggacagtttgctcctgggggagctttcagacacccccaaaggagaacgttcttccaagctcctctctgctcttaacagccacaaggaccgtttcatttcagggagagagattaagaagaggaaatgtttgtttggtctccatgctcggatgcctccccctgtggagccccctactggagatggagcactcaccagggcagggccctgggggaggggtctcacgtcccctggggaagcgccggaggccggagccagagcccctgaggaggaggcagaaggggaaagtggaggagctggggccaccctcagcagtgcgcaatcagcccgagccccaggagcagagggagcgggctcatctgcagagggcactgcagcagccccatccggatgtttgcttccttccacccttctgccagcaccgcagggacctctggggacagtggacccccagacaggtcacccctggaacttcacattggtttccccacagacatccctaaaagtgccccccactcgatgactgcctcatcttcctcagtttcatccccatccccaggtcttcctagacgctcagcacccccttctcccctgtgccgtagtttgtctcctgggactgggggaggagtccgaggtggggttggttacctgtcccgaggggaccctgtccgggtccttgctcggagagtacggcctgatggctctgtgcagtacctggttgagtggggaggagggggcatcttctgaacagcctgcctctgcccagctccccattcacacacaccggcactttcataccctgacctctgacctcacctacagctgggatgtacctggagagatagggggtagttctccctactgcccaggctggaatccaagagtggggagtggggaagaggccctcttctctaccctccttcatgattcctgacccctcccatccttcccatttcctttgatgttattttgttacagctttttaaatattttttaaaattatttaacccctgggggcagagactgaggagggaggatgataagggatcccggactctgtatgattgaaataaagagaaataaacaaaaaaaaaaaaaaaaaaa

SEQ ID NO: 1740 - protein, 457 aa, Homo sapiens
MAQPPRLSRSGASSLWDPASPAPTSGPRPRLWEGQDVLARWTDGLLYLGTIKKVDSAREVCLVQFEDDSQFLVLWKDISPAALPGEELLCCVCRSETVVPGNRLVSCEKCRHAYHQDCHVPRAPAPGEGEGTSWVCRQCVFAIATKRGGALKKGPYARAMLGMKLSLPYGLKGLDWDAGHLSNRQQSYCYCGGPGEWNLKMLQCRSCLQWFHEACTQCLSKPLLYGDRFYEFECCVCRGGPEKVRRLQLRWVDVAHLVLYHLSVCCKKKYFDFDREILPFTSENWDSLLLGELSDTPKGERSSKLLSALNSHKDRFISGREIKKRKCLFGLHARMPPPVEPPTGDGALTRAGPWGRGLTSPGEAPEAGARAPEEEAEGESGGAGATLSSAQSARAPGAEGAGSSAEGTAAAPSGCLLPSTLLPAPQGPLGTVDPQTGHPWNFTLVSPQTSLKVPPTR

SEQ ID NO: 1741 - DNA, 2260 bp, Homo sapiens
ctcctcctgccgctgccgctgctttggctgctgcgtcatacgccccagagccgccgggacggaggggctgggcctggggaccccccggcctccgcctgcacgcccccccacgcccggacgtgccctctccgcgcgggggactcgcctaggtctcctacgtctgcccctgcccggctcccggcggccccagctgtcaccggcccccccaggatgcaatggcgcagcccccccggctgagccgctctggtgcctcctcactttgggacccagcttctcctgctcccacctctggccccaggcctcggctttgggagggtcaagatgtgctggccagatggactgatgggctgctatacttgggtaccatcaaaaaggtggacagtgctagggaggtgtgtctggtccagtttgaggatgattcgcagtttctggttctatggaaagacattagccctgctgccctccctggagaggaactcctctgttgtgtctgtcgctctgagactgtggtccctgggaaccggctggtcagctgtgagaagtgtcgccatgcttatcaccaggactgccatgttcccagggctccagcccctggagagggagagggcacatcctgggtatgccgccagtgtgtctttgcgatcgccaccaagaggggaggtgccctgaagaagggcccctatgcccgggccatgctgggtatgaagctttctctgccatatggactgaaggggctggactgggatgctggacatctgagcaaccgacagcagagttactgttactgtggtggccctggggagtggaacctgaaaatgctgcagtgccggagctgcctgcagtggttccatgaggcctgcacccagtgtctgagcaagcccctcctctatggggacaggttctatgaatttgaatgctgtgtgtgtcgcgggggccctgagaaagtccggagactacagcttcgctgggtggatgtggcccatcttgtcctgtatcacctcagtgtttgctgtaagaagaaatactttgattttgatcgtgagatcctccccttcacttctgagaattgggacagtttgctcctgggggagctttcagacacccccaaaggagaacgttcttccaagctcctctctgctcttaacagccacaaggaccgtttcatttcagggagagagattaagaagaggaaatgtttgtttggtctccatgctcggatgcctccccctgtggagccccctactggagatggagcactcaccagcttcccttcagggcagggccctgggggaggggtctcacgtcccctggggaagcgccggaggccggagccagagcccctgaggaggaggcagaaggggaaagtggaggagctggggccaccctcagcagtgcgcaatcagcccgagccccaggagcagagggagcgggctcatctgcagagggcactgcaggcctcagtgtctccaccatcccccagccctaaccagagttaccagggcagcagcggctacaacttccggcccacagatgcccgctgcctgcccagcagccccatccggatgtttgcttccttccacccttctgccagcaccgcagggacctctggggacagtggacccccagacaggtcacccctggaacttcacattggtttccccacagacatccctaaaagtgccccccactcgatgactgcctcatcttcctcagtttcatccccatccccaggtcttcctagacgctcagcacccccttctcccctgtgccgtagtttgtctcctgggactgggggaggagtccgaggtggggttggttacctgtcccgaggggaccctgtccgggtccttgctcggagagtacggcctgatggctctgtgcagtacctggttgagtggggaggagggggcatcttctgaacagcctgcctctgcccagctccccattcacacacaccggcactttcataccctgacctctgacctcacctacagctgggatgtacctggagagatagggggtagttctccctactgcccaggctggaatccaagagtggggagtggggaagaggccctcttctctaccctccttcatgattcctgacccctcccatccttcccatttcctttgatgttattttgttacagctttttaaatattttttaaaattatttaacccctgggggcagagactgaggagggaggatgataagggatcccggactctgtatgattgaaataaagagaaataaacaaa

SEQ ID NO: 1742 - protein, 567 aa, Homo sapiens
MAQPPRLSRSGASSLWDPASPAPTSGPRPRLWEGQDVLARWTDGLLYLGTIKKVDSAREVCLVQFEDDSQFLVLWKDISPAALPGEELLCCVCRSETVVPGNRLVSCEKCRHAYHQDCHVPRAPAPGEGEGTSWVCRQCVFAIATKRGGALKKGPYARAMLGMKLSLPYGLKGLDWDAGHLSNRQQSYCYCGGPGEWNLKMLQCRSCLQWFHEACTQCLSKPLLYGDRFYEFECCVCRGGPEKVRRLQLRWVDVAHLVLYHLSVCCKKKYFDFDREILPFTSENWDSLLLGELSDTPKGERSSKLLSALNSHKDRFISGREIKKRKCLFGLHARMPPPVEPPTGDGALTSFPSGQGPGGGVSRPLGKRRRPEPEPLRRRQKGKVEELGPPSAVRNQPEPQEQRERAHLQRALQASVSPPSPSPNQSYQGSSGYNFRPTDARCLPSSPIRMFASFHPSASTAGTSGDSGPPDRSPLELHIGFPTDIPKSAPHSMTASSSSVSSPSPGLPRRSAPPSPLCRSLSPGTGGGVRGGVGYLSRGDPVRVLARRVRPDGSVQYLVEWGGGGIF

SEQ ID NO: 1743 - DNA, 823 bp, Homo sapiens
acggaaacgggcgtgccatttccgcgcacgtctgcagatgcggtagtcgattggtcaagtctcccatggctcctccttcatcaggaggtgggcaaaccgcgccatgatagggtcgggattggctggctctggaggcgcaggtggtccttcttctactgtcacatggtgcgcgctgttttctaatcacgtggctgccacccaggcctctctgctcctgtcttttgtttggatgccggcgctgctgcctgtggcctcccgccttttgttgctaccccgagtcttgctgaccatggcctctggaagccctccgacccagccctcgccggcctcggattccggctctggctacgttccgggctcggtctctgcagcctttgttacttgccccaacgagaaggtcgccaaggagatcgccagggccgtggtggagaagcgcctagcagcctgcgtcaacctcatccctcagattacatccatctatgagtggaaagggaagatcgaggaagacagtgaggtgctgatgatgattaaaacccaaagttccttggtcccagctttgacagattttgttcgttctgtgcacccttacgaagtggccgaggtaattgcattgcctgtggaacaggggaactttccgtacctgcagtgggtgcgccaggtcacagagtcagtttctgactctatcacagtcctgccatgatgagccctgttcctgctcatcatgaagatccccgcgatacttcaacgccttctgacttccaggtgatgactgggcccccaataaatcccgtctttgggtctctctgccaaaaaaaaaaaaaaa

SEQ ID NO: 1744 - protein, 198 aa, Homo sapiens
MIGSGLAGSGGAGGPSSTVTWCALFSNHVAATQASLLLSFVWMPALLPVASRLLLLPRVLLTMASGSPPTQPSPASDSGSGYVPGSVSAAFVTCPNEKVAKEIARAVVEKRLAACVNLIPQITSIYEWKGKIEEDSEVLMMIKTQSSLVPALTDFVRSVHPYEVAEVIALPVEQGNFPYLQWVRQVTESVSDSITVLP

SEQ ID NO: 1745 - DNA, 1072 bp, Homo sapiens
acggaaacgggcgtgccatttccgcgcacgtctgcagatgcggtagtcgattggtcaagtctcccatggctcctccttcatcaggaggtgggcaaaccgcgccatgatagggtcgggattggctggctctggaggcgcaggtggtccttcttctactgtcacatggtgcgcgctgttttctaatcacgtggctgccacccaggtaagaagaggccgctcttcctggggttgtttctccgtgtgacgtgtggcctttgagatcaactctcctgtaccagcgtaggccgcatgagtggggggcgggctcccgcggtcctgctcggcggagtggggcattcttcgggggtgcatcagagggagggcagagcctgaggatctaagcgaaggcttccccgggtgtaatttcctgggctgtttgtgaggagagatcgaattcgcctcctgctctcaggcctctctgctcctgtcttttgtttggatgccggcgctgctgcctgtggcctcccgccttttgttgctaccccgagtcttgctgaccatggcctctggaagccctccgacccagccctcgccggcctcggattccggctctggctacgttccgggctcggtctctgcagcctttgttacttgccccaacgagaaggtcgccaaggagatcgccagggccgtggtggagaagcgcctagcagcctgcgtcaacctcatccctcagattacatccatctatgagtggaaagggaagatcgaggaagacagtgaggtgctgatgatgattaaaacccaaagttccttggtcccagctttgacagattttgttcgttctgtgcacccttacgaagtggccgaggtaattgcattgcctgtggaacaggggaactttccgtacctgcagtgggtgcgccaggtcacagagtcagtttctgactctatcacagtcctgccatgatgagccctgttcctgctcatcatgaagatccccgcgatacttcaacgccttctgacttccaggtgatgactgggcccccaataaatcccgtctttgggtctctctgccaaaaaaaaaaaaaaa

SEQ ID NO: 1746 - protein, 156 aa, Homo sapiens
MPALLPVASRLLLLPRVLLTMASGSPPTQPSPASDSGSGYVPGSVSAAFVTCPNEKVAKEIARAVVEKRLAACVNLIPQITSIYEWKGKIEEDSEVLMMIKTQSSLVPALTDFVRSVHPYEVAEVIALPVEQGNFPYLQWVRQVTESVSDSITVLP

SEQ ID NO: 1747 - DNA, 1041 bp, Homo sapiens
acggaaacgggcgtgccatttccgcgcacgtctgcagatgcggtagtcgattggtcaagtctcccatggctcctccttcatcaggaggtgggcaaaccgcgccatgatagggtcgggattggctggctctggaggcgcaggtggtccttcttctactgtcacatggtgcgcgctgttttctaatcacgtggctgccacccaggtaagaagaggccgctcttcctggggttgtttctccgtgtgacgtgtggcctttgagatcaactctcctgtaccagcgtaggccgcatgagtggggggcgggctcccgcggtcctgctcggcggagtggtgagtgaccggccccgccccgccccttccggtcctcgaagcctcgaccgctacccgcaccctaaatcccagaggttggccccctgaggtgcctctctgctcctgtcttttgtttggatgccggcgctgctgcctgtggcctcccgccttttgttgctaccccgagtcttgctgaccatggcctctggaagccctccgacccagccctcgccggcctcggattccggctctggctacgttccgggctcggtctctgcagcctttgttacttgccccaacgagaaggtcgccaaggagatcgccagggccgtggtggagaagcgcctagcagcctgcgtcaacctcatccctcagattacatccatctatgagtggaaagggaagatcgaggaagacagtgaggtgctgatgatgattaaaacccaaagttccttggtcccagctttgacagattttgttcgttctgtgcacccttacgaagtggccgaggtaattgcattgcctgtggaacaggggaactttccgtacctgcagtgggtgcgccaggtcacagagtcagtttctgactctatcacagtcctgccatgatgagccctgttcctgctcatcatgaagatccccgcgatacttcaacgccttctgacttccaggtgatgactgggcccccaataaatcccgtctttgggtctctctgccaaaaaaaaaaaaaaa

SEQ ID NO: 1748 - protein, 156 aa, Homo sapiens; identical to SEQ ID NO: 1746

SEQ ID NO: 1749 - DNA, 951 bp, Homo sapiens
acggaaacgggcgtgccatttccgcgcacgtctgcagatgcggtagtcgattggtcaagtctcccatggctcctccttcatcaggaggtgggcaaaccgcgccatgatagggtcgggattggctggctctggaggcgcaggtggtccttcttctactgtcacatggtgcgcgctgttttctaatcacgtggctgccacccaggtaagaagaggccgctcttcctggggttgtttctccgtgtgacgtgtggcctttgagatcaactctcctgtaccagcgtaggccgcatgagtggggggcgggctcccgcggtcctgctcggcggagtggcctctctgctcctgtcttttgtttggatgccggcgctgctgcctgtggcctcccgccttttgttgctaccccgagtcttgctgaccatggcctctggaagccctccgacccagccctcgccggcctcggattccggctctggctacgttccgggctcggtctctgcagcctttgttacttgccccaacgagaaggtcgccaaggagatcgccagggccgtggtggagaagcgcctagcagcctgcgtcaacctcatccctcagattacatccatctatgagtggaaagggaagatcgaggaagacagtgaggtgctgatgatgattaaaacccaaagttccttggtcccagctttgacagattttgttcgttctgtgcacccttacgaagtggccgaggtaattgcattgcctgtggaacaggggaactttccgtacctgcagtgggtgcgccaggtcacagagtcagtttctgactctatcacagtcctgccatgatgagccctgttcctgctcatcatgaagatccccgcgatacttcaacgccttctgacttccaggtgatgactgggcccccaataaatcccgtctttgggtctctctgccaaaaaaaaaaaaaaa

SEQ ID NO: 1750 - protein, 179 aa, Homo sapiens
MSGGRAPAVLLGGVASLLLSFVWMPALLPVASRLLLLPRVLLTMASGSPPTQPSPASDSGSGYVPGSVSAAFVTCPNEKVAKEIARAVVEKRLAACVNLIPQITSIYEWKGKIEEDSEVLMMIKTQSSLVPALTDFVRSVHPYEVAEVIALPVEQGNFPYLQWVRQVTESVSDSITVLP

SEQ ID NO: 1751 - DNA, 1214 bp, Homo sapiens
acggaaacgggcgtgccatttccgcgcacgtctgcagatgcggtagtcgattggtcaagtctcccatggctcctccttcatcaggaggtgggcaaaccgcgccatgatagggtcgggattggctggctctggaggcgcaggtggtccttcttctactgtcacatggtgcgcgctgttttctaatcacgtggctgccacccaggtaagaagaggccgctcttcctggggttgtttctccgtgtgacgtgtggcctttgagatcaactctcctgtaccagcgtaggccgcatgagtggggggcgggctcccgcggtcctgctcggcggagtggtgagtgaccggccccgccccgccccttccggtcctcgaagcctcgaccgctacccgcaccctaaatcccagaggttggccccctgaggtgtgagtgaaatgagcttttgctttattttccaagtttctctctcaccttcaggggcattcttcgggggtgcatcagagggagggcagagcctgaggatctaagcgaaggcttccccgggtgtaatttcctgggctgtttgtgaggagagatcgaattcgcctcctgctctcaggcctctctgctcctgtcttttgtttggatgccggcgctgctgcctgtggcctcccgccttttgttgctaccccgagtcttgctgaccatggcctctggaagccctccgacccagccctcgccggcctcggattccggctctggctacgttccgggctcggtctctgcagcctttgttacttgccccaacgagaaggtcgccaaggagatcgccagggccgtggtggagaagcgcctagcagcctgcgtcaacctcatccctcagattacatccatctatgagtggaaagggaagatcgaggaagacagtgaggtgctgatgatgattaaaacccaaagttccttggtcccagctttgacagattttgttcgttctgtgcacccttacgaagtggccgaggtaattgcattgcctgtggaacaggggaactttccgtacctgcagtgggtgcgccaggtcacagagtcagtttctgactctatcacagtcctgccatgatgagccctgttcctgctcatcatgaagatccccgcgatacttcaacgccttctgacttccaggtgatgactgggcccccaataaatcccgtctttgggtctctctgccaaaaaaaaaaaaaaa

SEQ ID NO: 1752 - protein, 156 aa, Homo sapiens; identical to SEQ ID NO: 1746

SEQ ID NO: 1753 - DNA, 2730 bp, Homo sapiens
ttccggtctgggacggagctgtagcggcactgtaactgcgagggcagcgccgcgtgtgtaacggcgggggcgtgtcggcgggaaggacaatcgggccgggactcgcggtgtccgggtgaccgcggcttcccgggagcagacctctgtgggcactgtgaggcggaacggagcggcggggcaggagctgttctgggcagccttcatcccgcgtggagtctacccccaagcccttctcctcttcccaattcttgtcaccttcgaggaggccatggaaaccccaacacctttgccgcctgtacccgcctccccgacctgcaacccagccccacggacaatccagatcgagttcccacagcatagctcgtctctgctggaatctctgaaccgccacaggctagagggaaagttctgtgatgtgtccctcctggtgcagggccgggaacttagggctcataaagcagtgttagctgctgcctctccttacttccatgacaagctgcttctgggggatgcgcctcgtctcactctaccgagtgtcattgaagccgatgccttcgaggggctgctccagctcatttattcagggcgtctccgcctgccactggatgctcttcctgctcatctccttgtggccagtggccttcaaatgtggcaggtagtagatcagtgctcagaaattcttagagaattagaaacttcaggtggtggaatttcagcccgtggaggaaactcctaccatgcccttctttccactacatcctctacaggaggctggtgcattcgctcttcgcctttccagaccccagtacagtcctctgcttctactgaaagccctgcttccactgagagccctgtgggaggggagggaagtgaactgggagaagtgctgcaaattcaggtggaagaagaagaggaggaggaggaagatgatgatgatgaggaccaggggtcagccacactctctcagactcctcagccccagagagtatcaggggtttttccccgtcctcatggaccccacccactgcccatgactgctactccccgaaagcttccagagggtgagagtgcaccacttgagcttcctgcccctcctgcactgccccccaaaatcttctacattaagcaggaacccttcgagcctaaggaggagatatcaggaagcggaactcagcctggaggagcaaaggaggaaaccaaagtgttttctggaggggacactgaagggaatggggagctagggttcttgttgccttcagggccagggccaacatctgggggagggggtccatcctggaaaccagtggatcttcatgggaatgaaatcctgtcagggggtggaggacctgggggagcaggccaggccgtgcatgggcctgtgaagctaggggggacaccccctgcagatggaaaacgctttggttgcctgtgtgggaagcggtttgcagtgaagccaaagcgtgaccggcacatcatgctgaccttcagccttcggccttttggctgtggcatctgcaacaagcgcttcaagctgaagcaccatctgacagagcacatgaagacccatgctggagccctgcatgcctgtccccactgtggccgtcggttccgagtccatgcctgttttctccgccaccgggacctatgcaagggccagggctgggccactgcccactggacttacaagtgactgctgaggctatacactagcttctagaacaagataaccactgctgctgatggatacttttccctcactgccatggcacaccagtcatggatcttgtaatcatgccaagagaatagatacattatggacctcttgttcttagatatgggcctctcagcctggcagatgtggaaactcaaatttctcgtcccactccaggttttggctagccaaccctgcaggaaagtggtttataggccattcatacttaagttgatcacttgcccatggtggacatttttgtggtggtgatgtccattaaggaaaccagattttcaattatttagtgagagaagagttagagcaaaagacagtggtaaatgttttattccgtctccatgaggaattgaaggagttggtctccacctagagatacatttgatttacagcttaagtaattcagaggctaagctctaagcttttttctctcattgctggaatgatttaagcagaagtccttttgtgtacttttaaaattgtatctttccaggagcccctcagattgtaccttgctttctcaccaatagacaccttcccgacacttttttaatgttgtagctgagcactttaacaagttgagcattccatgtttcattcttagaaccttctttaatagagggtcttccctcaacagcctgtgcctctggtctacctttgaccaccactgataactaatatattggtcacaatgactggaatgtgactagtgatctcaggagatggcactgtcctaaagtgctgtcagggtggcaccactgctctctgaacaacttaccttggtcagagggactcaggtttgggacagcacaagctgaaggctggagagtaacttgcatagtaggaccatacctcttcctttcccatcccacccacatatgatagacagcccctctgttgagatatggaggggacagatactggaatcgggggtgggacttgcagttacttaaaattttttaataaactgtgccctgaaacctaaaaaaaaaaaaaaaaaaaaa

SEQ ID NO: 1754 - protein, 473 aa, Homo sapiens
METPTPLPPVPASPTCNPAPRTIQIEFPQHSSSLLESLNRHRLEGKFCDVSLLVQGRELRAHKAVLAAASPYFHDKLLLGDAPRLTLPSVIEADAFEGLLQLIYSGRLRLPLDALPAHLLVASGLQMWQVVDQCSEILRELETSGGGISARGGNSYHALLSTTSSTGGWCIRSSPFQTPVQSSASTESPASTESPVGGEGSELGEVLQIQVEEEEEEEEDDDDEDQGSATLSQTPQPQRVSGVFPRPHGPHPLPMTATPRKLPEGESAPLELPAPPALPPKIFYIKQEPFEPKEEISGSGTQPGGAKEETKVFSGGDTEGNGELGFLLPSGPGPTSGGGGPSWKPVDLHGNEILSGGGGPGGAGQAVHGPVKLGGTPPADGKRFGCLCGKRFAVKPKRDRHIMLTFSLRPFGCGICNKRFKLKHHLTEHMKTHAGALHACPHCGRRFRVHACFLRHRDLCKGQGWATAHWTYK

SEQ ID NO: 1755 - DNA, 2203 bp, Homo sapiens
gtctgcatccggtggccacagagcaacttcctctagagggagctgattggagccgggtgccgctggcacctctatgatcactggagtctcgcgggtccctcgggctgcacagggacaagtaaaggctacatccagatgccgggaatgcactgacgcccattcctggaaactgggctcccactcagcccctgggagcagcagccgccagcccctcgggacctccatctccaccctgctgagccacccgggttgggccaggatcccggcaggctgatcccgtcctccactgagacctgaaaaatggcttcggggcaaggcccaggtcctcccaggcaggagtgcggagagcctgccctgccctctgcttctgaggagcaggtagcccaggacacagaggaggttttccgcagctacgttttttaccgccatcagcaggaacaggaggctgaaggggtggctgcccctgccgacccagagatggtcaccttacctctgcaacctagcagcaccatggggcaggtgggacggcagctcgccatcatcggggacgacatcaaccgacgctatgactcagagttccagaccatgttgcagcacctgcagcccacggcagagaatgcctatgagtacttcaccaagattgccaccagcctgtttgagagtggcatcaattggggccgtgtggtggctcttctgggcttcggctaccgtctggccctacacgtctaccagcatggcctgactggcttcctaggccaggtgacccgcttcgtggtcgacttcatgctgcatcactgcattgcccggtggattgcacagaggggtggctgggtggcagccctgaacttgggcaatggtcccatcctgaacgtgctggtggttctgggtgtggttctgttgggccagtttgtggtacgaagattcttcaaatcatgactcccaagggtgccctttggggtcccggttcagacccctgcctggacttaagcgaagtctttgccttctctgttcccttgcaggggtcccccctcaagagtacagaagctttagcaagtgtgcactccagcttcggagggcccctgcgtgggggccagtcaggctgcagaggcacctcaacattgcatggtgctagtgggccctctctctgggcccaggggctgtggccgtctcctccctcagctctctgggacctccttagccctgtctgctaggcgctggggagactgataacttggggaggcaagagactgggagccacttctccccagaaagtgtttaacggttttagctttttataatacccttgtgagagcccattcccaccattctacctgaggccaggacgtctggggtgtggggattggtgggtctatgttccccaggattcagctattctggaagatcagcaccctaagagatgggactaggacctgagcctggtcctggccgtccctaagcatgtgtcccaggagcaggacctactaggagaggggggccaaggtcctgctcaactctacccctgctcccattcctccctccggccatactgcctttgcagttggactctcagggattctgggcttggggtgtggggtggggtggagtcgcagaccagagctgtctgaactcacgtgtcagaagcctccaagcctgcctcccaaggtcctctcagttctctcccttcctctctccttatagacacttgctcccaacccattcactacaggtgaaggctctcacccccatccctgggggccttgggtgagtggcctgctaaggctcctccttgcccagactacagggcttaggacttggtttgttatatcagggaaaaggagtagggagttcatctggagggttctaagtgggagaaggactatcaacaccactaggaatcccagaggtgggatcctccctcatggctctggcacagtgtaatccaggggtgtagatgggggaactgtgaatacttgaactctgttcccccaccctccatgctcctcacctgtctaggtctcctcagggtggggggtgacagtgccttctctattgggcacagcctagggtcttgggggtcaggggggagaagttcttgattcagccaaatgcagggaggggaggcagatggagcccataggccaccccctatcctctgagtgtttggaaataaactgtgcaatcccctcaccctgaaaaaaaaaaa

SEQ ID NO: 1756 - protein, 211 aa, Homo sapiens
MASGQGPGPPRQECGEPALPSASEEQVAQDTEEVFRSYVFYRHQQEQEAEGVAAPADPEMVTLPLQPSSTMGQVGRQLAIIGDDINRRYDSEFQTMLQHLQPTAENAYEYFTKIATSLFESGINWGRVVALLGFGYRLALHVYQHGLTGFLGQVTRFVVDFMLHHCIARWIAQRGGWVAALNLGNGPILNVLVVLGVVLLGQFVVRRFFKS

SEQ ID NO: 1757 - DNA, 2107 bp, Homo sapiens
agatgcgagcgcctgcgcaggtacgcacgctccgctggagcctggggtggcctggcagtcgtggccgagacgtgtttgctgcacttcggtgcgcacaggcactgcggtgccaacctcttggttccgccctccccccgcaggcgcccacgcgtgacctcggccgcccacaggccttcgactcttcccggactccaggtcccaggccgccccgctccaccctgcggatgatggagacaaagtcccccacaagcccctcatatggggcaagggggaaggtaccacctggggcggggcctggctccccactgagcagaggtgctggccaaggcgctccccttagtgagacaaggtttcaccatgttgcccaggcttttctcaaactcctgagctcaagcaatccgcccacctcagcctccgaaagtgctaggattataggcgtgagccactgcacccagccccaggtggcaagtctttctgataggcactgctccaaagtgaatcacactgtgctaagcccccgcaagggagtgcctttgcagcttacagctgcacactcgtcatctcaggaggtccttgcaacagtcccctttcacgggtaaagaaactgaggcctctactcaacctcacagagcaagctaatgccagactaaaacctctggcctccaaaccccatgccctttctttttgtaagctacacagactgtcagggcaaatgtccactggataaaagcatgagatgatgaatggacggaaattaaccaaaaaggtcatcaacacattttcaacagatccatcaatgtgcactcaaagaagctgagacaggcctaacctttaaaggctgatgtcaaggaaggggagcagcaggatggtactcggtctgacccaggggggtcgctcccctgagcctatgtgtgtttggagtggacgagaatgggagagagattagaaaaacagcagcatcatgtgaattacagatgcacaggaaagcttacagcctgtctagacaaattcacttatgttacagatgaggaaactgaggctcagaaagaggaagggacttgcccaaggccacatagcaaaggaatagcaaagttgagacaaaaataatggacattgtgactctgagtcaagtgagaaacagagagactgatggagaagtgtgtgtgtgtgtgtgtgtgtgtgtgtgtttatgtgcatgcagtgtgcactcactcagggggccagggtcctgaatttagaaacactaccaccaagaaggcattatgcctaccctacccaggcagtgggggctggagccagggcctgggggctggaaccagggcccagggcctggaggggatggtaagcctccagccccaccttctccaggaaggggttggtggtctggcacgggccaagcgtacctggccatccacaatgctcacctccaccacggtgatctctggccgggtaagcagctctcggccctcttggctgcctagcttccagaggcgggactcttgctgcattcccagaagcttcttcaactccgactccaggaaacctgagagccagagagatggcaagggacagggagatggcagggaacaggcaggagtaggatggagcagcccactgggaacccaaggacccggaggtgcaaccgctccctgagcctcatcccagctctgtgtggttcctgctcaccctcagccacagccctctcttcttccaggacgtagagccagccaggtaccacccctccttcgccctgccttccccaggaagctcactctttgagggccttctctggcagcggcagcatgagagcctgcgtcttcacccactggggacagcatgcaaggggcaggtatttgcccccaccaccaaccaactcaagagcctggatctggaacccaaactgcctgcactcaagtcccagctctgcccatcactagctgtgtgacatcgggcaagttctcactgtgaactggagatggcaataggacctacctcagagtcgtaaaatgcaggattttatgaaaagtgcttaaagagggtctgccccattaatggctatgtaaatgtgaaccacgattttcatcatattatgtatgctatcaccact

SEQ ID NO: 1758 - protein, 198 aa, Homo sapiens
MRAPAQVRTLRWSLGWPGSRGRDVFAALRCAQALRCQPLGSALPPQAPTRDLGRPQAFDSSRTPGPRPPRSTLRMMETKSPTSPSYGARGKVPPGAGPGSPLSRGAGQGAPLSETRFHHVAQAFLKLLSSSNPPTSASESARIIGVSHCTQPQVASLSDRHCSKVNHTVLSPRKGVPLQLTAAHSSSQEVLATVPFHG

SEQ ID NO: 1759 - DNA, 8192 bp, Homo sapiens
cgccccccacgccctgggccccggagggccgcagccatgagtgaaatgtccagctttcttcacatcggggacatcgtctccctgtacgccgagggctccgtcaatggcttcatcagcactttggggctggtggatgaccgctgtgtggtggagcccgcggccggggacctggacaacccccctaagaagttccgtgactgcctcttcaaggtgtgccccatgaaccgctactcggcccagaagcagtactggaaggccaagcagactaagcaggacaaggagaagatcgctgatgtggtgttgctgcagaagctgcagcatgcggcgcagatggagcagaagcaaaatgacacggagaacaagaaggtgcatggggatgtcgtgaagtatggcagtgtgatccagctcctgcacatgaagagcaacaagtacctgacagtgaacaagcggcttccggccttgctggagaagaacgccatgcgggtgactctggatgccacaggcaacgagggttcctggctcttcatccagcccttctggaagctgcggagcaacggggacaacgtggtcgtgggggacaaggtgatcctgaatcctgtcaatgccgggcagcctctgcatgccagcaattacgagctcagcgacaacgccggctgcaaggaggtcaattctgtgaactgcaacaccagctggaagatcaacctgtttatgcagtttcgggaccacctggaggaggtgttgaaagggggagacgtggtgcggctgttccatgcggagcaggagaagttcctgacgtgtgacgagtacaagggcaagctgcaggtgttcctgcgaactacactgcgccagtctgccacctcggccaccagctccaatgctctctgggaggtggaggtggtccaccacgacccctgccgtggaggagctgggcactggaatggcttgtaccgcttcaagcacctggctacaggcaactacctggctgctgaggagaaccccagttacaaaggtgatgcctcagatcccaaggcagcaggaatgggggcacagggccgcacaggccgcaggaatgctggggagaagatcaagtactgcctggtggctgtgcctcatggcaatgacatcgcctctctctttgagctggaccccaccaccttgcagaaaaccgactctttcgtgccccggaactcgtacgtccggctgcggcacctctgcaccaacacgtggattcagagcaccaatgtgcccattgacatcgaggaggagcggcccatccggctcatgctgggcacctgccccaccaaggaggacaaggaggcctttgccatcgtgtcagtgcccgtgtctgagatccgagacctggactttgccaatgacgccagctccatgctggccagtgccgtggagaaactcaacgagggcttcatcagccagaatgaccgcaggtttgtcatccagctgctggaagacctggtgttctttgtcagcgatgtccccaacaatgggcagaatgtcctggacatcatggtcactaagcccaaccgggaacggcagaagctgatgagggagcagaacatcctcaaacaggtctttggcattctgaaggtcccgttccgtgagaaggggggtgaaggtcccctggtgcggctggaggagctgtcagaccagaagaacgccccctaccagcacatgttccgcctgtgctaccgtgtgttgcggtattcccaggaggactaccgcaagaaccaggagcacattgccaagcagtttgggatgatgcagtcccagattggctacgacatcctggccgaggacaccatcactgccctgctgcacaacaaccgcaagctcctggaaaagcacatcaccaagaccgaggtggagaccttcgtcagccttgtgcgcaagaaccgggagcccaggttcctggactacctctctgacctgtgtgtgtccaaccacatcgccatccccgtcacccaagagctcatctgcaagtgtgtgctggaccccaagaacagtgacattctcatccggaccgagcttcggcccgtgaaggagatggcccaatcccacgagtacctgagcatcgagtactcagaagaggaagtgtggctcacgtggactgacaagaataacgagcatcatgagaagagtgtgaggcagctggcccaggaggcgcgggccggcaacgcccacgacgagaatgtgctcagctactacaggtaccagctgaagctctttgcccgcatgtgcttggaccgccagtacttggccatcgacgagatctcccagcagctgggcgtggacctgattttcctgtgcatggcagacgagatgctgccctttgacctgcgcgcctccttctgccacctgatgctgcacgtgcacgtggaccgtgacccccaggagctggtcacgccggtcaagtttgcccgtctctggactgagatccccacagccatcaccatcaaggactatgattccaacctcaacgcgtcccgagatgacaagaagaacaagtttgccaacaccatggagttcgtggaggactacctcaacaatgtagtcagcgaggccgtgccctttgccaacgaggagaagaacaagctcacttttgaggtggtcagcctggcgcacaatctcatctacttcggcttctacagcttcagcgagctgctgcggctcactcgcacactgctgggcatcatcgactgtgtgcaggggcccccggccatgctgcaggcctatgaggaccccggtggcaagaatgtgcggcggtccatccagggcgtggggcacatgatgtccaccatggtgctgagccgcaagcagtccgtcttcagtgcccccagcctgtctgctggggccagtgctgctgagccgctggacagaagcaagtttgaggagaatgaggacattgtggtgatggagaccaagctgaagatcctggaaatccttcagttcatcctcaacgtccgcctggattaccgcatatcctacctgctgtctgtcttcaagaaggagtttgtggaggtgtttcccatgcaggacagtggggctgatggcacagcccctgccttcgactctaccactgccaacatgaacctggatcgcatcggggagcaggcggaggccatgtttggagtggggaagacaagcagcatgctggaggtggatgacgagggcggccgcatgttcctgcgcgtgctcatccacctcaccatgcacgactatgcgccactggtctcgggtgccctgcagctgctcttcaagcacttcagccagcgccaggaggccatgcacaccttcaagcaggttcagctgctgatctcagcgcaggacgtggagaactacaaggtgatcaagtcggagctggaccggctgcggaccatggtggagaagtcagagctgtgggtggacaagaagggcagtggcaagggtgaggaggtggaggcaggcaccgccaaggacaagaaagagcgtcccacggacgaggagggctttctgcacccaccaggggagaaaagcagtgagaactaccagatcgtcaagggcatcctggaaaggctgaacaagatgtgcggggttggggagcaaatgaggaagaagcagcaacggctgctgaagaacatggatgcccacaaggtcatgctggacctgctgcagatcccctatgacaagggtgatgccaagatgatggagatcctgcgctacacgcaccagttcctgcagaagttctgtgcagggaaccccggcaaccaggccctgctgcacaaacacctgcacctcttcctcacgccagggctcctggaggcagagaccatgcagcacatcttcctgaacaactatcagctctgctccgagatcagcgagcctgtgttgcagcacttcgtgcacctgctggccacgcacgggcgccatgtgcagtacctggacttcctgcacaccgtcattaaggccgagggcaagtacgtcaagaagtgccaggacatgatcatgactgagctgaccaatgcaggtgacgatgtggtcgtgttctacaatgataaggcatcgctggcccacctgctggacatgatgaaggccgcccgcgacggcgtggaggaccacagccccctcatgtaccacatttccctggtggacctgctggccgcctgtgccgagggcaaaaacgtctacactgagatcaagtgcacctccctcgtgccgctggaggacgtggtgtctgtggtgacgcatgaggactgcatcactgaggtgaaaatggcctatgtgaacttcgtgaaccactgctacgtggacacggaggtggagatgaaggagatctacaccagcaaccacatctggacgctctttgagaacttcaccctggacatggctcgggtctgcagcaagcgtgagaagcgcgtggctgaccccaccttggagaagtacgtgctgagcgttgtgctggacaccatcaacgccttcttcagctccccattctctgagaacagcacttccctgcagacacaccagccggttgtggtgcagctgctgcagtctaccacacgcctcctcgagtgtccgtggctacagcagcagcacaagggctccgtggaggcctgcatccggaccctcgccatggtggccaagggccgggccatcttgctgcccatggacctggatgcccacatcagctcgatgctcagcagtggagccagctgtgcagctgccgcccagcggaacgcctccagctacaaggcaaccacgcgggccttcccccgcgtcacccccaccgccaaccagtgggactacaagaacatcattgagaagctgcaggacatcatcacagccctggaggagcggctgaagcccctggtacaggctgagctgtccgtgctggtggatgtcctgcactggcctgagctgctcttcctggagggcagtgaggcctaccagcgctgcgagagtgggggcttcctgtccaagctgatccagcacaccaaggacctcatggagtcggaggagaagctgtgcatcaaggtgctgcggaccctgcagcagatgctcgtcaagaagaccaagtacggggaccggggcaaccagctgcgcaagatgctgctgcaaaactacctccagaaccggaagtccacctcgcggggggaccttcccgaccccataggcactggcctggacccagactggtcggcaatcgcagccacccagtgccggctggacaaggagggggccaccaagttggtatgcgacctcatcaccagcaccaagaacgagaagatcttccaggagagcatcggcctggccatccacctgctggatggtggcaacacagagatccagaaatccttccacaacctgatgatgagtgacaagaagtcagagcgcttcttcaaggtgctgcacgaccgcatgaagcgggcccagcaggagaccaagtccacggtggcagtcaacatgaatgacctgggcagccagccacatgaggaccgcgagccagtcgaccccaccaccaaaggccgcgtggcctccttctcgatacctggctcctcatcccgctactcgctgggccccagcctgcgccgggggcacgaggtgagcgaacgtgtgcagagcagtgagatgggcacatccgtgctcatcatgcagcccatcctgcgctttctgcagctgctgtgtgagaaccacaaccgggacctgcagaacttcctgcgctgtcagaacaacaaaaccaactacaacttggtatgcgagacgctgcagttcctggacatcatgtgcggcagcaccacgggcggcctggggctgctggggctctacatcaatgaggacaacgtgggcctcgtcatccagaccttggagaccctcactgagtactgccagggcccctgccatgagaaccagacttgcattgtgactcacgagtccaatggcatagacatcatcaccgcactgatcctcaatgacatcagccccctgtgcaagtaccgcatggatctggtgctgcagctcaaggacaatgcctccaagctgctcctggctctgatggagagccggcatgacagtgaaaatgctgagcgaatcctcatcagcctgcggccccaggagctggtggacgtcatcaagaaggcctacctgcaggaggaagagcgtgagaactcggaggtgagcccacgtgaagtgggccataacatctatatcctggcgctgcagctctccaggcacaataaacagctgcagcacctgctgaagccggtgaagcgcattcaagaggaggaggccgagggtatctcttccatgctcagcctcaacaacaagcagctgtcacagatgctcaagtcctcagcgccagcacaggaggaggaggaagaccccctggcctactatgagaaccacacgtcccagatcgagattgtgcggcaggaccgcagcatggagcagatcgtgttcccagtgcccggcatctgccagttcctgacggaggaaaccaagcaccggctcttcaccactactgagcaggacgagcagggcagcaaagtgagcgacttcttcgaccagtcctccttcctgcacaacgagatggagtggcagcgcaacgtccgcagcatgccgctgatctactggttctcccgccgcatgaccctgtggggcagcatctccttcaacctggccgtgtttatcaacatcatcattgccttcttctacccttacatggagggcgcgtccacaggcgtgctggactcccctctcatctcattgctcttctggatcctcatctgcttctccatcgcggccctgttcaccaagcgctacagcatccgccccctcatcgtggcgctcatcctgcgctccatctactatctgggcatcgggcccacactcaacatcctgggtgccctcaatctgaccaacaagatcgtgtttgtggtgagcttcgtgggcaaccgtggcaccttcatccggggctataaggccatggtcatggacatggaattcctctaccacgtgggctacatcctgaccagtgtcctgggcctctttgctcatgagctgttctacagcatcctgctctttgacctcatctaccgcgaggagacgctgttcaacgtcatcaagagtgtgacccgcaatggccgctccatcctgctgacagccctgctggccctcatcctggtctacctcttctccatcgtcggcttcctcttcctcaaggatgacttcattctcgaggtcgaccggctgcccaacaaccactccacagccagccccctggggatgccacatggagctgctgcatttgtggacacctgcagtggggacaagatggactgtgtctcagggctctcggtgcctgaggtcctggaagaggacagggagctggacagcacagagcgggcctgtgacactctgttgatgtgcatcgtcactgtcatgaaccatgggctacgcaacggtggtggcgtgggcgacattctccgcaagccctccaaagatgagtctctcttcccagcccgagtggtctatgacctcctgttcttcttcatcgtcatcatcattgtgctgaacctcatctttggggtaatcatcgacaccttcgctgacctgcgtagtgagaagcagaagaaggaggagattcttaagacgacatgcttcatctgtggtctggagagggacaagtttgataacaagacagtgtcatttgaggaacacatcaagctggagcacaacatgtggaactacttgtacttcattgtgctggtccgcgtgaagaacaagaccgactacacgggccctgagagctacgtggcccagatgatcaagaacaagaacctggactggttcccccggatgcgggccatgtcccttgtcagcaatgagggcgagggggagcagaatgagattcggattctccaggacaagctcaactccaccatgaagctggtgtcccacctcactgcccagctcaacgagctcaaggagcagatgacggagcagcggaaacgcaggcaacgcctaggctttgtggatgtccagaactgcattagccgctgaggagagccaccgaaggccccaacaggggatgctcatcactggagactgcgactgggaagaacactgccccctccctcgggttgggtggcccagccagctggccagcctccactcccactctgccagacaccctgacaccc

SEQ ID NO: 1760 - protein, 2671 aa, Homo sapiens
MSEMSSFLHIGDIVSLYAEGSVNGFISTLGLVDDRCVVEPAAGDLDNPPKKFRDCLFKVCPMNRYSAQKQYWKAKQTKQDKEKIADVVLLQKLQHAAQMEQKQNDTENKKVHGDVVKYGSVIQLLHMKSNKYLTVNKRLPALLEKNAMRVTLDATGNEGSWLFIQPFWKLRSNGDNVVVGDKVILNPVNAGQPLHASNYELSDNAGCKEVNSVNCNTSWKINLFMQFRDHLEEVLKGGDVVRLFHAEQEKFLTCDEYKGKLQVFLRTTLRQSATSATSSNALWEVEVVHHDPCRGGAGHWNGLYRFKHLATGNYLAAEENPSYKGDASDPKAAGMGAQGRTGRRNAGEKIKYCLVAVPHGNDIASLFELDPTTLQKTDSFVPRNSYVRLRHLCTNTWIQSTNVPIDIEEERPIRLMLGTCPTKEDKEAFAIVSVPVSEIRDLDFANDASSMLASAVEKLNEGFISQNDRRFVIQLLEDLVFFVSDVPNNGQNVLDIMVTKPNRERQKLMREQNILKQVFGILKVPFREKGGEGPLVRLEELSDQKNAPYQHMFRLCYRVLRYSQEDYRKNQEHIAKQFGMMQSQIGYDILAEDTITALLHNNRKLLEKHITKTEVETFVSLVRKNREPRFLDYLSDLCVSNHIAIPVTQELICKCVLDPKNSDILIRTELRPVKEMAQSHEYLSIEYSEEEVWLTWTDKNNEHHEKSVRQLAQEARAGNAHDENVLSYYRYQLKLFARMCLDRQYLAIDEISQQLGVDLIFLCMADEMLPFDLRASFCHLMLHVHVDRDPQELVTPVKFARLWTEIPTAITIKDYDSNLNASRDDKKNKFANTMEFVEDYLNNVVSEAVPFANEEKNKLTFEVVSLAHNLIYFGFYSFSELLRLTRTLLGIIDCVQGPPAMLQAYEDPGGKNVRRSIQGVGHMMSTMVLSRKQSVFSAPSLSAGASAAEPLDRSKFEENEDIVVMETKLKILEILQFILNVRLDYRISYLLSVFKKEFVEVFPMQDSGADGTAPAFDSTTANMNLDRIGEQAEAMFGVGKTSSMLEVDDEGGRMFLRVLIHLTMHDYAPLVSGALQLLFKHFSQRQEAMHTFKQVQLLISAQDVENYKVIKSELDRLRTMVEKSELWVDKKGSGKGEEVEAGTAKDKKERPTDEEGFLHPPGEKSSENYQIVKGILERLNKMCGVGEQMRKKQQRLLKNMDAHKVMLDLLQIPYDKGDAKMMEILRYTHQFLQKFCAGNPGNQALLHKHLHLFLTPGLLEAETMQHIFLNNYQLCSEISEPVLQHFVHLLATHGRHVQYLDFLHTVIKAEGKYVKKCQDMIMTELTNAGDDVVVFYNDKASLAHLLDMMKAARDGVEDHSPLMYHISLVDLLAACAEGKNVYTEIKCTSLVPLEDVVSVVTHEDCITEVKMAYVNFVNHCYVDTEVEMKEIYTSNHIWTLFENFTLDMARVCSKREKRVADPTLEKYVLSVVLDTINAFFSSPFSENSTSLQTHQPVVVQLLQSTTRLLECPWLQQQHKGSVEACIRTLAMVAKGRAILLPMDLDAHISSMLSSGASCAAAAQRNASSYKATTRAFPRVTPTANQWDYKNIIEKLQDIITALEERLKPLVQAELSVLVDVLHWPELLFLEGSEAYQRCESGGFLSKLIQHTKDLMESEEKLCIKVLRTLQQMLVKKTKYGDRGNQLRKMLLQNYLQNRKSTSRGDLPDPIGTGLDPDWSAIAATQCRLDKEGATKLVCDLITSTKNEKIFQESIGLAIHLLDGGNTEIQKSFHNLMMSDKKSERFFKVLHDRMKRAQQETKSTVAVNMNDLGSQPHEDREPVDPTTKGRVASFSIPGSSSRYSLGPSLRRGHEVSERVQSSEMGTSVLIMQPILRFLQLLCENHNRDLQNFLRCQNNKTNYNLVCETLQFLDIMCGSTTGGLGLLGLYINEDNVGLVIQTLETLTEYCQGPCHENQTCIVTHESNGIDIITALILNDISPLCKYRMDLVLQLKDNASKLLLALMESRHDSENAERILISLRPQELVDVIKKAYLQEEERENSEVSPREVGHNIYILALQLSRHNKQLQHLLKPVKRIQEEEAEGISSMLSLNNKQLSQMLKSSAPAQEEEEDPLAYYENHTSQIEIVRQDRSMEQIVFPVPGICQFLTEETKHRLFTTTEQDEQGSKVSDFFDQSSFLHNEMEWQRNVRSMPLIYWFSRRMTLWGSISFNLAVFINIIIAFFYPYMEGASTGVLDSPLISLLFWILICFSIAALFTKRYSIRPLIVALILRSIYYLGIGPTLNILGALNLTNKIVFVVSFVGNRGTFIRGYKAMVMDMEFLYHVGYILTSVLGLFAHELFYSILLFDLIYREETLFNVIKSVTRNGRSILLTALLALILVYLFSIVGFLFLKDDFILEVDRLPNNHSTASPLGMPHGAAAFVDTCSGDKMDCVSGLSVPEVLEEDRELDSTERACDTLLMCIVTVMNHGLRNGGGVGDILRKPSKDESLFPARVVYDLLFFFIVIIIVLNLIFGVIIDTFADLRSEKQKKEEILKTTCFICGLERDKFDNKTVSFEEHIKLEHNMWNYLYFIVLVRVKNKTDYTGPESYVAQMIKNKNLDWFPRMRAMSLVSNEGEGEQNEIRILQDKLNSTMKLVSHLTAQLNELKEQMTEQRKRRQRLGFVDVQNCISR

SEQ ID NO: 1761 - DNA, 536 bp, Homo sapiens
gccgactcctcccgctaaggcgggaacacgcggggcccaagatggcggccagccggtaccggcgttttcttaagctctgtgaggaatggccagtggacgagaccaaacggggccgggacttgggcgcttacctgcgacagcgggtagcacaggcctttcgggagggagagaatacccaggttgcagagcctgaggcctgtgatcagatgtacgagagcttagcgcgactccattcaaactactacaaacacaagtaccctcgccccagagacaccagcttcagtggcctgtcgttggaagagtacaagctgatcctgtccacagacaccttggaagagcttaaggaaatagataaaggcatgtggaagaaactgcaggagaagtttgcccccaagggtcctgaggaggatcataaggcctgagctcaggccttacctcgtgcacatacctaggtgtggagtcttgtacattgccatcgtcaataaaactgccccagtttccccttgcaaaaaaaaaaaaaaaaaaaaaaaaaaaaa

SEQ ID NO: 1762 - protein, 126 aa, Homo sapiens
MAASRYRRFLKLCEEWPVDETKRGRDLGAYLRQRVAQAFREGENTQVAEPEACDQMYESLARLHSNYYKHKYPRPRDTSFSGLSLEEYKLILSTDTLEELKEIDKGMWKKLQEKFAPKGPEEDHKA

SEQ ID NO: 1763 - DNA, 2628 bp, Homo sapiens
agacctcccgcaccagggctctggtgaacagcaaatgctccacgctgggacgggccattgcctgatgcctgtacatggtgggcactgagagacaagattcctgggccctgccttccatacactccccacgatctcggaggaagctctgaggaccccgctgagaacccacagacaggaggacaactgcgctatgacagcaataaaggccaagaaggagaaagttgaggaccgctgacagccccgtgtgctgttgggagctgccctttctacttcaaaccttcctctagcagactgtgcagggaccccccaccaccaccatctgccgccatggttgtgcaaaacagcgcagacgccggggacatgagggcaggcgtgcagctggagcccttcctgcaccaggtcggggggcacatgagcgtgatgaagtatgacgagcatacggtgtgcaagcccctcgtctcccgggagcagaggttctatgaatccctgccgctggccatgaagcggttcaccccacagtacaaaggtaccgtcacagtgcacctctggaaagacagcacaggccatctcagcttggttgccaacccagtgaaggagagccaggagcccttcaaggtctccacagagtcggcggcggtggccatatggcagacgctccagcagaccaccggcagcaatggcagcgactgcacccttgcccagtggccgcatgcccagctggcacgctcacccaaggagagcccggccaaggctcttctgaggtccgagccccacctcaacactccagccttctcgctggtggaagacaccaacggaaaccaggttgagaggaagagcttcaacccgtggggcctgcaatgccaccaggcccacctgacccgcctgtgctccgagtacccagagaacaagcggcatcggttcttgttgctggaaaatgtagtgtcacagtacacgcatccctgtgtcctggatctgaagatggggacccggcagcacggcgatgatgcatcggaggagaagaaggcccgccacatgaggaagtgtgcgcagagcacctcagcctgcctgggtgtgcgcatctgcggcatgcaggtttatcaaacagataagaagtactttctctgcaaagacaagtactatggaagaaaactctcagtggaggggttcagacaagccctctatcagttcctacataatggaagccacctccggagggagctcctggagcccatcctgcaccagctccgggccctcctctctgtcattaggagccagagttcataccgcttctattccagctctctccttgtcatctatgatgggcaggaaccaccagaaagagccccaggcagcccgcatcctcacgaggctccccaggcagcccacggtagctctcccggtggtctcaccaaggttgacatccgcatgattgactttgctcataccacatacaagggctactggaatgagcacaccacctacgatggaccagaccctggctatatttttggcctggaaaacctcatcaggatcctgcaggatatccaagagggagaatgaaacttcctgggcttatctggattcttctgggctatagatctcaaatagagacctgttggttgctagggtagtccagacaccccttagatgtcttcataatagtcctatctaccttcaaaaaccatctctatatatggcagactatattaacagctgctgaacaaatcagctctggaggtgattccacatcccctggcattatgctctaatgctgctcatcggagaacagacagccaggataaagtggcaccttctggagtacactggagggggcagcccaagttagaggccagcattgctgacattctggaatatttgcatctaaaaatgtttactcgttgccatgctgcagtccgcacaagctgtgaggcagaaaacttgacttgaagcagccttgaagagtgagttcatgagctcatggtttttctccttgtatggactgctcgctccaagggcaggcagagctcatgaatgcctcttatcttcctaagcggagttttaggtgacacaggatgaagcagaagagatctacccatctcatctgctctgcacccagcttctaagtggacaaagccaagcccaggcatgagctctggcaaagcaagaccccagattctccatttttgcctgtggaaaggagggtccctttacaggcttttttttcctttttttcccccaaaatctcttaaaatgaggaatctcttagcagactttggagttccccattctgccacattctgaccatgagacgcggcttgcagtgggggtgaacgcacataaaaagggaccactgacgtcctgctctactctctgctttctatttatttattttgggggtgggttggggagtcagaagaacctggaggacggaggaaaccaggggcaatgtttacaagactggtggacaagtgtaaatatggaataagaacaaacagttctaattaattccttcttctgcagtatggaaacctattacgatgcccttgagtcaagcactgagatacgttacccaattagggaaataaatttgttaataaaattgctgaggtcaccaaaaaaaaaaaaaaa

SEQ ID NO: 1764 - protein, 410 aa, Homo sapiens
MVVQNSADAGDMRAGVQLEPFLHQVGGHMSVMKYDEHTVCKPLVSREQRFYESLPLAMKRFTPQYKGTVTVHLWKDSTGHLSLVANPVKESQEPFKVSTESAAVAIWQTLQQTTGSNGSDCTLAQWPHAQLARSPKESPAKALLRSEPHLNTPAFSLVEDTNGNQVERKSFNPWGLQCHQAHLTRLCSEYPENKRHRFLLLENVVSQYTHPCVLDLKMGTRQHGDDASEEKKARHMRKCAQSTSACLGVRICGMQVYQTDKKYFLCKDKYYGRKLSVEGFRQALYQFLHNGSHLRRELLEPILHQLRALLSVIRSQSSYRFYSSSLLVIYDGQEPPERAPGSPHPHEAPQAAHGSSPGGLTKVDIRMIDFAHTTYKGYWNEHTTYDGPDPGYIFGLENLIRILQDIQEGE

SEQ ID NO: 1765 - DNA, 3005 bp, Homo sapiens
gacgccgccgccaccgcctcctcagagcggggcccgggcccagccgccgccaccgctgccgccgccgagctccgccgccgccgagcaccatgggagacgctgggagcgagcgcagcaaagcgcccagcctgccgcctcgctgtccctgcggcttctgggggtccagcaagactatgaatctctgttccaaatgctttgctgattttcaaaagaaacagccagacgatgattccgctccaagtacaagtaacagccaatcagatttgttttccgaagagaccaccagtgacaacaacaatacctcgataaccacgccaactcttagtcccagccagcagccgcttccgacagaactgaatgtaacttcaccgagtaaagaggagtgtgggccatgcacagacacagctcatgtctcattaatcacaccaacaaaaagatcctgtggtacagattcacagtctgagaatgaggcttcaccagtaaaacggccacgactacttgagaatacggaacggtccgaggaaaccagtcgatctaaacagaagagtcgacgtcggtgcttccagtgccaaaccaaactggagctggtgcagcaggaattgggatcgtgtcgctgcggttatgtgttctgtatgttacatcgcctccccgagcagcacgactgcacattcgaccacatgggccgtggccgggaggaagccatcatgaaaatggtgaagctggaccggaaagtggggcgctcctgccagcgcatcggggaggggtgctcctgaaggccaggcatggccaccacgtgacgctgttcttagttcactaatgttagccttatttaggacaaagtcagccagacaccttgtactgggcacgcgtcagactgcagccagtccgtttcctttctttagccagccatcctggtactgtagtttaggggttgatggtggttgaaattgatttctggctggttactaaggtgcctgctagccattgtataaaattaaaacatgaagaatatttttttttttgagcatggctagtggatttaaaacaacacatacctgtcactgctggagtcaaacttataaaaagccttaagtggaaagtgttccagacggagactctgagttaatagaggagtagaagctggtgttaaagttcccacgacgcacatggctttgccagaaactctgtttaatgatcggcctttcacctcttcacttatccttagtcccagtagccaggatacctgatggccacgtgtgccttggccacgggaggctgctgagattggccacgtggctggactgggtggtggcctcactctcccacagagctggaaatggggggtgggggacagattcttacggaaatttttttacctgacttgctatgaaaaaactcatcacacaagaagagaaacagtaacctcactttgaaaattagctccactcaagactagtccacgaacgagacccgccttttctacacaggatccaaggtcacgagaagcagccagagtgccccgcctccgccggctctggtctgccattcgccagtgcagggatctggcacggaccagatgtggcgaatggcagcacagcgcggtggctgggtctgcacactggcctctgcagccagatttctatattgggagttttttaaaaagacatttcatagccaacaagaatcagtagaagtgctgggagcagcagctggggaagctgccgcccacgggctctgccccttccagctggagccgcccgtgcctccaggggccaagaggatgatgtcgtggcctccattctcgtttctatgcagccccatagtccaaggacacccagtccacatctaccatatagcaagtttagtaagggaaggcagcatacgtcccagggacagtgggtttggatctgtctagaacagcggtttgtggctgtggcccagctccgagagtgatatttgctctggtaggtgagggcctgagggtacatttctccacctgtgccccctcatgttcacagaggatttcagcagctgcaactgcgcacgccaggtggggaagggtgggggtgggcctggttgccccatgttaggaaatcactaccagtcaggtggggctggggctgggtggacaggatcaggattcccttgaaagcccaggcagggtgagcagtcccagtggtcctagtgccgcatcagatccaggtgggtgagggcaggaggcccctgcgaaggcagcgtggatctgcccacacataggctactggaatagtttaacccagcaactttcctttttataaaacaacaaatggttcaactctgtctgcaaattaacagctgaacacctgcaactgcaaatgttttttgatccgacgtactgaaataggaagtcatgctcttcccaccctccacccaccagagtggaacccgctgcaaaatccccagccttaattcttgcttcaggacccagaccggtgtcttgctctagggcaacccagggcagaggggccaggtctgcccagcgtttaccactgctgtcaagccacagcccttggccaccatacgggccatcctcagtgaggcagccccccataggcttccgccaagctctggtcccgaagaggctgtgcgagcccttcccggccctccccagggccccccgccccctcctctgcctgctgcgtggaggcagccatgggaaggagcccaggggagctggcctgggggagcgaagcccatgttcgcttcctgacttagagctggggggggtggggggtggggcttgttcccctgcagtatctgttctgtgaagtttgttaaatgtaaggaaagcttaaattcttgtatctttaaaagagaaaatcttatttaacccttttgtgttctagatttacttacacacatagcctagagctcagttttagttttaacattgtgaaaatattaaaagaatcttgtaactttattcttttttctcctgctgaaaaaaaaattaaaccaatcgtatg

SEQ ID NO: 1766 - protein, 227 aa, Homo sapiens
MGDAGSERSKAPSLPPRCPCGFWGSSKTMNLCSKCFADFQKKQPDDDSAPSTSNSQSDLFSEETTSDNNNTSITTPTLSPSQQPLPTELNVTSPSKEECGPCTDTAHVSLITPTKRSCGTDSQSENEASPVKRPRLLENTERSEETSRSKQKSRRRCFQCQTKLELVQQELGSCRCGYVFCMLHRLPEQHDCTFDHMGRGREEAIMKMVKLDRKVGRSCQRIGEGCS

SEQ ID NO: 1767 - DNA, 1980 bp, Homo sapiens
agataaggaattgtataggaggaaacttcatagtaaacattgaacctctgtgcttgtctccttgttgaagttgggggttcatgtttattgttccaagggagcctcatcaaaaccacttttaaagcattgagaatccaaataaataccatggatcatacaggattggggataagtcttgaggtctccccgagaaggagaagttctttaatttggtaattttagggtaatggttggatgctctctggattaatggaaaccttcaggggtacttttaggcagagtataacccagtgaagagagcattattatatggtggaatgcgagagtctcagcctgaagcagaaattcctctccaagacaccactgcagaagcattcacaatgctactcaaatatatctacactgggcgggcaacgctgacagatgagaaggaggaggtgctgctggactttttgagcctggctcataaatatggatttccagagctagaggattctacctctgagtatctctgcaccatacttaacattcagaatgtctgcatgacttttgatgttgccagtctctactcacttcccaagttaacttgtatgtgctgcatgtttatggataggaatgctcaggaagtcctctcaagtgaaggtttcctctccctttctaagacagcacttttaaacatcgtgttaagagactcatttgcagctcccgaaaaagatattttcctagccttattaaactggtgtaagcacaattcaaaggagaatcatgctgaaatcatgcaggctgtgcgtttacctctcatgagcctcacagagcttctgaatgttgtgaggccttcaggactgctgtctcctgatgccatcctggatgccattaaagtgcgatctgagagccgggatatggacctcaattatagaggcatgctcataccagaagaaaacattgcaactatgaagtatggagcccaagttgtaaagggggagctgaaatcagccttattagatggtgatactcaaaattatgatttggatcatggattttcaaggcacccaattgatgatgactgccgttccggcatcgagattaagctaggtcagccatccgttatcaatcacatacggatactcttgtgggaccgagatagccggtcttactcatacttcattgaagtgtcaatggatgaacttgattgggtcagagtgatagatcattcacaatatctgtgtcgttcttggcagaaattatattttccagcccgtgtctgcaggtatattcgaattgttgggactcacaacacagtgaacaagatttttcacattgtggcttttgaatgtatgtttacaaacaaaaccttcactcttgagaaggggctgatagttcccatggagaatgttgcaacaattgctgattgtgccagtgtgattgaaggagtcagtcggagccgaaatgccttgctgaatggggacactaagaattatgactgggattctggctacacatgtcaccagctaggaagtggtgcgattgtggttcagttggcacaaccgtacatgattgggtcaatacggttactactttgggattgtgatgatcgaagctatagctactacgttgaggtttctaccaaccagcaacagtggaccatggttgctgacagaactaaagtctcctgcaagtcctggcagtcagtaacttttgaaaggcagcctgcctccttcatccgtatcgttgggacacacaacacagcaaatgaggtgttccactgtgtccactttgagtgtccagagcagcagagcagccagaaggaggaaaatagtgaggaatcggggacaggggacaccagcctggccggtcagcagctcgactcccatgcgctgcgggcgcctagtggcagctcactaccctccagcccaggctccaactcacgctcccccaaccggcagcaccaataaaggaggcagcgggcctggtgtgacttgg

SEQ ID NO: 1768 - protein, 544 aa, Homo sapiens
MRESQPEAEIPLQDTTAEAFTMLLKYIYTGRATLTDEKEEVLLDFLSLAHKYGFPELEDSTSEYLCTILNIQNVCMTFDVASLYSLPKLTCMCCMFMDRNAQEVLSSEGFLSLSKTALLNIVLRDSFAAPEKDIFLALLNWCKHNSKENHAEIMQAVRLPLMSLTELLNVVRPSGLLSPDAILDAIKVRSESRDMDLNYRGMLIPEENIATMKYGAQVVKGELKSALLDGDTQNYDLDHGFSRHPIDDDCRSGIEIKLGQPSVINHIRILLWDRDSRSYSYFIEVSMDELDWVRVIDHSQYLCRSWQKLYFPARVCRYIRIVGTHNTVNKIFHIVAFECMFTNKTFTLEKGLIVPMENVATIADCASVIEGVSRSRNALLNGDTKNYDWDSGYTCHQLGSGAIVVQLAQPYMIGSIRLLLWDCDDRSYSYYVEVSTNQQQWTMVADRTKVSCKSWQSVTFERQPASFIRIVGTHNTANEVFHCVHFECPEQQSSQKEENSEESGTGDTSLAGQQLDSHALRAPSGSSLPSSPGSNSRSPNRQHQ

SEQ ID NO: 1769 - DNA, 2478 bp, Homo sapiens
gtatttccggagtcccttctgagacagaaggttgtgttggggaactgaaggagtttctgtgggcggacagggaaccctgcgtttctactgtgtgattctgccaccttcctggcccgacgccatgggagtgacttgtgtgtcccagatgcctgtggccgagggcaagagtgttcagcaaaccgtagagctccttacccggaaattggagatgcttggggcagagaagcaaggaacattttgtgtggactgtgagacttaccatacggccgcctctacccttggcagccaaggtcagaccgggaagctgatgtatgtgatgcacaactcagagtacccattgagctgtttcgccctctttgagaatggcccttgccttattgctgacaccaactttgatgtgcttatggtgaagctcaagggctttttccagagtgctaaggccagcaagattgagacccggggcaccaggtaccagtactgtgacttcctggtgaaggtgggcacggtcacaatggggcccagtgcccggggcatctctgtggaggtggagtatggcccctgtgtggtagctagtgactgctggagtctgctgctcgagttcctacagagttttctaggcagccacacaccaggggctcccgcagtgtttgggaacagacatgatgcggtctacggcccagcagataccatggtccagtacatggaactcttcaacaagatccgcaagcagcagcaggtgccggtggctgggattcgttagtgatgagcagctgccagctgagctctgtcaccaggggtactccacaggaggagcaggtgctgactttcaggtccctggaccccagaaacccagggtagacatggactctactctccttctctggttctcagctgtggcttttgttctggggctgagtcccctccccaaccccctgactctcacacatagccccccatcagctgttttactccgtgccttactggatttggcctgtcctcaagaatggtaattatgaagagtggagaagtttggaccttgcctcctttaggggaaaggtaggacaggaatgtccctgcctggtactggtgggggaaatagtccgtatccccaactattaaggatttgtcccaggccaatggtgaacatgctgcattttatgtttggattgtgctgtaataagagcctcttccttccctcagaggatgtggctgggcttctatcctagagatggagtagaaggcacaactggtttgatagttactattttctgacctgtttgctgaagtgatttgcgaattgactttcctagggtgttgcctgagtcctttgaaatctccttctgacatctttcccttctgttgtgaaatatgttaagccacaggccaaactgctataagatcgaagtttgtttttttctcacctaataatagagaggtaatcagatggtctagggcagatttaactctacaaggttatcaggaactttgtttccttctgtcttattcagccattcccagtatgttttcttacccataagatcaaagcagactcatcagctccatatctgcattccactggggaaagagagagagaaaagagcagattttaaaaaaaagatatgactgagcattgctcagatcactgtggccacactttgctgaaagagatgctgggacatagaacctcttatctgggcagtcatgtgctgagttaaaactcagggattctgtgactacaagatgaaagacaatttggttgctgagatgcagttaatggcttctgttacatggagctcaatggacgtgcccaggaatgcttttggctgttattttgcagttaatacctcctgtaactaaagcatttgtttatgagttgacttgagagaagggctgatctcagagccgctttgagctaagttggattagtcacactaggaagttaattccacacctttcgtctaagtctcagtattgaggcctctccagttctcatgcaccctgatcttagggttagaatacttgaccctgatacctgcaccatgcttcatggttcctgagctctttctcctgtttcatttgagcctccaaactacatatttggtcatattgcctgcctaccccatgcctgctgcagaaatattcatccaggttaaccttgatatacacagagatggtcttggagaattgtgaatgtatgtactgtattgtcatcaaggatactgtcccttatttgaaggcatctaaagagaaactgttttcagatccaagtgctcagatctaaagcctctgcaacaagtcaggtggtggtcatgtttcccttctagttttggctgacaggaagctcagttcagtaccataactacagaacctgtcatctgtattttttgttctcaccccgtttttgttattttgtttctggttttttatattgaggtatgttttagatatagtttacaaaaataaaacgcacagatctta

SEQ ID NO: 1770 - protein, 212 aa, Homo sapiens
MGVTCVSQMPVAEGKSVQQTVELLTRKLEMLGAEKQGTFCVDCETYHTAASTLGSQGQTGKLMYVMHNSEYPLSCFALFENGPCLIADTNFDVLMVKLKGFFQSAKASKIETRGTRYQYCDFLVKVGTVTMGPSARGISVEVEYGPCVVASDCWSLLLEFLQSFLGSHTPGAPAVFGNRHDAVYGPADTMVQYMELFNKIRKQQQVPVAGIR

SEQ ID NO: 1771 - DNA, 2005 bp, Homo sapiens
gcggattcccgccccgaggtttctaaatccagacattcccgtttggctgagcactctaggcctacatccatgaagctaggagagcgacactcaaagactgcactattgagagaagctaacgttaaaggcagtgaatatattcgggagtccagctccggaacccgggagctcttttagtgggaggggcggcgctgatggcgcttctggcctccgaatgctagggggcgctgtgatcgccgggcggcctcttgggcgctgggagtccaccgcgcaagcgcatcctggcctttcttcagtccccacgtgcgatccttcccggcaactttttcgagaaaaatgcccaaattcaaggcggcccgtggggtggggggtcaggaaaaacatgcgcccctggccgatcagatcctggctgggaatgcggtgcgggcgggggtccgggagaagcggcggggtcgcgggacaggagaagcggaggaagagtatgtggggccccggctgagccgacggattttgcagcaagcacggcagcaacaggaggaactcgaggccgagcatgggactggggacaagcccgcggcgccgcgggaacgcaccacgcggctgggtccaagaatgcctcaggatggatcagatgacgaggacgaggagtggcccaccctggagaaggctgccacaatgacagcagcgggccatcatgcagaggtggttgtggaccctgaggatgagcgtgccatagagatgttcatgaacaagaaccctcctgccaggcgcaccctggctgacatcatcatggagaagctgactgagaagcagacagaggttgagacagtcatgtcagaggtgtcgggcttccctatgccccagctggacccccgggtcctagaagtgtacaggggggtccgggaggtattatctaagtaccgcagtggaaaactgcccaaggcatttaagatcatccctgcactctccaactgggagcaaatcctctacgtcacagagccggaggcctggactgcagctgccatgtaccaggccaccaggatttttgcctctaacctgaaggaacgcatggcccagcgcttctacaaccttgtcctgctccctcgagtacgagatgacgttgctgaatacaaacgactcaacttccatctctacatggctctcaagaaggcccttttcaaacctggagcctggttcaaagggatcctgattccactgtgcgagtctggcacttgtaccctccgggaagccatcattgtgggtagcatcatcaccaagtgctccatccctgtgttgcactccagtgcggccatgctgaaaattgctgagatggaatacagcggtgccaacagcatcttcctgcgactgctgctggataagaagtatgcactgccttaccgggtgctggatgccctagtcttccacttcctggggttccggacagagaagcgtgaactgcctgtgctgtggcaccagtgcctcctgactttggtccagcgctacaaggccgacttggccacagaccagaaagaggccctcttagaactgctccggctgcagccccatccacagctatcgcccgaaatcaggcgtgagcttcagagtgcagtcccccgcgatgtggaagatgttcccatcaccgtggagtgaggaaaacagtcagctgtcctggccaaaggggtttggaaggacaccaagacccccgttggtgactgaagatgacactgagctttaatggctgaagacccagatcagggcagtgacagatcacagggacatctgtggctcccagtccaggacaggaaggactgagggtctggctggttccctcttccattctaggcccttatccctgtttagttctgagagccaacttgagataccatatgctagcattcccagtccccagctggggcttggtgtgagtactttttctatggctattgtgtcaggtcactgtggataaaggcaaagacagatatttattgaaaaaaaaaaaaaaaaa

SEQ ID NO: 1772 - protein, 437 aa, Homo sapiens
MPKFKAARGVGGQEKHAPLADQILAGNAVRAGVREKRRGRGTGEAEEEYVGPRLSRRILQQARQQQEELEAEHGTGDKPAAPRERTTRLGPRMPQDGSDDEDEEWPTLEKAATMTAAGHHAEVVVDPEDERAIEMFMNKNPPARRTLADIIMEKLTEKQTEVETVMSEVSGFPMPQLDPRVLEVYRGVREVLSKYRSGKLPKAFKIIPALSNWEQILYVTEPEAWTAAAMYQATRIFASNLKERMAQRFYNLVLLPRVRDDVAEYKRLNFHLYMALKKALFKPGAWFKGILIPLCESGTCTLREAIIVGSIITKCSIPVLHSSAAMLKIAEMEYSGANSIFLRLLLDKKYALPYRVLDALVFHFLGFRTEKRELPVLWHQCLLTLVQRYKADLATDQKEALLELLRLQPHPQLSPEIRRELQSAVPRDVEDVPITVE

SEQ ID NO: 1773 - DNA, 2095 bp, Homo sapiens
gcgcctgtcagggaagcggcgcgcgcgcgcgggcggcgggcgggctggggatccgccgcgcagtgccagcgccagcgccagacccgcgccccgcgctctccggcccgtcgcctgccttgggactcgcgagcccgcactcccgccctgcctgttcgctgcccgagtatggagctgctgtgttgcgaaggcacccggcacgcgccccgggccgggccggacccgcggctgctgggggaccagcgtgtcctgcagagcctgctccgcctggaggagcgctacgtaccccgcgcctcctacttccagtgcgtgcagcgggagatcaagccgcacatgcggaagatgctggcttactggatgctggaggtatgtgaggagcagcgctgtgaggaggaagtcttccccctggccatgaactacctggatcgctacctgtcttgcgtccccacccgaaaggcgcagttgcagctcctgggtgcggtctgcatgctgctggcctccaagctgcgcgagaccacgcccctgaccatcgaaaaactgtgcatctacaccgaccacgctgtctctccccgccagttgcgggactgggaggtgctggtcctagggaagctcaagtgggacctggctgctgtgattgcacatgatttcctggccttcattctgcaccggctctctctgccccgtgaccgacaggccttggtcaaaaagcatgcccagacctttttggccctctgtgctacagattatacctttgccatgtacccgccatccatgatcgccacgggcagcattggggctgcagtgcaaggcctgggtgcctgctccatgtccggggatgagctcacagagctgctggcagggatcactggcactgaagtggactgcctgcgggcctgtcaggagcagatcgaagctgcactcagggagagcctcagggaagcctctcagaccagctccagcccagcgcccaaagccccccggggctccagcagccaagggcccagccagaccagcactcctacagatgtcacagccatacacctgtagccctggagaggccctctggagtggccactaagcagaggaggggccgctgccacccacctccctgcctccaggaaccacaccacatctaagcctgaaggggcgtctgttcccccttcacaaagcccaagggatctggtcctacccatccccgcagtgtgcactaaggggcccggccagccatgtctgcatttcggtggctagtcaagctcctcctccctgcatctgaccagcagcgcctttcccaactctagctgggggtgggccaggctgatgggacagaattggatacatacaccagcattccttttgaacgcccccccccacccctgggggctctcatgttttcaactgccaaaatgctctagtgccttctaaaggtgttgtcccttctagggttattgcatttggattggggtccctctaaaatttaatgcatgatagacacatatgagggggaatagtctagatggctcctctcagtactttggaggcccctatgtagtccgtgctgacagctgctcctagagggaggggcctaggcctcagccagagaagctataaattcctctttgctttgctttctgctcagcttctcctgtgtgattgacagctttgctgctgaaggctcattttaatttattaattgctttgagcacaactttaagaggacataatgggggcctggccatcccacaagtggtggtaaccctggtggttgctgttttcctcccttctgctactggcaaaaggatctttgtggccaaggagctgctatagcctggggtggggtcatgccctcctctcccattgtccctctgccccatcctccagcagggaaaatgcagcagggatgccctggaggtggctgagcccctgtctagagagggaggcaagccctgttgacacaggtctttcctaaggctgcaaggtttaggctggtggcccaggaccatcatcctactgtaataaagatgattgtgaaataaaactggctttggcttcttggaaaaaaaaaaaaaaaaaaaaaaaaaaaaaaaaaaaaaaaaaaaaa

SEQ ID NO: 1774 - protein, 292 aa, Homo sapiens
MELLCCEGTRHAPRAGPDPRLLGDQRVLQSLLRLEERYVPRASYFQCVQREIKPHMRKMLAYWMLEVCEEQRCEEEVFPLAMNYLDRYLSCVPTRKAQLQLLGAVCMLLASKLRETTPLTIEKLCIYTDHAVSPRQLRDWEVLVLGKLKWDLAAVIAHDFLAFILHRLSLPRDRQALVKKHAQTFLALCATDYTFAMYPPSMIATGSIGAAVQGLGACSMSGDELTELLAGITGTEVDCLRACQEQIEAALRESLREASQTSSSPAPKAPRGSSSQGPSQTSTPTDVTAIHL

SEQ ID NO: 1775 - DNA, 4323 bp, Homo sapiens
cgcgctcgcgcacactacgccagaacaagatggccgacgcggcggccacagctggggccggtggctccggaacgagatcgggaagtaaacagtccactaaccctgccgataactatcatctggcccggaggagaaccctgcaggtggttgtgagctccttgctgacagaggcagggtttgagagtgccgagaaagcatccgtggaaacgctgacagagatgctgcagagctacatttcagaaattgggagaagtgccaagtcttactgtgagcacacagccaggacccagcccacactgtccgatatcgtggtcacacttgttgagatgggtttcaatgtggacactctccctgcttatgcaaaacggtctcagaggatggtcatcactgctcctccggtgaccaatcagccagtgacccccaaggccctcactgcagggcagaaccgaccccacccgccgcacatccccagccattttcctgagttccctgatccccacacctacatcaaaactccgacgtaccgtgagcccgtgtcagactaccaggtcctgcgggagaaggctgcatcccagaggcgcgatgtggagcgggcacttacccgtttcatggccaagacaggcgagactcagagtcttttcaaagatgacgtcagcacatttccattgattgctgccagacctttcaccatcccctacctgacagctcttcttccgtctgaactggagatgcaacaaatggaagagacagattcctcggagcaggatgaacagacagacacagagaaccttgctcttcatatcagcatggaggattctggagccgagaaggagaacacctctgtcctgcagcagaacccctccttgtcgggtagccggaatggggaggagaacatcatcgataacccttatctgcggccggtgaagaagcccaagatccgcaggaagaagtccctctcctgagctgagaaggaaacctggcttgtacaggggcgcagattccaccctcccggggagttaaagccactcaagggaagaagagggtgacctcctcatggccaagccgaggctgcagggtgtgatcggacatgattttcatggcaaaccgtcttattaagatgacctattttcactggatgtttgggttgaggaagatatgaacagaataatgagaatttttttttttattttgagatggagtcttactctatcacccaggctggaatgcagtggtgtgatctcagctcactgcagtctcagcaaccctgggtccaagtgattctcctgccttggcctcccgagtagctgggactagaggcaagcgccaccatgctggctaatttttgtattttgagtagagatagggtttcgccatgttggccaggctggtcttgaactcctgacctcaagtgatccacccgcattggcctcccaaagagttgcgattacaggtgtgagccaccacgcccagctaatttttgtatttttaatagagataaggtttcgccatgttggccaggctggtcttgaactcctgacctcaagtgataacccgcctcggcctcccaaagtgctgagattacaggcgtgagccaccgcaccccaccagagactttcttaatcaatcaggctatgtggtggggcatagcagcagccagtgacttcgttcattatcacaggatttgattcctttgaaactcaagagaccagggaaagtgacaggaaggaaagggctctttgctgctgtgcttattacaaggaagactgtttgtccagcgtgtatttcaggatatctggatcccttttattgactcacaatttgtggcaccactttctcatcccagaacttcattcttatttctctcctcatctggcctcccaagtgctccgttgagctgatgaaaagttctttgtactccctcaacgtgtcggaaacaggaggccacacagcacagctttgtttggggtgggcaggagtcaggagtcttgagcagatgcatcactgtgaagaagaacgacatgtcggggctgcacctgtcctcccgtcggcatttgacgaaagctccctgaagcggggcagcactctcctcctgagagatttaccatttattgcccctgtgaggaatgtgtgcttgggaactgccaagtcttaccccttctggaagaagaggttttctctgacaagagcctagagcgtcggctctattatgctgggacttgacagaggagccatggggtttaaacagtaggaaagaggggctacgcgcagtggctcacgcctgtaatcccagcacttcgggaggcgaaggcaggtggatcacttgaggtcaggagttcgagaccagcctggccaacatagtgaaaccccgtctctactaaaaatacaaaaattagccgggtgtggttactcatgcctgtaatcccagctactcgggaggctgaggcaggagaatcacttgaacctgggaggcggaggttgcagtgagccgagatcgtgccactgcactccagcctgggtgacagagcgagactccatttcaaaaaaataaaaaaaggataaagtaaacaataggaaaggatttggtggggtgagggtggggtgttgagggctgggcctcatcttgtattctgaaagctgagaaacggctggtcagctggaaggctggtggatgggcaggagtgagccaagctgaggcgttctgcaagaagcaggtctgagtctgtccaaccaatttgtatcctgtggggagaacaacttcattcttaacataccctacaaaccagaaaacaagtttttaaggaagatgctgggcatgctgatagcttttctggtctcctaaggaagagtttttaaaactaaatccaaggaagaaaaatgtaacaacacgtggaagtgaacactggatgaataagcttgtttcccaaattagaatcctaacgtccatatttagcttcatgtattcccctttggcttccacagttcaactccttttattttgagacagggtctcgctgtgtcgccccagctggagtatagtggcactacctcggctcactgcaacctccactccccgggttcaagcaattctcagagtagctgggattacagatgcccgccaccacatctggctaattttttttttttttttttagtagacacgggattttgctatgttgcccaggctggtcttgaactcctggcctcaagtgatccacccgccttggccttccaaagtgttgagattacaggcgtgagccacggtgcccagcccatctcttagtcttccattcccttggtgaatttggaaacttgaaaaacttggggacttgacagcaggctccatgttcttctggcctcactgtactgtgtaaggaaagagctgcttgtcaggaacggaagaggggacgctagtaaaaaaaaaaaaattggattccccaactggactaaataggagtttttcaggtttgtagtaacgtgaaactctcctagatcgaagcagttagactggcctatgtggccttctcagggtttgtgattcagttcttagcgattcttggcctgataagtttatgaacacagccccacattcaagccgtggccaatcccagctgttctcactgctcttgggaggtgttgtcccagtcagtgtttctgcagcttccatttgttgttgttatccagtgtaagcacctgttgaatgcagatgtgctgagttagaggtgggatttggaaaagggctgctatttctgctgttgagatttcagaggctatactctttttttttcttttcttttttttttttttttgagacggcatctcactcttatcgcccaggctggagtgcaatggcgtgatctcggctcactgcaacctccacctcctgggttcaagggattctcctgcctcagcctcctgagtagctgggattacaggcacctaccacaattctcggctaattttttttgtatttttggtagagacggggtttcaccaggttggccagggtggtctcgaacacctgacctcagatgatccacccacctcggcctcccagtgtgggtgggattacaggcatgagccaccgcgcctggcctcagaggctatactcttataattttgttctgaggggagacagggaaagggttagacaacttgaaacattgaccctgtataaaaatgcaaaattctcaatgtgtatttataaatttctattttttataactttatgggacttcttagaggccaaaagtagtaaacatgcagattaaaaatgtttatgaaaatctcaataaaaattcataataaaaactttgtaaataaata

SEQ ID NO: 1776 - protein, 310 aa, Homo sapiens
MADAAATAGAGGSGTRSGSKQSTNPADNYHLARRRTLQVVVSSLLTEAGFESAEKASVETLTEMLQSYISEIGRSAKSYCEHTARTQPTLSDIVVTLVEMGFNVDTLPAYAKRSQRMVITAPPVTNQPVTPKALTAGQNRPHPPHIPSHFPEFPDPHTYIKTPTYREPVSDYQVLREKAASQRRDVERALTRFMAKTGETQSLFKDDVSTFPLIAARPFTIPYLTALLPSELEMQQMEETDSSEQDEQTDTENLALHISMEDSGAEKENTSVLQQNPSLSGSRNGEENIIDNPYLRPVKKPKIRRKKSLS

SEQ ID NO: 1777 - DNA, 4463 bp, Homo sapiens
atgaccgtcactgcagattttcaagcaaatgcccaggaaaaccatgggctggctgtgcccaccccctcggttccagatgattttgcagacaaagaagtgacaggtaccagctcactagtcaatggcaacctccgactgtacagctctgtggcccccccaccgcctcctgtgccagccccagcacccccagctccagcatctcctcacacagtggggactcgtctctttccccctgggggtgtcaccaagtggaaatcagatgtagcactgaatggcaggcaggcagaggccaccagagccagccccccgagaagccctgctgagccaaaggggagcgccctgggacctaacccagagccccatctcaccttcccccgttctttcaaagtgcctcccccaaccccagtcaggacttcgtccatcccagttcaggaagcacaagaggctccccgaaaggaagagggggccaccaagaaggctcccagccgactcccactgcctcccagcttccacatccgccccgcctcccaggtctacccagacagggcccccgagccagactgccctggggagctcaaggccacagcaccagccagcccaaggcttgcacccccacttcccccagctgcacctcctttgccctgtgctcagaaggcagcccatccacctgctgggtttacaaaaacccctaaatccagctctcctgctctcaaacccaaacccaacccccccagcccagagaacacagcgtcttcagcacctgtggactggagggaccccagccagatggaaaagctgcggaacgagctggcagcctatctctgtggctccaggagagaggaccgattcctcagtcacaggccaggcccaacagtggcccctcagagcaaggagggcaagaagggcccccgcctgcctgagaaggagactctcctgagcctgccagcaaaggacactcccccaggtgttcctgaaaagagtcttggcggcagcagcctgacagagacagaggctgcccccagcctgaccctgccctctgtggactacattccccaagactctccaactcccagtgtgcggcagatccggaatgagctggaggcccggctctcctcagcagcagagaaggaggctaagcccagcataggatctctgccccctaagcctcggctagaagggggaagaatttgtgaaaacggggctgatgatgacaaactctccaagcctgtggccaagaatctgccacctcaatccaccaccctgctgccaactacatcactccagcccaaggctatgttgggaccagccataccacccaaggccacacctgagccagccataccacccaaggctacactttggccagccacaccacccaaggccacacttgggccagccacaccactcaaggccacatctgggccaaccacaccactcaaggccacatctggccctgccatagcatctacagccacaactctgcccaccaccacatcccaactgatggcagagaaggactcaggcccagctggccagccagagaagccagcatctcaagaagtttccactccctcccaggcaaggggagaggggtccccctcagaggccactaggctgcccacacagggagcccgctcatctgcagccttcccaccaaagacatctcctggtggaggagaggtgccatgtctctacaagccccactgccaccagagcagcctcagccgtgaggttgctgtggtgatgcccaccctggccagaggaggggctgcagggccaggggagcccgtggaggtgaaggagcccccagggctgccagccaagcctcctgcctcggcccagcccactgatgaactcctcaggcacccggtgactggggaggtggtggagcggggctcgccgatggccctgctcctggcggccaggcagagggctcagaagggaaggtctgtaggggctgccctgggtcggtcctctctgccaggaagtctccgtgaccacagccaccaagccgaggccagctctgacagcatcttccacagccagggcacgcccaactccttcactgtggtgcccaagttacccaaggaggctgagaaggactccccgctgacgaccgaaatacccaataagtgggggccgcggctgggaagagacgcagagggcacagagctgagccgcaggcacaactggacaaagccagagccccaggcccctgtggcctgggaaagagtagctccctccaacctcccccagggccacccgctgcccaagtccttctcctccccaccttctccttcgaacaagagggaggaggaggaggaggagttcaacttcgaggtcatcccaccgccgccagagttcagcaatgaccctgagcccccggccccggccctccagtatctgggccgccagagctcccctccccggaacaactactcagacttgaggcagctcccgaacgctggccccggggcgcccccggctctcggcttctcgcgctttcccgcgggcgcgcgctacgccggggctgggggcctggagcgcttctcgggagggggccgctcgctcataaagaagcgcctgtacgtcggggagccgcaccgaggcccagggctaccccacggtggcaccggccgcagcctgagctctcccaactgcttcgggccgcagcccggaggccccgagatgcggcgcgtgaactcggcgggtcgcgcgccccccggaggcctgcacgcgccgaggctgtccctggagggcgccgcccggggcgccgcggaggccaagcacaaagcgcccggcagcgccgactacggcttcgccccagctgccggcaggtctccctacaccaccacccgctatggaagccccatcaacacgttcaccgtgaggcctgggacccgccatcccatctcctatgtctgctcaggggcccatcggaaagccacctcctgagccaggggttctcttagctctactccaacaaactgtgtctttaaggatctgggcacttgtttcttgtggggggtgggaggtacacagcaggtgttgggcgacctgactcagacacagaggagtctttgatccccaaagaccaacgatgagaagcagtggcccaggaagaccgagagtgggcttctgtttcccaaagcgctggtgtgactgtggactgtttacacgtggggggtgggaggggaaggagggtagagagaaggaaccattaaggacctgggcgctgagtttctgctctctggtactatctgctttagcaagagttatttaaaacagttttacaagcacggcctactgagcaggttctgaaagcaaggggtggggcactgactgaactggaacccatcgagatagctgtgattgcctgtcaggcccttgcaaagggctgaggcccagctctgtctggtgggtgtgcagggcaccgaagggagatctttagcctccatcacctgccatcccaagcaagagtggacacctggggttcctagccgcattgaggtgggaccaggaatgtgtatgtataacatgtggagaaggaccatgtgtggggtggggagtgaagctcccacatgtggaatggaagccctttgcattggccaagggcagaggtgggagattgatggttcatttttccttggccctagcccttagctacagggaggcctagagagaggacacttggcaagtttaggatgggaaacaaggttaagcctggctttgctattcagacctgtgcagccctgattttggggactgggcccaaggagccatgagtcttaggcttgacactaggggccttacatggccaggtctcatatgggatttggagaaggcatttttcctaacactgatactacaagtcaccaatactcttgatgccttaagatgctagaaagccttggagagtggaggcagcagagatgggaatggaggtctgaagaagcttgctgctgttggggaatgtgtttgggaaagtcaagagtggtaggattggttggctgggcgcggtggctcacacctgtaatcccagcactttgggaggccgaggccggtggatcacttgaggtcagaagttcgagaccagcctgcccaaatggtgaaaccccatctctactaaaaatacggaaaaaaaaaaaaaaagagtgctaggattgggccagttaagagcaggggagacctggctgggcatggtggctcacacctgtaattctagcactttgggaggctgaggcgggtggatcatgaggtcaagagattaagaccatcctggcctacatggcgaaaccctgtctctactaaaaataaaaaaatgacctgggcatggtggtgggcgcctgtagtcccagctactcggggcgctgaggcaggagaatcgctcgaacccaggaggtggaggttgcagtgagccgagattgcacaattgcactccagcctggcgacagagcgagact

SEQ ID NO: 1778 - protein, 984 aa, Homo sapiens
MTVTADFQANAQENHGLAVPTPSVPDDFADKEVTGTSSLVNGNLRLYSSVAPPPPPVPAPAPPAPASPHTVGTRLFPPGGVTKWKSDVALNGRQAEATRASPPRSPAEPKGSALGPNPEPHLTFPRSFKVPPPTPVRTSSIPVQEAQEAPRKEEGATKKAPSRLPLPPSFHIRPASQVYPDRAPEPDCPGELKATAPASPRLAPPLPPAAPPLPCAQKAAHPPAGFTKTPKSSSPALKPKPNPPSPENTASSAPVDWRDPSQMEKLRNELAAYLCGSRREDRFLSHRPGPTVAPQSKEGKKGPRLPEKETLLSLPAKDTPPGVPEKSLGGSSLTETEAAPSLTLPSVDYIPQDSPTPSVRQIRNELEARLSSAAEKEAKPSIGSLPPKPRLEGGRICENGADDDKLSKPVAKNLPPQSTTLLPTTSLQPKAMLGPAIPPKATPEPAIPPKATLWPATPPKATLGPATPLKATSGPTTPLKATSGPAIASTATTLPTTTSQLMAEKDSGPAGQPEKPASQEVSTPSQARGEGSPSEATRLPTQGARSSAAFPPKTSPGGGEVPCLYKPHCHQSSLSREVAVVMPTLARGGAAGPGEPVEVKEPPGLPAKPPASAQPTDELLRHPVTGEVVERGSPMALLLAARQRAQKGRSVGAALGRSSLPGSLRDHSHQAEASSDSIFHSQGTPNSFTVVPKLPKEAEKDSPLTTEIPNKWGPRLGRDAEGTELSRRHNWTKPEPQAPVAWERVAPSNLPQGHPLPKSFSSPPSPSNKREEEEEEFNFEVIPPPPEFSNDPEPPAPALQYLGRQSSPPRNNYSDLRQLPNAGPGAPPALGFSRFPAGARYAGAGGLERFSGGGRSLIKKRLYVGEPHRGPGLPHGGTGRSLSSPNCFGPQPGGPEMRRVNSAGRAPPGGLHAPRLSLEGAARGAAEAKHKAPGSADYGFAPAAGRSPYTTTRYGSPINTFTVRPGTRHPISYVCSGAHRKATS

SEQ ID NO: 1779 - DNA, 1976 bp, Homo sapiens
cagaagttccacctcaccatcaagaaaggccctggtccaggatgtgcaaggtgtgatgaaatcacagggctggggaaggtcagctcggggtcacaagaagcctgatgggcaggaaagagcatgaaagccccagccagcctcacctgtgcggctgggaggactcacagaaaccctctgtacccagtcatgggccaaagacaccgtcatgcaagggggtgaaggctccacactcgtcccggccccgggcgtggaagcaggacctcgagcagtctctggcagcagcctatgtgccggtcgttgtggactctaaggggcagaatccggacaagctcagggtacagtctcccctggggctgcaaggatttagtggagactcttaacaccagttctctggcatctgtgagtttgagtgtgggccatcatcttcttccttctgctctctccctctccacatttcccggtaccatctgatccatcaggcccttctttgctcaggcctgaaggactcaggcctgtgagagaggacggccccgttgtcggccaagacacctttgggcgaggagcagcgaacagggcctgtccatctcagacgtcagccccctgaaggcctgagcaatgggcaacgtgatggagggaaagtcagtggaggagctgagcagcaccgagtgccaccagtggtacaagaagttcatgactgagtgcccctctggccaactcaccctctatgagttccgccagttcttcggcctcaagaacctgagcccgtcggccagccagtacgtggaacagatgtttgagacttttgacttcaacaaggacggctacattgatttcatggagtacgtggcagcgctcagcttggtcctcaaggggaaggtggaacagaagctccgctggtacttcaagctctatgatgtagatggcaacggctgcattgaccgcgatgagctgctcaccatcatccaggccattcgcgccattaacccctgcagcgataccaccatgactgcagaggagttcaccgatacagtgttctccaagattgacgtcaacggggatggggaactctccctggaagagtttatagagggcgtccagaaggaccagatgctcctggacacactgacacgaagcctggaccttacccgcatcgtgcgcaggctccagaatggcgagcaagacgaggagggggctgacgaggccgctgaggcagccggctgagtgcaccgcccggctgcttctgcactagcgggtggggtggtatggtggtgcctgttggtggtgttcttgtcttaaccctagatagaatctaatgaactcagaggcttagctcgcctctttagggtccatggtggcagcagagaggcagaagtgggagtccagagccaggaacagtgaaggatggttcctggcccctctgagtgacagctggtggcagcactccttgctggggggcactgttcaacatccctctgccgtcgggtgaccccctagcccttctgactcctctcccagcttttcccagctttccccactgagcttctccagtccatgctcttctggacgtggactctctgaggcagaactgagcttttccaggcctcttatggaatcctgcagatccagtggctgcagcttcaatcccagtgctgcaatcacacatccattctgccctgggggaccctggagcctacttgtgcgctttgcatttcattgattgacgcctcccttcaacaagcatttactgagcgcctactatgtactaatgctagatgttagatgtacaaagaagacagttttcatcctctaggaactcataggctaatggtgagacacacagacaaacatcattataataaaatatgctaagagaaaaaaaaaaaaaaaaaaaaaaaaaaaaaaaaaaaaaaaaaaaaaaaaaaaaaaaaaaaaaaaaaaaaaaaaaaaaaaaaaaaaaaaaaaaaaaaaaaaaaaaa

SEQ ID NO: 1780 - protein, 201 aa, Homo sapiens
MGNVMEGKSVEELSSTECHQWYKKFMTECPSGQLTLYEFRQFFGLKNLSPSASQYVEQMFETFDFNKDGYIDFMEYVAALSLVLKGKVEQKLRWYFKLYDVDGNGCIDRDELLTIIQAIRAINPCSDTTMTAEEFTDTVFSKIDVNGDGELSLEEFIEGVQKDQMLLDTLTRSLDLTRIVRRLQNGEQDEEGADEAAEAAG

SEQ ID NO: 1781 - DNA, 2288 bp, Homo sapiens
agtcacccaggagatgatggagaggctgatcaggcctcctggaaagggaggaagagggccctagttggagagatccatcagcagaagccagggaggagatacagacccttgctccctgacgctcctcagggctagcatggggcaggagtttagctgggaggaggcggaggcagctggcgagatagatgtggcggagctccaggagtggtacaagaagtttgtgatggagtgccccagcggcacactctttatgcatgagtttaagcgcttcttcaaggtcacagacgatgaggaggcctcccagtacgtagagggcatgttccgagccttcgacaagaatggggacaacaccatcgacttcctggagtacgtggcagctctgaatctcgtgctgaggggcaccctggagcacaagctgaagcggacattcaagatctatgataaggatggcaatggctgcatcgaccgcctggagctactcaacattgtggagggaatttaccagctgaagaaagcctgccggcgagagctacaaactgagcaaggccagctgctcacacccgaggaggtcgtggacaggatcttcctcctggtggatgagaatggagatggccagctgtctctgaacgggtttgttgaaggtgcccgtcgggacaagtgggtgatgaagatgctgcagatggacatgaatcccagcagctggctcgctcagcagagacggaaaagtgccatgttctgaggagtctggggcccctccacgactccaggctcacccaggtttccagggtagtaggagggtccctggctcagcctgctcatgcccactcttcccctggtgttgacttcctggcaccccctgtgcagggctgagtggggatggggaagggctgctgggtttgaagtggccaacagggcatagtccattttggaggagtccctgggatggtgaagggaattcagttacttttcctgttcagccgctcctgggaggactgtgccttggctgggtggttgtggggctcccacagtttctgggtgttctcagttggaagcaagagccaactgaggggtgagggtcccacagaccaaatcagaaatgagaacacaaagactggtaggaggcaggggtgggagggtgttgagactgaagaaaaggcaggagttgccgggcacggtggctcacgcctgtaatcccagcactttgggaggccgaggcgggcagatcacgaggtcaggagatcgagaccatcctggctaacacggggtgaaaccccgtctctactaaaaatacaaaaaatcagccgggtgaggtggcgggcgcctgtagtcccagctactcaggaggctgaggcaagagaatggcgtgaaccccagggggccgagcctacagtgagccgagattgcgccactgcactccagcctggacgacagtgagactccgtctcaaaaaaaaaaaaaagaaagaaaagaaaaggcaggagttttggggggcagggggcagcaataattctataacttccgggatgctgaggggcgttcatggggaggaccctggcctcctcctccccaaggcatcctcaccagtggtgtcaacaggaaaaatggcagcaaatacgctgcaggctgtggtctttctgcctttgaaagggtcagctgtacttaaagggactgtttcagctctgcctgggtgctgctctgggaccccctgctgccaacccaccactcccccaacaatcctctctttccatccatatcccccagtatggaccttccacaactcccagccataagctgaatgtttctctttaaaggatggagaaaacttctgtctgtctctggcaagaattgggggactgttgactgggattgtgggctgggcttggcttctaactgctgtgtgacccaagacagccacttctcctccctaaccttggttatgtcttggcagcacagtgagcaggtcggactaggcgaacagttttggattattgtgtttttagatgtggaattattttttgttatataaactcttatgtgtaaccccaatatagaaactagattaaaagggagtctctctggttgaaaggggagctgagtaccctctggaactggaggcacctctgaaaaaagcaaactgaaaaccagtgccctgggtcactgttactcctataagacagtttaaagtgagacctggaaaaacatttgctttaccttgaatagataggtttttatgttggtatataagaaataaaactaacctattaaacctgaaaaaaaaaaaaaaaaaa

SEQ ID NO: 1782 - protein, 200 aa, Homo sapiens
MGQEFSWEEAEAAGEIDVAELQEWYKKFVMECPSGTLFMHEFKRFFKVTDDEEASQYVEGMFRAFDKNGDNTIDFLEYVAALNLVLRGTLEHKLKRTFKIYDKDGNGCIDRLELLNIVEGIYQLKKACRRELQTEQGQLLTPEEVVDRIFLLVDENGDGQLSLNGFVEGARRDKWVMKMLQMDMNPSSWLAQQRRKSAMF

SEQ ID NO: 1783 - DNA, 2112 bp, Homo sapiens
ggtcgggaccggcaagatggcggcgcggacagcgttcggtgctgtgtgccggcgcctctggcagggattggggaatttttctgtaaacacttctaagggcaatacagccaaaaatggtggcttgcttctcagtaccaatatgaagtgggtacagttttcaaacctacacgttgatgttccaaaggatttgaccaaacctgtggtaacaatctctgatgaaccagacatattatataagcgcctctcggttttggtgaaaggtcacgataaggctgtattggacagttatgaatattttgctgtgcttgctgctaaagaacttggtatctctattaaagtacatgaacctccaaggaaaatagagcgatttactcttctccaatcagtgcatatttacaagaagcacagagttcagtatgaaatgagaacactttacagatgtttagagttagaacatctaactggaagcacagcagatgtctacttggaatatattcagcgaaacttacctgaaggggttgccatggaagtaacaaagacacaattagaacagttaccagaacacatcaaggagccaatctgggaaacactatcagaagaaaaagaagaaagcaagtcataaagcctcagggaggccatttttgcctaaatttgaaatgagggtgggccagatgagtatgtttaagtggagagtgcttccagctgagatgatttgagtctgtcctaactgctccattgagttctcgtgccctcatcagctgagggcagggaatggaactttaatggaagaaccacttttatctattctttttattcattgtttcagttctgatttcagcaaacatgagcaaaccactttgactgaaagcagaaagagtgaaaattctattttgttacgctactggtgttcaattattagtttgtaccatttttaatttatgtcagttgatgcatctgaaaataagtgcttggagtgttcgtacccttatttttttttaagattcctagaaggaatctttggttaattcagattgagcagttaaagtttttgctatttacctttgtgcaggctggcatatgctaatttgggggtggtaaccaaccgattttatctcatgtaagcattacattttgaagactgaatatacttcacagcagatcaaacacatttatggcatgcactgacctcttcttggagcccagaactttatagagttgcctaccagggttactgtaatggaatttatgatcttaagaaattactagttgtattatttatcctatgattcattcattcaataagcttttactgcataaactttacatccagcactgtagttaagtacccaaaattgaatagaaataatggcttttgaaaattgcacaaagcaggccaggcacggtggctcacgcctgtaatcccagcactttgggaggccgaggcaggcggatcacgaggtcaagagatccagaccatcctggctaacacggtgaaaccccgtctctaataaaaatacaaaaattagctggacatggtggcacgtgcctgtaatcccagctactcaggaggctgaggcaggagaatcgcgtgaacccgggcccggtggaggctgcagtgagacgagatcgcgccactgcactccagcctggcgacagagcgagacaccgtctcaaaaaaaaaaaaaaagaaaattgtgcaaagcataggtaaatatttttctttattaagcttctcactgagaagccctctttattttggtaaatgtcactctgtttgttaggagatgtctgcttttccatgaaatgaaatagtggctaaagccctgaaagaggcaagactacaatgggctgaaacagttggtatagcaaccccagagaagtgcttcattttctttttatagtagaagcaggtccatgtcttttgtggtttcctgcacatctttggagtagttatgacttctcagtttttccccccttaaactgcattgcctattcttttttcctgacatgctatcaggtatcagtgtgttgaatacataatgcttgtgtatcagacttacgttactgtcatcaccattaaaagaattgcagccttgtgccccatgaccttca

SEQ ID NO: 1784 - protein, 201 aa, Homo sapiens
MAARTAFGAVCRRLWQGLGNFSVNTSKGNTAKNGGLLLSTNMKWVQFSNLHVDVPKDLTKPVVTISDEPDILYKRLSVLVKGHDKAVLDSYEYFAVLAAKELGISIKVHEPPRKIERFTLLQSVHIYKKHRVQYEMRTLYRCLELEHLTGSTADVYLEYIQRNLPEGVAMEVTKTQLEQLPEHIKEPIWETLSEEKEESKS

SEQ ID NO: 1785 - DNA, 3962 bp, Homo sapiens
ctctgctcgccccccatctcaccccccaagcggatactggtcttctcgtcggattgcccatgcacttgttgcagaaacagccaaggccctggctgtggagaatgctgaaggaagaagacgcagaagcaggacgaccctgaaagattcagcctcttcatcctcaaacaggtcgcttctcgggagttcttggtgttggaatattttacagcaaagcagtcgaccaggcctcctcttcccacctgtccagcagcatgaaagcagcatgattggccgaccgcaggagaagcccccagaaccaggcccccaactcagccatctgcggaggtcaaggtgtgagcgacgtctcctcaccacagtgctgtgtggtctatacctcagccagggagaggatgtgaaaccccccgccctgcacatgagtggtacaggccaacaggaacacctggctccagccacgttcacagacatgtcagccgtggagtagtgctgacacttttctctcagcttctcagggtttcagtccttttgggtttggtttatttaccttttttatggttttgtggctggacgttcacaaccaaggcagacagcatgggtgaccagcaactgtacaagaccaaccatgtggcccatggtagtgagaaccttttctaccaacagccaccacttggcgtccacagcgggctgagcccactgatggctaccaatacacctactcccaggccagcgagatccggacccagaagcttaccagcggtgtcttacacaagctggactctttcacccaggtgtttgccaaccaaaacctgcgaattcaggtcaacaatatggcccaggtgctgcacactcagtcagcagtgatggatggagcccctgacagtgctctccgccagctgctgtctcagaagcccatggagcccccagcaccggctatcccttcccgctaccagcaggtgccccagcagcctcaccctggtttcactggtgggctgtccaaaccagctcttcaggtcgggcagcaccctacccaagggcacctgtattatgactaccagcagcctctggctcaggtgccagtgcagggaggacagccactgcaggccccacagatgctgtcacagcacatgcaacagatgcagcagcaccagtattacccaccgcagcaacagcagcaagccgggcaacagcgtatctccatgcaagaaatacagacgcagccgcaacaaattcgcccatcacagccacagccgccgccacagcagcagcagccgcagcagctacagctgcagcagcggcagggttcaatgcagatacctcagtattatcagccccaacccatgatgcagcacttgcaagagcagcagcagcaacagatgcacctgcagcctccttcttatcacagggaccctcaccagtataccccagagcaggcacacactgtccagctgattcccctgggctccatgtcccagtactactaccaggagccccagcagccctacagccaccccctttaccagcagagccacctgtcccagcaccagcagcgtgaggacagtcagctgaagacctactctagtgacagacaggcccaggccatgctgagctcccatggggacctggggcctcctgacacaggaatgggagacccagcgagctcagatctgacccgggtcagcagcaccctcccccatcgccccctcctatcccccagtgggatccacctcaacaacatggggcctcagcatcagcagctgtctcccagtgccatgtggccccagatgcacctacctgatgggagagcccagccagggtcccctgagtcaagtggccaacccaaaggagcgtttggggagcagtttgatgccaagaacaagctgacatgctccatctgcctgaaggagttcaagaacctgcctgccctgaatggccacatgcggtcccacgggggaatgagggcctcccccaacctcaaacaggaaatccccaggaagcatcagccgagtgtgcccaaagccgaggagcccctcaagaccgtgcaggagaagaaaaagttccggcaccggtcggaacctctcttcatcccgccgccgccctcctacaacccgaaccccgctgcctcctactcgggcgccaccctgtaccagagccagctgcgctccccgcgcgtcctcggggaccacctgctcctggaccccacccacgagctgcccccttacacgcccccacccatgctgagcccggtgcgccagggctcggggctcttcagcaatgtcctcatctccggccacggccctggcgcccacccgcagctgcccctgacgcccctgacgcccacaccacgggtgctgctgtgtcgctccaacagcatcgatggcagcaacgtgacggtcaccccagggcctggagagcagactgtagatgttgaaccacgcatcaacattggcttgagattccaagcagaaatccctgaactccaagatatctctgccctggcccaggacacacacaaggccacactggtatggaagccctggccagaactagaaaaccatgacctccagcaaagagtggagaatcttctgaatttgtgctgttccagtgcattgccaggtggagggaccaattctgaatttgctttgcactctctgtttgaggccaaaggtgatgtgatggttgctctggaaatgctgctactgcggaagcctgtcaggttaaaatgtcatcctttagcaaattaccactatgccggttcggacaagtggacctccctagaaagaaaactgtttaacaaagcactagccacttacagcaaagactttatttttgtacagaagatggtgaagtccaagacggtggctcagtgcgtggagtactactacacgtggaaaaagatcatgcggctggggcggaaacaccggacacgcctggcagaaatcatcgacgattgtgtgacaagtgaagaagaagaagagttagaggaggaggaggaggaggacccggaagaagataggaaatccacaaaagaagaagagagtgaggtgccgaagtccccggagccaccacccgtccccgtcctggctcccacggaggggccgcccctgcaggccctgggccagccctcaggctccttcatctgtgaaatgcccaactgtggggctgactgtagatgtcatgtcactccctttcttccccaggtgttcagctcccgacaggcactgaatggccatgcccgcatccacgggggcaccaaccaggtgaccaaggcccgaggtgccatcccctctgggaagcagaagcctggtggcacccagagtgggtactgttcggtaaagagctcaccctctcacagcaccaccagcggcgagacagaccccaccaccatcttcccctgcaaggagtgtggcaaagtcttcttcaagatcaaaagccgaaatgcacacatgaaaactcacaggcagcaggaggaacaacagaggcaaaaggctcagaaggcggcttttgcagctgagatggcagccacgattgagaggactacggggcccgtgggggcgccggggctgctgcccctggaccagctgagtctgatcaaacccatcaaggatgtggacatcctcgacgacgacgtcgtccagcagttgggaggtgtcatggaagaggctgaagttgtggacaccgatcttctcttggatgatcaagattcagtcttgcttcagggtgacgcagaactataaagccctgtgtgtcacttagagacagtgaaaacccacggcctccatcttcattaatcaggaaacctggactgcctgcttgttttgtaacccttttaaactacctgttttaaaagtggtcattttattcaggtttagaaaaaaaaatcctatttcttttccttttatttaaaaaaatttgtttttgtggggggttggggggaataaataattggcacaactaaaaaaaaaaaa

SEQ ID NO: 1786 - protein, 968 aa, Homo sapiens
MAQVLHTQSAVMDGAPDSALRQLLSQKPMEPPAPAIPSRYQQVPQQPHPGFTGGLSKPALQVGQHPTQGHLYYDYQQPLAQVPVQGGQPLQAPQMLSQHMQQMQQHQYYPPQQQQQAGQQRISMQEIQTQPQQIRPSQPQPPPQQQQPQQLQLQQRQGSMQIPQYYQPQPMMQHLQEQQQQQMHLQPPSYHRDPHQYTPEQAHTVQLIPLGSMSQYYYQEPQQPYSHPLYQQSHLSQHQQREDSQLKTYSSDRQAQAMLSSHGDLGPPDTGMGDPASSDLTRVSSTLPHRPLLSPSGIHLNNMGPQHQQLSPSAMWPQMHLPDGRAQPGSPESSGQPKGAFGEQFDAKNKLTCSICLKEFKNLPALNGHMRSHGGMRASPNLKQEIPRKHQPSVPKAEEPLKTVQEKKKFRHRSEPLFIPPPPSYNPNPAASYSGATLYQSQLRSPRVLGDHLLLDPTHELPPYTPPPMLSPVRQGSGLFSNVLISGHGPGAHPQLPLTPLTPTPRVLLCRSNSIDGSNVTVTPGPGEQTVDVEPRINIGLRFQAEIPELQDISALAQDTHKATLVWKPWPELENHDLQQRVENLLNLCCSSALPGGGTNSEFALHSLFEAKGDVMVALEMLLLRKPVRLKCHPLANYHYAGSDKWTSLERKLFNKALATYSKDFIFVQKMVKSKTVAQCVEYYYTWKKIMRLGRKHRTRLAEIIDDCVTSEEEEELEEEEEEDPEEDRKSTKEEESEVPKSPEPPPVPVLAPTEGPPLQALGQPSGSFICEMPNCGADCRCHVTPFLPQVFSSRQALNGHARIHGGTNQVTKARGAIPSGKQKPGGTQSGYCSVKSSPSHSTTSGETDPTTIFPCKECGKVFFKIKSRNAHMKTHRQQEEQQRQKAQKAAFAAEMAATIERTTGPVGAPGLLPLDQLSLIKPIKDVDILDDDVVQQLGGVMEEAEVVDTDLLLDDQDSVLLQGDAEL

SEQ ID NO: 1787 - DNA, 3925 bp, Homo sapiens
ctctgctcgccccccatctcaccccccaagcggatactggtcttctcgtcggattgcccatgcacttgttgcagaaacagccaaggccctggctgtggagaatgctgaaggaagaagacgcagaagcaggacgaccctgaaagattcagcctcttcatcctcaaacaggtcgcttctcgggagttcttggtgttggaatattttacagcaaagcagtcgaccaggcctcctcttcccacctgtccagcagcatgaaagcagcatgattggccgaccgcaggagaagcccccagaaccaggcccccaactcagccatctgcggaggtcaaggtgtgagcgacgtctcctcaccacagtgctgtgtggtctatacctcagccagggagaggatgtgaaaccccccgccctgcacatgagtggtacaggccaacaggaacacctggctccagccacgttcacagacatgtcagccgtggagtagtgctgacacttttctctcagcttctcagggtttcagtccttttgggtttggtttatttaccttttttatggttttgtggctggacgttcacaaccaaggcagacagcatgggtgaccagcaactgtacaagaccaaccatgtggcccatggtagtgagaaccttttctaccaacagccaccacttggcgtccacagcgggctgagcccactgatggctaccaatacacctactcccaggccagcgagatccggacccagaagcttaccagcggtgtcttacacaagctggactctttcacccaggtgtttgccaaccaaaacctgcgaattcaggtcaacaatatggcccaggtgctgcacactcagtcagcagtgatggatggagcccctgacagtgctctccgccagctgctgtctcagaagcccatggagcccccagcaccggctatcccttcccgctaccagcaggtgccccagcagcctcaccctggtttcactggtgggctgtccaaaccagctcttcaggtcgggcagcaccctacccaagggcacctgtattatgactaccagcagcctctggctcaggtgccagtgcagggaggacagccactgcaggccccacagatgctgtcacagcacatgcaacagatgcagcagcaccagtattacccaccgcagcaacagcagcaagccgggcaacagcgtatctccatgcaagaaatacagacgcagccgcaacaaattcgcccatcacagccacagccgccgccacagcagcagcagccgcagcagctacagctgcagcagcggcagggttcaatgcagatacctcagtattatcagccccaacccatgatgcagcacttgcaagagcagcagcagcaacagatgcacctgcagcctccttcttatcacagggaccctcaccagtataccccagagcaggcacacactgtccagctgattcccctgggctccatgtcccagtactactaccaggagccccagcagccctacagccaccccctttaccagcagagccacctgtcccagcaccagcagcgtgaggacagtcagctgaagacctactctagtgacagacaggcccaggccatgctgagctcccatggggacctggggcctcctgacacaggaatgggagacccagcgagctcagatctgacccgggtcagcagcaccctcccccatcgccccctcctatcccccagtgggatccacctcaacaacatggggcctcagcatcagcagctgtctcccagtgccatgtggccccagatgcacctacctgatgggagagcccagccagggtcccctgagtcaagtggccaacccaaaggagcgtttggggagcagtttgatgccaagaacaagctgacatgctccatctgcctgaaggagttcaagaacctgcctgccctgaatggccacatgcggtcccacgggggaatgagggcctcccccaacctcaaacaggaaatccccaggaagcatcagccgagtgtgcccaaagccgaggagcccctcaagaccgtgcaggagaagaaaaagttccggcaccggtcggaacctctcttcatcccgccgccgccctcctacaacccgaaccccgctgcctcctactcgggcgccaccctgtaccagagccagctgcgctccccgcgcgtcctcggggaccacctgctcctggaccccacccacgagctgcccccttacacgcccccacccatgctgagcccggtgcgccagggctcggggctcttcagcaatgtcctcatctccggccacggccctggcgcccacccgcagctgcccctgacgcccctgacgcccacaccacgggtgctgctgtgtcgctccaacagcatcgatggcagcaacgtgacggtcaccccagggcctggagagcagactgtagatgttgaaccacgcatcaacattggcttgagattccaagcagaaatccctgaactccaagatatctctgccctggcccaggacacacacaaggccacactggtatggaagccctggccagaactagaaaaccatgacctccagcaaagagtggagaatcttctgaatttgtgctgttccagtgcattgccaggtggagggaccaattctgaatttgctttgcactctctgtttgaggccaaaggtgatgtgatggttgctctggaaatgctgctactgcggaagcctgtcaggttaaaatgtcatcctttagcaaattaccactatgccggttcggacaagtggacctccctagaaagaaaactgtttaacaaagcactagccacttacagcaaagactttatttttgtacagaagatggtgaagtccaagacggtggctcagtgcgtggagtactactacacgtggaaaaagatcatgcggctggggcggaaacaccggacacgcctggcagaaatcatcgacgattgtgtgacaagtgaagaagaagaagagttagaggaggaggaggaggaggacccggaagaagataggaaatccacaaaagaagaagagagtgaggtgccgaagtccccggagccaccacccgtccccgtcctggctcccacggaggggccgcccctgcaggccctgggccagccctcaggctccttcatctgtgaaatgcccaactgtggggctgtgttcagctcccgacaggcactgaatggccatgcccgcatccacgggggcaccaaccaggtgaccaaggcccgaggtgccatcccctctgggaagcagaagcctggtggcacccagagtgggtactgttcggtaaagagctcaccctctcacagcaccaccagcggcgagacagaccccaccaccatcttcccctgcaaggagtgtggcaaagtcttcttcaagatcaaaagccgaaatgcacacatgaaaactcacaggcagcaggaggaacaacagaggcaaaaggctcagaaggcggcttttgcagctgagatggcagccacgattgagaggactacggggcccgtgggggcgccggggctgctgcccctggaccagctgagtctgatcaaacccatcaaggatgtggacatcctcgacgacgacgtcgtccagcagttgggaggtgtcatggaagaggctgaagttgtggacaccgatcttctcttggatgatcaagattcagtcttgcttcagggtgacgcagaactataaagccctgtgtgtcacttagagacagtgaaaacccacggcctccatcttcattaatcaggaaacctggactgcctgcttgttttgtaacccttttaaactacctgttttaaaagtggtcattttattcaggtttagaaaaaaaaatcctatttcttttccttttatttaaaaaaatttgtttttgtggggggttgggggaataaataattggcacaactaaaaaaaaaaaa

SEQ ID NO: 1788 - protein, 956 aa, Homo sapiens
MAQVLHTQSAVMDGAPDSALRQLLSQKPMEPPAPAIPSRYQQVPQQPHPGFTGGLSKPALQVGQHPTQGHLYYDYQQPLAQVPVQGGQPLQAPQMLSQHMQQMQQHQYYPPQQQQQAGQQRISMQEIQTQPQQIRPSQPQPPPQQQQPQQLQLQQRQGSMQIPQYYQPQPMMQHLQEQQQQQMHLQPPSYHRDPHQYTPEQAHTVQLIPLGSMSQYYYQEPQQPYSHPLYQQSHLSQHQQREDSQLKTYSSDRQAQAMLSSHGDLGPPDTGMGDPASSDLTRVSSTLPHRPLLSPSGIHLNNMGPQHQQLSPSAMWPQMHLPDGRAQPGSPESSGQPKGAFGEQFDAKNKLTCSICLKEFKNLPALNGHMRSHGGMRASPNLKQEIPRKHQPSVPKAEEPLKTVQEKKKFRHRSEPLFIPPPPSYNPNPAASYSGATLYQSQLRSPRVLGDHLLLDPTHELPPYTPPPMLSPVRQGSGLFSNVLISGHGPGAHPQLPLTPLTPTPRVLLCRSNSIDGSNVTVTPGPGEQTVDVEPRINIGLRFQAEIPELQDISALAQDTHKATLVWKPWPELENHDLQQRVENLLNLCCSSALPGGGTNSEFALHSLFEAKGDVMVALEMLLLRKPVRLKCHPLANYHYAGSDKWTSLERKLFNKALATYSKDFIFVQKMVKSKTVAQCVEYYYTWKKIMRLGRKHRTRLAEIIDDCVTSEEEEELEEEEEEDPEEDRKSTKEEESEVPKSPEPPPVPVLAPTEGPPLQALGQPSGSFICEMPNCGAVFSSRQALNGHARIHGGTNQVTKARGAIPSGKQKPGGTQSGYCSVKSSPSHSTTSGETDPTTIFPCKECGKVFFKIKSRNAHMKTHRQQEEQQRQKAQKAAFAAEMAATIERTTGPVGAPGLLPLDQLSLIKPIKDVDILDDDVVQQLGGVMEEAEVVDTDLLLDDQDSVLLQGDAEL

SEQ ID NO: 1789 - DNA, 4395 bp, Homo sapiens
ggcgaggatggggagcaatgcaaagctctgctcgccccccatctcaccccccaagcggatactggtcttctcgtcggattgcccatgcacttgttgcagaaacagccaaggccctggctgtggagaatgctgaaggaagaagacgcagaagcaggacgaccctgaaagattcagcctcttcatcctcaaacaggaccaggcctcctcttcccacctgtccagcagcatgaaagcagcatgattggccgaccgcaggagaagcccccagaaccaggcccccaactcagccatctgcggaggtcaaggtgtgagcgacgtctcctcaccacagtgctgtgtggtctatacctcagccagggagaggatgtgaaaccccccgccctgcacatgagtggtacaggccaacaggaacacctggctccagccacgttcacagacatgtcagccgtggagtagtgctgacacttttctctcagcttctcagggtttcagtccttttgggtttgttttatttaccttttttatggttttgtggctggacgttcacaaccaaggcagacagcatgggtgaccagcaactgtacaagaccaaccatgtggcccatggtagtgagaaccttttctaccaacagccaccacttggcgtccacagcgggctgaaccacaactatgggaatgcagttacagggggcggaatggatgcccctcaggcctcgccaatctccccccacttccctcaagatacacgggatggtctgggcttgcctgttggctccaaaaaccttggccaaatggatacctcgaggcagggagggtggggaagtcatgcagggcctggaaaccatgtccagctacgtggaaacctggccaactcaaacatgatgtggggggcaccagcccaggctgagcccactgatggctaccaatacacctactcccaggccagcgagatccggacccagaagcttaccagcggtgtcttacacaagctggactctttcacccaggtgtttgccaaccaaaacctgcgaattcaggtcaacaatatggcccaggtgctgcacactcagtcagcagtgatggatggagcccctgacagtgctctccgccagctgctgtctcagaagcccatggagcccccagcaccggctatcccttcccgctaccagcaggtgccccagcagcctcaccctggtttcactggtgggctgtccaaaccagctcttcaggtcgggcagcaccctacccaagggcacctgtattatgactaccagcagcctctggctcaggtgccagtgcagggaggacagccactgcaggccccacagatgctgtcacagcacatgcaacagatgcagcagcaccagtattacccaccgcagcaacagcagcaagccgggcaacagcgtatctccatgcaagaaatacagacgcagccgcaacaaattcgcccatcacagccacagccgccgccacagcagcagcagccgcagcagctacagctgcagcagcggcagggttcaatgcagatacctcagtattatcagccccaacccatgatgcagcacttgcaagagcagcagcagcaacagatgcacctgcagcctccttcttatcacagggaccctcaccagtataccccagagcaggcacacactgtccagctgattcccctgggctccatgtcccagtactactaccaggagccccagcagccctacagccaccccctctaccagcagagccacctgtcccagcaccagcagcgtgaggacagtcagctgaagacctactctagtgacagacaggcccaggccatgctgagctcccatggggacctggggcctcctgacacaggaatgggagacccagcgagctcagatctgacccgggtcagcagcaccctcccccatcgccccctcctatcccccagtgggatccacctcaacaacatggggcctcagcatcagcagctgtctcccagtgccatgtggccccagatgcacctacctgatgggagagcccagccagggtcccctgagtcaagtggccaacccaaaggagcgtttggggagcagtttgatgccaagaacaagctgacatgctccatctgcctgaaggagttcaagaacctgcctgccctgaatggccacatgcggtcccacgggggaatgagggcctcccccaacctcaaacaggaggaaggagagaaggtcctgccgcctcagccccagccaccactgccgcctccgcctccgcctccgccgccaccacagctccctcccgaggcagaaagcctcacgcctatggtcatgcccgtgtctgtccctgtcaagcttctcccgcccaagcccagctctcaggggttcaccaacagcaccgttgccgccccctccgccagagacaagccagccagctcgatgtcggacgacgagatgcctgtgctcgaaatccccaggaagcatcagccgagtgtgcccaaagccgaggagcccctcaagaccgtgcaggagaagaaaaagttccggcaccggccggaacctctcttcatcccgccgccgccctcctacaacccgaaccccgctgcctcctactcgggcgccaccctgtaccagagccagctgcgctccccgcgcgtcctcggggaccacctgctcctggaccccacccacgagctgcccccttacacgcccccacccatgctgagcccggtgcgccagggctcggggctcttcagcaatgtcctcatctccggccacggccctggcgcccacccgcagctgcccctgacgcccctgacgcccacaccacgggtgctgctgtgtcgctccaacagcatcgatggcagcaacgtgacggtcaccccagggcctggagagcagactgtagatgttgaaccacgcatcaacattggcttgagattccaagcagaaatccctgaactccaagatatctctgccctggcccaggacacacacaaggccacactggtatggaagccctggccagaactagaaaaccatgacctccagcaaagagtggagaatcttctgaatttgtgctgttccagtgcattgccaggtggagggaccaattctgaatttgctttgcactctctgtttgaggccaaaggtgatgtgatggttgctctggaaatgctgctactgcggaagcctgtcaggttaaaatgtcatcctttagcaaattaccactatgccggttcggacaagtggacctccctagaaagaaaactgtttaacaaagcactagccacttacagcaaagactttatttttgtacagaagatggtgaagtccaagacggtggctcagtgcgtggagtactactacacgtggaaaaagatcatgcggctggggcggaaacaccggacacgcctggcagaaatcatcgacgattgtgtgacaagtgaagaagaagaagagttagaggaggaggaggaggaggacccggaagaagataggaaatccacaaaagaagaagagagtgaggtgccgaagtccccggagccaccacccgtccccgtcctggctcccacggaggggccgcccctgcaggccctgggccagccctcaggctccttcatctgtgaaatgcccaactgtggggctgtgttcagctcccgacaggcactgaatggccatgcccgcatccacgggggcaccaaccaggtgaccaaggcccgaggtgccatcccctctgggaagcagaagcctggtggcacccagagtgggtactgttcggtaaagagctcaccctctcacagcaccaccagcggcgagacagaccccaccaccatcttcccctgcaaggagtgtggcaaagtcttcttcaagatcaaaagccgaaatgcacacatgaaaactcacaggcagcaggaggaacaacagaggcaaaaggctcagaaggcggcttttgcagctgagatggcagccacgattgagaggactacggggcccgtgggggcgccggggctgctgcccctggaccagctgagtctgatcaaacccatcaaggatgtggacatcctcgacgacgacgtcgtccagcagttgggaggtgtcatggaagaggctgaagttgtggacaccgatcttctcttggatgatcaagattcagtcttgcttcagggtgacgcagaactataaagccctgtgtgtcacttagagacagtgaaaacccacggcctccatcttcattaatcaggaaacctggactgcctgcttgttttgtaacccttttaaactacctgttttaaaagtggtcattttattcaggtttagaaaaaaaaatcctatttcttttcttttatttaaaaaaatttgtttttgtggggggttgggggaataaataattggcacaactaaaaaaaaaaaa

SEQ ID NO: 1790 - protein, 1200 aa, Homo sapiens
MGDQQLYKTNHVAHGSENLFYQQPPLGVHSGLNHNYGNAVTGGGMDAPQASPISPHFPQDTRDGLGLPVGSKNLGQMDTSRQGGWGSHAGPGNHVQLRGNLANSNMMWGAPAQAEPTDGYQYTYSQASEIRTQKLTSGVLHKLDSFTQVFANQNLRIQVNNMAQVLHTQSAVMDGAPDSALRQLLSQKPMEPPAPAIPSRYQQVPQQPHPGFTGGLSKPALQVGQHPTQGHLYYDYQQPLAQVPVQGGQPLQAPQMLSQHMQQMQQHQYYPPQQQQQAGQQRISMQEIQTQPQQIRPSQPQPPPQQQQPQQLQLQQRQGSMQIPQYYQPQPMMQHLQEQQQQQMHLQPPSYHRDPHQYTPEQAHTVQLIPLGSMSQYYYQEPQQPYSHPLYQQSHLSQHQQREDSQLKTYSSDRQAQAMLSSHGDLGPPDTGMGDPASSDLTRVSSTLPHRPLLSPSGIHLNNMGPQHQQLSPSAMWPQMHLPDGRAQPGSPESSGQPKGAFGEQFDAKNKLTCSICLKEFKNLPALNGHMRSHGGMRASPNLKQEEGEKVLPPQPQPPLPPPPPPPPPPQLPPEAESLTPMVMPVSVPVKLLPPKPSSQGFTNSTVAAPSARDKPASSMSDDEMPVLEIPRKHQPSVPKAEEPLKTVQEKKKFRHRPEPLFIPPPPSYNPNPAASYSGATLYQSQLRSPRVLGDHLLLDPTHELPPYTPPPMLSPVRQGSGLFSNVLISGHGPGAHPQLPLTPLTPTPRVLLCRSNSIDGSNVTVTPGPGEQTVDVEPRINIGLRFQAEIPELQDISALAQDTHKATLVWKPWPELENHDLQQRVENLLNLCCSSALPGGGTNSEFALHSLFEAKGDVMVALEMLLLRKPVRLKCHPLANYHYAGSDKWTSLERKLFNKALATYSKDFIFVQKMVKSKTVAQCVEYYYTWKKIMRLGRKHRTRLAEIIDDCVTSEEEEELEEEEEEDPEEDRKSTKEEESEVPKSPEPPPVPVLAPTEGPPLQALGQPSGSFICEMPNCGAVFSSRQALNGHARIHGGTNQVTKARGAIPSGKQKPGGTQSGYCSVKSSPSHSTTSGETDPTTIFPCKECGKVFFKIKSRNAHMKTHRQQEEQQRQKAQKAAFAAEMAATIERTTGPVGAPGLLPLDQLSLIKPIKDVDILDDDVVQQLGGVMEEAEVVDTDLLLDDQDSVLLQGDAEL

SEQ ID NO: 1791 - DNA, 3665 bp, Homo sapiens
ggcttggggcagccgggtagctcggaggtcgtggcgctgggggctagcaccagcgctctgtcgggaggcgcagcggttaggtggaccggtcagcggactcaccggccagggcgctcggtgctggaatttgatattcattgatccgggttttatccctcttcttttttcttaaacatttttttttaaaactgtattgtttctcgttttaatttatttttgcttgccattccccacttgaatcgggccgacggcttggggagattgctctacttccccaaatcactgtggattttggaaaccagcagaaagaggaaagaggtagcaagagctccagagagaagtcgaggaagagagagacggggtcagagagagcgcgcgggcgtgcgagcagcgaaagcgacaggggcaaagtgagtgacctgcttttgggggtgaccgccggagcgcggcgtgagccctcccccttgggatcccgcagctgaccagtcgcgctgacggacagacagacagacaccgcccccagccccagctaccacctcctccccggccggcggcggacagtggacgcggcggcgagccgcgggcaggggccggagcccgcgcccggaggcggggtggagggggtcggggctcgcggcgtcgcactgaaacttttcgtccaacttctgggctgttctcgcttcggaggagccgtggtccgcgcgggggaagccgagccgagcggagccgcgagaagtgctagctcgggccgggaggagccgcagccggaggagggggaggaggaagaagagaaggaagaggagagggggccgcagtggcgactcggcgctcggaagccgggctcatggacgggtgaggcggcggtgtgcgcagacagtgctccagccgcgcgcgctccccaggccctggcccgggcctcgggccggggaggaagagtagctcgccgaggcgccgaggagagcgggccgccccacagcccgagccggagagggagcgcgagccgcgccggccccggtcgggcctccgaaaccatgaactttctgctgtcttgggtgcattggagccttgccttgctgctctacctccaccatgccaagtggtcccaggctgcacccatggcagaaggaggagggcagaatcatcacgaagtggtgaagttcatggatgtctatcagcgcagctactgccatccaatcgagaccctggtggacatcttccaggagtaccctgatgagatcgagtacatcttcaagccatcctgtgtgcccctgatgcgatgcgggggctgctgcaatgacgagggcctggagtgtgtgcccactgaggagtccaacatcaccatgcagattatgcggatcaaacctcaccaaggccagcacataggagagatgagcttcctacagcacaacaaatgtgaatgcagaccaaagaaagatagagcaagacaagaaaaaaaatcagttcgaggaaagggaaaggggcaaaaacgaaagcgcaagaaatcccggtataagtcctggagcgtgtacgttggtgcccgctgctgtctaatgccctggagcctccctggcccccatccctgtgggccttgctcagagcggagaaagcatttgtttgtacaagatccgcagacgtgtaaatgttcctgcaaaaacacagactcgcgttgcaaggcgaggcagcttgagttaaacgaacgtacttgcagatgtgacaagccgaggcggtgagccgggcaggaggaaggagcctccctcagggtttcgggaaccagatctctcaccaggaaagactgatacagaacgatcgatacagaaaccacgctgccgccaccacaccatcaccatcgacagaacagtccttaatccagaaacctgaaatgaaggaagaggagactctgcgcagagcactttgggtccggagggcgagactccggcggaagcattcccgggcgggtgacccagcacggtccctcttggaattggattcgccattttatttttcttgctgctaaatcaccgagcccggaagattagagagttttatttctgggattcctgtagacacacccacccacatacatacatttatatatatatatattatatatatataaaaataaatatctctattttatatatataaaatatatatattctttttttaaattaacagtgctaatgttattggtgtcttcactggatgtatttgactgctgtggacttgagttgggaggggaatgttcccactcagatcctgacagggaagaggaggagatgagagactctggcatgatcttttttttgtcccacttggtggggccagggtcctctcccctgcccaggaatgtgcaaggccagggcatgggggcaaatatgacccagttttgggaacaccgacaaacccagccctggcgctgagcctctctaccccaggtcagacggacagaaagacagatcacaggtacagggatgaggacaccggctctgaccaggagtttggggagcttcaggacattgctgtgctttggggattccctccacatgctgcacgcgcatctcgcccccaggggcactgcctggaagattcaggagcctgggcggccttcgcttactctcacctgcttctgagttgcccaggagaccactggcagatgtcccggcgaagagaagagacacattgttggaagaagcagcccatgacagctccccttcctgggactcgccctcatcctcttcctgctccccttcctggggtgcagcctaaaaggacctatgtcctcacaccattgaaaccactagttctgtccccccaggagacctggttgtgtgtgtgtgagtggttgaccttcctccatcccctggtccttcccttcccttcccgaggcacagagagacagggcaggatccacgtgcccattgtggaggcagagaaaagagaaagtgttttatatacggtacttatttaatatccctttttaattagaaattaaaacagttaatttaattaaagagtagggttttttttcagtattcttggttaatatttaatttcaactatttatgagatgtatcttttgctctctcttgctctcttatttgtaccggtttttgtatataaaattcatgtttccaatctctctctccctgatcggtgacagtcactagcttatcttgaacagatatttaattttgctaacactcagctctgccctccccgatcccctggctccccagcacacattcctttgaaataaggtttcaatatacatctacatactatatatatatttggcaacttgtatttgtgtgtatatatatatatatatgtttatgtatatatgtgattctgataaaatagacattgctattctgttttttatatgtaaaaacaaaacaagaaaaaatagagaattctacatactaaatctctctccttttttaattttaatatttgttatcatttatttattggtgctactgtttatccgtaataattgtggggaaaagatattaacatcacgtctttgtctctagtgcagtttttcgagatattccgtagtacatatttatttttaaacaacgacaaagaaatacagatatatcttaaaaaaaaaaaagcattttgtattaaagaatttaattctgatctcaaaaaaaaaaaaa

SEQ ID NO: 1792 - protein, 412 aa, Homo sapiens
MTDRQTDTAPSPSYHLLPGRRRTVDAAASRGQGPEPAPGGGVEGVGARGVALKLFVQLLGCSRFGGAVVRAGEAEPSGAARSASSGREEPQPEEGEEEEEKEEERGPQWRLGARKPGSWTGEAAVCADSAPAARAPQALARASGRGGRVARRGAEESGPPHSPSRRGSASRAGPGRASETMNFLLSWVHWSLALLLYLHHAKWSQAAPMAEGGGQNHHEVVKFMDVYQRSYCHPIETLVDIFQEYPDEIEYIFKPSCVPLMRCGGCCNDEGLECVPTEESNITMQIMRIKPHQGQHIGEMSFLQHNKCECRPKKDRARQEKKSVRGKGKGQKRKRKKSRYKSWSVYVGARCCLMPWSLPGPHPCGPCSERRKHLFVQDPQTCKCSCKNTDSRCKARQLELNERTCRCDKPRR

SEQ ID NO: 1793 - DNA, 3596 bp, Homo sapiens
ggcttggggcagccgggtagctcggaggtcgtggcgctgggggctagcaccagcgctctgtcgggaggcgcagcggttaggtggaccggtcagcggactcaccggccagggcgctcggtgctggaatttgatattcattgatccgggttttatccctcttcttttttcttaaacatttttttttaaaactgtattgtttctcgttttaatttatttttgcttgccattccccacttgaatcgggccgacggcttggggagattgctctacttccccaaatcactgtggattttggaaaccagcagaaagaggaaagaggtagcaagagctccagagagaagtcgaggaagagagagacggggtcagagagagcgcgcgggcgtgcgagcagcgaaagcgacaggggcaaagtgagtgacctgcttttgggggtgaccgccggagcgcggcgtgagccctcccccttgggatcccgcagctgaccagtcgcgctgacggacagacagacagacaccgcccccagccccagctaccacctcctccccggccggcggcggacagtggacgcggcggcgagccgcgggcaggggccggagcccgcgcccggaggcggggtggagggggtcggggctcgcggcgtcgcactgaaacttttcgtccaacttctgggctgttctcgcttcggaggagccgtggtccgcgcgggggaagccgagccgagcggagccgcgagaagtgctagctcgggccgggaggagccgcagccggaggagggggaggaggaagaagagaaggaagaggagagggggccgcagtggcgactcggcgctcggaagccgggctcatggacgggtgaggcggcggtgtgcgcagacagtgctccagccgcgcgcgctccccaggccctggcccgggcctcgggccggggaggaagagtagctcgccgaggcgccgaggagagcgggccgccccacagcccgagccggagagggagcgcgagccgcgccggccccggtcgggcctccgaaaccatgaactttctgctgtcttgggtgcattggagccttgccttgctgctctacctccaccatgccaagtggtcccaggctgcacccatggcagaaggaggagggcagaatcatcacgaagtggtgaagttcatggatgtctatcagcgcagctactgccatccaatcgagaccctggtggacatcttccaggagtaccctgatgagatcgagtacatcttcaagccatcctgtgtgcccctgatgcgatgcgggggctgctgcaatgacgagggcctggagtgtgtgcccactgaggagtccaacatcaccatgcagattatgcggatcaaacctcaccaaggccagcacataggagagatgagcttcctacagcacaacaaatgtgaatgcagaccaaagaaagatagagcaagacaagaaaaaaaatcagttcgaggaaagggaaaggggcaaaaacgaaagcgcaagaaatcccgtccctgtgggccttgctcagagcggagaaagcatttgtttgtacaagatccgcagacgtgtaaatgttcctgcaaaaacacagactcgcgttgcaaggcgaggcagcttgagttaaacgaacgtacttgcagatgtgacaagccgaggcggtgagccgggcaggaggaaggagcctccctcagggtttcgggaaccagatctctcaccaggaaagactgatacagaacgatcgatacagaaaccacgctgccgccaccacaccatcaccatcgacagaacagtccttaatccagaaacctgaaatgaaggaagaggagactctgcgcagagcactttgggtccggagggcgagactccggcggaagcattcccgggcgggtgacccagcacggtccctcttggaattggattcgccattttatttttcttgctgctaaatcaccgagcccggaagattagagagttttatttctgggattcctgtagacacacccacccacatacatacatttatatatatatatattatatatatataaaaataaatatctctattttatatatataaaatatatatattctttttttaaattaacagtgctaatgttattggtgtcttcactggatgtatttgactgctgtggacttgagttgggaggggaatgttcccactcagatcctgacagggaagaggaggagatgagagactctggcatgatcttttttttgtcccacttggtggggccagggtcctctcccctgcccaggaatgtgcaaggccagggcatgggggcaaatatgacccagttttgggaacaccgacaaacccagccctggcgctgagcctctctaccccaggtcagacggacagaaagacagatcacaggtacagggatgaggacaccggctctgaccaggagtttggggagcttcaggacattgctgtgctttggggattccctccacatgctgcacgcgcatctcgcccccaggggcactgcctggaagattcaggagcctgggcggccttcgcttactctcacctgcttctgagttgcccaggagaccactggcagatgtcccggcgaagagaagagacacattgttggaagaagcagcccatgacagctccccttcctgggactcgccctcatcctcttcctgctccccttcctggggtgcagcctaaaaggacctatgtcctcacaccattgaaaccactagttctgtccccccaggagacctggttgtgtgtgtgtgagtggttgaccttcctccatcccctggtccttcccttcccttcccgaggcacagagagacagggcaggatccacgtgcccattgtggaggcagagaaaagagaaagtgttttatatacggtacttatttaatatccctttttaattagaaattaaaacagttaatttaattaaagagtagggttttttttcagtattcttggttaatatttaatttcaactatttatgagatgtatcttttgctctctcttgctctcttatttgtaccggtttttgtatataaaattcatgtttccaatctctctctccctgatcggtgacagtcactagcttatcttgaacagatatttaattttgctaacactcagctctgccctccccgatcccctggctccccagcacacattcctttgaaataaggtttcaatatacatctacatactatatatatatttggcaacttgtatttgtgtgtatatatatatatatatgtttatgtatatatgtgattctgataaaatagacattgctattctgttttttatatgtaaaaacaaaacaagaaaaaatagagaattctacatactaaatctctctccttttttaattttaatatttgttatcatttatttattggtgctactgtttatccgtaataattgtggggaaaagatattaacatcacgtctttgtctctagtgcagtttttcgagatattccgtagtacatatttatttttaaacaacgacaaagaaatacagatatatcttaaaaaaaaaaaagcattttgtattaaagaatttaattctgatctcaaaaaaaaaaaaa

SEQ ID NO: 1794 - protein, 389 aa, Homo sapiens
MTDRQTDTAPSPSYHLLPGRRRTVDAAASRGQGPEPAPGGGVEGVGARGVALKLFVQLLGCSRFGGAVVRAGEAEPSGAARSASSGREEPQPEEGEEEEEKEEERGPQWRLGARKPGSWTGEAAVCADSAPAARAPQALARASGRGGRVARRGAEESGPPHSPSRRGSASRAGPGRASETMNFLLSWVHWSLALLLYLHHAKWSQAAPMAEGGGQNHHEVVKFMDVYQRSYCHPIETLVDIFQEYPDEIEYIFKPSCVPLMRCGGCCNDEGLECVPTEESNITMQIMRIKPHQGQHIGEMSFLQHNKCECRPKKDRARQEKKSVRGKGKGQKRKRKKSRPCGPCSERRKHLFVQDPQTCKCSCKNTDSRCKARQLELNERTCRCDKPRR

SEQ ID NO: 1795 - DNA, 3542 bp, Homo sapiens
ggcttggggcagccgggtagctcggaggtcgtggcgctgggggctagcaccagcgctctgtcgggaggcgcagcggttaggtggaccggtcagcggactcaccggccagggcgctcggtgctggaatttgatattcattgatccgggttttatccctcttcttttttcttaaacatttttttttaaaactgtattgtttctcgttttaatttatttttgcttgccattccccacttgaatcgggccgacggcttggggagattgctctacttccccaaatcactgtggattttggaaaccagcagaaagaggaaagaggtagcaagagctccagagagaagtcgaggaagagagagacggggtcagagagagcgcgcgggcgtgcgagcagcgaaagcgacaggggcaaagtgagtgacctgcttttgggggtgaccgccggagcgcggcgtgagccctcccccttgggatcccgcagctgaccagtcgcgctgacggacagacagacagacaccgcccccagccccagctaccacctcctccccggccggcggcggacagtggacgcggcggcgagccgcgggcaggggccggagcccgcgcccggaggcggggtggagggggtcggggctcgcggcgtcgcactgaaacttttcgtccaacttctgggctgttctcgcttcggaggagccgtggtccgcgcgggggaagccgagccgagcggagccgcgagaagtgctagctcgggccgggaggagccgcagccggaggagggggaggaggaagaagagaaggaagaggagagggggccgcagtggcgactcggcgctcggaagccgggctcatggacgggtgaggcggcggtgtgcgcagacagtgctccagccgcgcgcgctccccaggccctggcccgggcctcgggccggggaggaagagtagctcgccgaggcgccgaggagagcgggccgccccacagcccgagccggagagggagcgcgagccgcgccggccccggtcgggcctccgaaaccatgaactttctgctgtcttgggtgcattggagccttgccttgctgctctacctccaccatgccaagtggtcccaggctgcacccatggcagaaggaggagggcagaatcatcacgaagtggtgaagttcatggatgtctatcagcgcagctactgccatccaatcgagaccctggtggacatcttccaggagtaccctgatgagatcgagtacatcttcaagccatcctgtgtgcccctgatgcgatgcgggggctgctgcaatgacgagggcctggagtgtgtgcccactgaggagtccaacatcaccatgcagattatgcggatcaaacctcaccaaggccagcacataggagagatgagcttcctacagcacaacaaatgtgaatgcagaccaaagaaagatagagcaagacaagaaaatccctgtgggccttgctcagagcggagaaagcatttgtttgtacaagatccgcagacgtgtaaatgttcctgcaaaaacacagactcgcgttgcaaggcgaggcagcttgagttaaacgaacgtacttgcagatgtgacaagccgaggcggtgagccgggcaggaggaaggagcctccctcagggtttcgggaaccagatctctcaccaggaaagactgatacagaacgatcgatacagaaaccacgctgccgccaccacaccatcaccatcgacagaacagtccttaatccagaaacctgaaatgaaggaagaggagactctgcgcagagcactttgggtccggagggcgagactccggcggaagcattcccgggcgggtgacccagcacggtccctcttggaattggattcgccattttatttttcttgctgctaaatcaccgagcccggaagattagagagttttatttctgggattcctgtagacacacccacccacatacatacatttatatatatatatattatatatatataaaaataaatatctctattttatatatataaaatatatatattctttttttaaattaacagtgctaatgttattggtgtcttcactggatgtatttgactgctgtggacttgagttgggaggggaatgttcccactcagatcctgacagggaagaggaggagatgagagactctggcatgatcttttttttgtcccacttggtggggccagggtcctctcccctgcccaggaatgtgcaaggccagggcatgggggcaaatatgacccagttttgggaacaccgacaaacccagccctggcgctgagcctctctaccccaggtcagacggacagaaagacagatcacaggtacagggatgaggacaccggctctgaccaggagtttggggagcttcaggacattgctgtgctttggggattccctccacatgctgcacgcgcatctcgcccccaggggcactgcctggaagattcaggagcctgggcggccttcgcttactctcacctgcttctgagttgcccaggagaccactggcagatgtcccggcgaagagaagagacacattgttggaagaagcagcccatgacagctccccttcctgggactcgccctcatcctcttcctgctccccttcctggggtgcagcctaaaaggacctatgtcctcacaccattgaaaccactagttctgtccccccaggagacctggttgtgtgtgtgtgagtggttgaccttcctccatcccctggtccttcccttcccttcccgaggcacagagagacagggcaggatccacgtgcccattgtggaggcagagaaaagagaaagtgttttatatacggtacttatttaatatccctttttaattagaaattaaaacagttaatttaattaaagagtagggttttttttcagtattcttggttaatatttaatttcaactatttatgagatgtatcttttgctctctcttgctctcttatttgtaccggtttttgtatataaaattcatgtttccaatctctctctccctgatcggtgacagtcactagcttatcttgaacagatatttaattttgctaacactcagctctgccctccccgatcccctggctccccagcacacattcctttgaaataaggtttcaatatacatctacatactatatatatatttggcaacttgtatttgtgtgtatatatatatatatatgtttatgtatatatgtgattctgataaaatagacattgctattctgttttttatatgtaaaaacaaaacaagaaaaaatagagaattctacatactaaatctctctccttttttaattttaatatttgttatcatttatttattggtgctactgtttatccgtaataattgtggggaaaagatattaacatcacgtctttgtctctagtgcagtttttcgagatattccgtagtacatatttatttttaaacaacgacaaagaaatacagatatatcttaaaaaaaaaaaagcattttgtattaaagaatttaattctgatctcaaaaaaaaaaaaa

SEQ ID NO: 1796 - protein, 371 aa, Homo sapiens
MTDRQTDTAPSPSYHLLPGRRRTVDAAASRGQGPEPAPGGGVEGVGARGVALKLFVQLLGCSRFGGAVVRAGEAEPSGAARSASSGREEPQPEEGEEEEEKEEERGPQWRLGARKPGSWTGEAAVCADSAPAARAPQALARASGRGGRVARRGAEESGPPHSPSRRGSASRAGPGRASETMNFLLSWVHWSLALLLYLHHAKWSQAAPMAEGGGQNHHEVVKFMDVYQRSYCHPIETLVDIFQEYPDEIEYIFKPSCVPLMRCGGCCNDEGLECVPTEESNITMQIMRIKPHQGQHIGEMSFLQHNKCECRPKKDRARQENPCGPCSERRKHLFVQDPQTCKCSCKNTDSRCKARQLELNERTCRCDKPRR

SEQ ID NO: 1797 - DNA, 3507 bp, Homo sapiens
ggcttggggcagccgggtagctcggaggtcgtggcgctgggggctagcaccagcgctctgtcgggaggcgcagcggttaggtggaccggtcagcggactcaccggccagggcgctcggtgctggaatttgatattcattgatccgggttttatccctcttcttttttcttaaacatttttttttaaaactgtattgtttctcgttttaatttatttttgcttgccattccccacttgaatcgggccgacggcttggggagattgctctacttccccaaatcactgtggattttggaaaccagcagaaagaggaaagaggtagcaagagctccagagagaagtcgaggaagagagagacggggtcagagagagcgcgcgggcgtgcgagcagcgaaagcgacaggggcaaagtgagtgacctgcttttgggggtgaccgccggagcgcggcgtgagccctcccccttgggatcccgcagctgaccagtcgcgctgacggacagacagacagacaccgcccccagccccagctaccacctcctccccggccggcggcggacagtggacgcggcggcgagccgcgggcaggggccggagcccgcgcccggaggcggggtggagggggtcggggctcgcggcgtcgcactgaaacttttcgtccaacttctgggctgttctcgcttcggaggagccgtggtccgcgcgggggaagccgagccgagcggagccgcgagaagtgctagctcgggccgggaggagccgcagccggaggagggggaggaggaagaagagaaggaagaggagagggggccgcagtggcgactcggcgctcggaagccgggctcatggacgggtgaggcggcggtgtgcgcagacagtgctccagccgcgcgcgctccccaggccctggcccgggcctcgggccggggaggaagagtagctcgccgaggcgccgaggagagcgggccgccccacagcccgagccggagagggagcgcgagccgcgccggccccggtcgggcctccgaaaccatgaactttctgctgtcttgggtgcattggagccttgccttgctgctctacctccaccatgccaagtggtcccaggctgcacccatggcagaaggaggagggcagaatcatcacgaagtggtgaagttcatggatgtctatcagcgcagctactgccatccaatcgagaccctggtggacatcttccaggagtaccctgatgagatcgagtacatcttcaagccatcctgtgtgcccctgatgcgatgcgggggctgctgcaatgacgagggcctggagtgtgtgcccactgaggagtccaacatcaccatgcagattatgcggatcaaacctcaccaaggccagcacataggagagatgagcttcctacagcacaacaaatgtgaatgcagaccaaagaaagatagagcaagacaagaaaatccctgtgggccttgctcagagcggagaaagcatttgtttgtacaagatccgcagacgtgtaaatgttcctgcaaaaacacagactcgcgttgcaagatgtgacaagccgaggcggtgagccgggcaggaggaaggagcctccctcagggtttcgggaaccagatctctcaccaggaaagactgatacagaacgatcgatacagaaaccacgctgccgccaccacaccatcaccatcgacagaacagtccttaatccagaaacctgaaatgaaggaagaggagactctgcgcagagcactttgggtccggagggcgagactccggcggaagcattcccgggcgggtgacccagcacggtccctcttggaattggattcgccattttatttttcttgctgctaaatcaccgagcccggaagattagagagttttatttctgggattcctgtagacacacccacccacatacatacatttatatatatatatattatatatatataaaaataaatatctctattttatatatataaaatatatatattctttttttaaattaacagtgctaatgttattggtgtcttcactggatgtatttgactgctgtggacttgagttgggaggggaatgttcccactcagatcctgacagggaagaggaggagatgagagactctggcatgatcttttttttgtcccacttggtggggccagggtcctctcccctgcccaggaatgtgcaaggccagggcatgggggcaaatatgacccagttttgggaacaccgacaaacccagccctggcgctgagcctctctaccccaggtcagacggacagaaagacagatcacaggtacagggatgaggacaccggctctgaccaggagtttggggagcttcaggacattgctgtgctttggggattccctccacatgctgcacgcgcatctcgcccccaggggcactgcctggaagattcaggagcctgggcggccttcgcttactctcacctgcttctgagttgcccaggagaccactggcagatgtcccggcgaagagaagagacacattgttggaagaagcagcccatgacagctccccttcctgggactcgccctcatcctcttcctgctccccttcctggggtgcagcctaaaaggacctatgtcctcacaccattgaaaccactagttctgtccccccaggagacctggttgtgtgtgtgtgagtggttgaccttcctccatcccctggtccttcccttcccttcccgaggcacagagagacagggcaggatccacgtgcccattgtggaggcagagaaaagagaaagtgttttatatacggtacttatttaatatccctttttaattagaaattaaaacagttaatttaattaaagagtagggttttttttcagtattcttggttaatatttaatttcaactatttatgagatgtatcttttgctctctcttgctctcttatttgtaccggtttttgtatataaaattcatgtttccaatctctctctccctgatcggtgacagtcactagcttatcttgaacagatatttaattttgctaacactcagctctgccctccccgatcccctggctccccagcacacattcctttgaaataaggtttcaatatacatctacatactatatatatatttggcaacttgtatttgtgtgtatatatatatatatatgtttatgtatatatgtgattctgataaaatagacattgctattctgttttttatatgtaaaaacaaaacaagaaaaaatagagaattctacatactaaatctctctccttttttaattttaatatttgttatcatttatttattggtgctactgtttatccgtaataattgtggggaaaagatattaacatcacgtctttgtctctagtgcagtttttcgagatattccgtagtacatatttatttttaaacaacgacaaagaaatacagatatatcttaaaaaaaaaaaagcattttgtattaaagaatttaattctgatctcaaaaaaaaaaaaa

SEQ ID NO: 1798 - protein, 354 aa, Homo sapiens
MTDRQTDTAPSPSYHLLPGRRRTVDAAASRGQGPEPAPGGGVEGVGARGVALKLFVQLLGCSRFGGAVVRAGEAEPSGAARSASSGREEPQPEEGEEEEEKEEERGPQWRLGARKPGSWTGEAAVCADSAPAARAPQALARASGRGGRVARRGAEESGPPHSPSRRGSASRAGPGRASETMNFLLSWVHWSLALLLYLHHAKWSQAAPMAEGGGQNHHEVVKFMDVYQRSYCHPIETLVDIFQEYPDEIEYIFKPSCVPLMRCGGCCNDEGLECVPTEESNITMQIMRIKPHQGQHIGEMSFLQHNKCECRPKKDRARQENPCGPCSERRKHLFVQDPQTCKCSCKNTDSRCKM

SEQ ID NO: 1799 - DNA, 3410 bp, Homo sapiens
ggcttggggcagccgggtagctcggaggtcgtggcgctgggggctagcaccagcgctctgtcgggaggcgcagcggttaggtggaccggtcagcggactcaccggccagggcgctcggtgctggaatttgatattcattgatccgggttttatccctcttcttttttcttaaacatttttttttaaaactgtattgtttctcgttttaatttatttttgcttgccattccccacttgaatcgggccgacggcttggggagattgctctacttccccaaatcactgtggattttggaaaccagcagaaagaggaaagaggtagcaagagctccagagagaagtcgaggaagagagagacggggtcagagagagcgcgcgggcgtgcgagcagcgaaagcgacaggggcaaagtgagtgacctgcttttgggggtgaccgccggagcgcggcgtgagccctcccccttgggatcccgcagctgaccagtcgcgctgacggacagacagacagacaccgcccccagccccagctaccacctcctccccggccggcggcggacagtggacgcggcggcgagccgcgggcaggggccggagcccgcgcccggaggcggggtggagggggtcggggctcgcggcgtcgcactgaaacttttcgtccaacttctgggctgttctcgcttcggaggagccgtggtccgcgcgggggaagccgagccgagcggagccgcgagaagtgctagctcgggccgggaggagccgcagccggaggagggggaggaggaagaagagaaggaagaggagagggggccgcagtggcgactcggcgctcggaagccgggctcatggacgggtgaggcggcggtgtgcgcagacagtgctccagccgcgcgcgctccccaggccctggcccgggcctcgggccggggaggaagagtagctcgccgaggcgccgaggagagcgggccgccccacagcccgagccggagagggagcgcgagccgcgccggccccggtcgggcctccgaaaccatgaactttctgctgtcttgggtgcattggagccttgccttgctgctctacctccaccatgccaagtggtcccaggctgcacccatggcagaaggaggagggcagaatcatcacgaagtggtgaagttcatggatgtctatcagcgcagctactgccatccaatcgagaccctggtggacatcttccaggagtaccctgatgagatcgagtacatcttcaagccatcctgtgtgcccctgatgcgatgcgggggctgctgcaatgacgagggcctggagtgtgtgcccactgaggagtccaacatcaccatgcagattatgcggatcaaacctcaccaaggccagcacataggagagatgagcttcctacagcacaacaaatgtgaatgcagaccaaagaaagatagagcaagacaagaaaaatgtgacaagccgaggcggtgagccgggcaggaggaaggagcctccctcagggtttcgggaaccagatctctcaccaggaaagactgatacagaacgatcgatacagaaaccacgctgccgccaccacaccatcaccatcgacagaacagtccttaatccagaaacctgaaatgaaggaagaggagactctgcgcagagcactttgggtccggagggcgagactccggcggaagcattcccgggcgggtgacccagcacggtccctcttggaattggattcgccattttatttttcttgctgctaaatcaccgagcccggaagattagagagttttatttctgggattcctgtagacacacccacccacatacatacatttatatatatatatattatatatatataaaaataaatatctctattttatatatataaaatatatatattctttttttaaattaacagtgctaatgttattggtgtcttcactggatgtatttgactgctgtggacttgagttgggaggggaatgttcccactcagatcctgacagggaagaggaggagatgagagactctggcatgatcttttttttgtcccacttggtggggccagggtcctctcccctgcccaggaatgtgcaaggccagggcatgggggcaaatatgacccagttttgggaacaccgacaaacccagccctggcgctgagcctctctaccccaggtcagacggacagaaagacagatcacaggtacagggatgaggacaccggctctgaccaggagtttggggagcttcaggacattgctgtgctttggggattccctccacatgctgcacgcgcatctcgcccccaggggcactgcctggaagattcaggagcctgggcggccttcgcttactctcacctgcttctgagttgcccaggagaccactggcagatgtcccggcgaagagaagagacacattgttggaagaagcagcccatgacagctccccttcctgggactcgccctcatcctcttcctgctccccttcctggggtgcagcctaaaaggacctatgtcctcacaccattgaaaccactagttctgtccccccaggagacctggttgtgtgtgtgtgagtggttgaccttcctccatcccctggtccttcccttcccttcccgaggcacagagagacagggcaggatccacgtgcccattgtggaggcagagaaaagagaaagtgttttatatacggtacttatttaatatccctttttaattagaaattaaaacagttaatttaattaaagagtagggttttttttcagtattcttggttaatatttaatttcaactatttatgagatgtatcttttgctctctcttgctctcttatttgtaccggtttttgtatataaaattcatgtttccaatctctctctccctgatcggtgacagtcactagcttatcttgaacagatatttaattttgctaacactcagctctgccctccccgatcccctggctccccagcacacattcctttgaaataaggtttcaatatacatctacatactatatatatatttggcaacttgtatttgtgtgtatatatatatatatatgtttatgtatatatgtgattctgataaaatagacattgctattctgttttttatatgtaaaaacaaaacaagaaaaaatagagaattctacatactaaatctctctccttttttaattttaatatttgttatcatttatttattggtgctactgtttatccgtaataattgtggggaaaagatattaacatcacgtctttgtctctagtgcagtttttcgagatattccgtagtacatatttatttttaaacaacgacaaagaaatacagatatatcttaaaaaaaaaaaagcattttgtattaaagaatttaattctgatctcaaaaaaaaaaaaa

SEQ ID NO: 1800 - protein, 327 aa, Homo sapiens
MTDRQTDTAPSPSYHLLPGRRRTVDAAASRGQGPEPAPGGGVEGVGARGVALKLFVQLLGCSRFGGAVVRAGEAEPSGAARSASSGREEPQPEEGEEEEEKEEERGPQWRLGARKPGSWTGEAAVCADSAPAARAPQALARASGRGGRVARRGAEESGPPHSPSRRGSASRAGPGRASETMNFLLSWVHWSLALLLYLHHAKWSQAAPMAEGGGQNHHEVVKFMDVYQRSYCHPIETLVDIFQEYPDEIEYIFKPSCVPLMRCGGCCNDEGLECVPTEESNITMQIMRIKPHQGQHIGEMSFLQHNKCECRPKKDRARQEKCDKPRR

SEQ ID NO: 1801 - DNA, 3476 bp, Homo sapiens
ggcttggggcagccgggtagctcggaggtcgtggcgctgggggctagcaccagcgctctgtcgggaggcgcagcggttaggtggaccggtcagcggactcaccggccagggcgctcggtgctggaatttgatattcattgatccgggttttatccctcttcttttttcttaaacatttttttttaaaactgtattgtttctcgttttaatttatttttgcttgccattccccacttgaatcgggccgacggcttggggagattgctctacttccccaaatcactgtggattttggaaaccagcagaaagaggaaagaggtagcaagagctccagagagaagtcgaggaagagagagacggggtcagagagagcgcgcgggcgtgcgagcagcgaaagcgacaggggcaaagtgagtgacctgcttttgggggtgaccgccggagcgcggcgtgagccctcccccttgggatcccgcagctgaccagtcgcgctgacggacagacagacagacaccgcccccagccccagctaccacctcctccccggccggcggcggacagtggacgcggcggcgagccgcgggcaggggccggagcccgcgcccggaggcggggtggagggggtcggggctcgcggcgtcgcactgaaacttttcgtccaacttctgggctgttctcgcttcggaggagccgtggtccgcgcgggggaagccgagccgagcggagccgcgagaagtgctagctcgggccgggaggagccgcagccggaggagggggaggaggaagaagagaaggaagaggagagggggccgcagtggcgactcggcgctcggaagccgggctcatggacgggtgaggcggcggtgtgcgcagacagtgctccagccgcgcgcgctccccaggccctggcccgggcctcgggccggggaggaagagtagctcgccgaggcgccgaggagagcgggccgccccacagcccgagccggagagggagcgcgagccgcgccggccccggtcgggcctccgaaaccatgaactttctgctgtcttgggtgcattggagccttgccttgctgctctacctccaccatgccaagtggtcccaggctgcacccatggcagaaggaggagggcagaatcatcacgaagtggtgaagttcatggatgtctatcagcgcagctactgccatccaatcgagaccctggtggacatcttccaggagtaccctgatgagatcgagtacatcttcaagccatcctgtgtgcccctgatgcgatgcgggggctgctgcaatgacgagggcctggagtgtgtgcccactgaggagtccaacatcaccatgcagattatgcggatcaaacctcaccaaggccagcacataggagagatgagcttcctacagcacaacaaatgtgaatgcagaccaaagaaagatagagcaagacaagaaaatccctgtgggccttgctcagagcggagaaagcatttgtttgtacaagatccgcagacgtgtaaatgttcctgcaaaaacacagactcgcgttgcaaggcgaggcagcttgagttaaacgaacgtacttgcagatctctcaccaggaaagactgatacagaacgatcgatacagaaaccacgctgccgccaccacaccatcaccatcgacagaacagtccttaatccagaaacctgaaatgaaggaagaggagactctgcgcagagcactttgggtccggagggcgagactccggcggaagcattcccgggcgggtgacccagcacggtccctcttggaattggattcgccattttatttttcttgctgctaaatcaccgagcccggaagattagagagttttatttctgggattcctgtagacacacccacccacatacatacatttatatatatatatattatatatatataaaaataaatatctctattttatatatataaaatatatatattctttttttaaattaacagtgctaatgttattggtgtcttcactggatgtatttgactgctgtggacttgagttgggaggggaatgttcccactcagatcctgacagggaagaggaggagatgagagactctggcatgatcttttttttgtcccacttggtggggccagggtcctctcccctgcccaggaatgtgcaaggccagggcatgggggcaaatatgacccagttttgggaacaccgacaaacccagccctggcgctgagcctctctaccccaggtcagacggacagaaagacagatcacaggtacagggatgaggacaccggctctgaccaggagtttggggagcttcaggacattgctgtgctttggggattccctccacatgctgcacgcgcatctcgcccccaggggcactgcctggaagattcaggagcctgggcggccttcgcttactctcacctgcttctgagttgcccaggagaccactggcagatgtcccggcgaagagaagagacacattgttggaagaagcagcccatgacagctccccttcctgggactcgccctcatcctcttcctgctccccttcctggggtgcagcctaaaaggacctatgtcctcacaccattgaaaccactagttctgtccccccaggagacctggttgtgtgtgtgtgagtggttgaccttcctccatcccctggtccttcccttcccttcccgaggcacagagagacagggcaggatccacgtgcccattgtggaggcagagaaaagagaaagtgttttatatacggtacttatttaatatccctttttaattagaaattaaaacagttaatttaattaaagagtagggttttttttcagtattcttggttaatatttaatttcaactatttatgagatgtatcttttgctctctcttgctctcttatttgtaccggtttttgtatataaaattcatgtttccaatctctctctccctgatcggtgacagtcactagcttatcttgaacagatatttaattttgctaacactcagctctgccctccccgatcccctggctccccagcacacattcctttgaaataaggtttcaatatacatctacatactatatatatatttggcaacttgtatttgtgtgtatatatatatatatatgtttatgtatatatgtgattctgataaaatagacattgctattctgttttttatatgtaaaaacaaaacaagaaaaaatagagaattctacatactaaatctctctccttttttaattttaatatttgttatcatttatttattggtgctactgtttatccgtaataattgtggggaaaagatattaacatcacgtctttgtctctagtgcagtttttcgagatattccgtagtacatatttatttttaaacaacgacaaagaaatacagatatatcttaaaaaaaaaaaagcattttgtattaaagaatttaattctgatctcaaaaaaaaaaaaa

SEQ ID NO: 1802 - protein, 371 aa, Homo sapiens
MTDRQTDTAPSPSYHLLPGRRRTVDAAASRGQGPEPAPGGGVEGVGARGVALKLFVQLLGCSRFGGAVVRAGEAEPSGAARSASSGREEPQPEEGEEEEEKEEERGPQWRLGARKPGSWTGEAAVCADSAPAARAPQALARASGRGGRVARRGAEESGPPHSPSRRGSASRAGPGRASETMNFLLSWVHWSLALLLYLHHAKWSQAAPMAEGGGQNHHEVVKFMDVYQRSYCHPIETLVDIFQEYPDEIEYIFKPSCVPLMRCGGCCNDEGLECVPTEESNITMQIMRIKPHQGQHIGEMSFLQHNKCECRPKKDRARQENPCGPCSERRKHLFVQDPQTCKCSCKNTDSRCKARQLELNERTCRSLTRKD

SEQ ID NO: 1803 - DNA, 3614 bp, Homo sapiens
ggcttggggcagccgggtagctcggaggtcgtggcgctgggggctagcaccagcgctctgtcgggaggcgcagcggttaggtggaccggtcagcggactcaccggccagggcgctcggtgctggaatttgatattcattgatccgggttttatccctcttcttttttcttaaacatttttttttaaaactgtattgtttctcgttttaatttatttttgcttgccattccccacttgaatcgggccgacggcttggggagattgctctacttccccaaatcactgtggattttggaaaccagcagaaagaggaaagaggtagcaagagctccagagagaagtcgaggaagagagagacggggtcagagagagcgcgcgggcgtgcgagcagcgaaagcgacaggggcaaagtgagtgacctgcttttgggggtgaccgccggagcgcggcgtgagccctcccccttgggatcccgcagctgaccagtcgcgctgacggacagacagacagacaccgcccccagccccagctaccacctcctccccggccggcggcggacagtggacgcggcggcgagccgcgggcaggggccggagcccgcgcccggaggcggggtggagggggtcggggctcgcggcgtcgcactgaaacttttcgtccaacttctgggctgttctcgcttcggaggagccgtggtccgcgcgggggaagccgagccgagcggagccgcgagaagtgctagctcgggccgggaggagccgcagccggaggagggggaggaggaagaagagaaggaagaggagagggggccgcagtggcgactcggcgctcggaagccgggctcatggacgggtgaggcggcggtgtgcgcagacagtgctccagccgcgcgcgctccccaggccctggcccgggcctcgggccggggaggaagagtagctcgccgaggcgccgaggagagcgggccgccccacagcccgagccggagagggagcgcgagccgcgccggccccggtcgggcctccgaaaccatgaactttctgctgtcttgggtgcattggagccttgccttgctgctctacctccaccatgccaagtggtcccaggctgcacccatggcagaaggaggagggcagaatcatcacgaagtggtgaagttcatggatgtctatcagcgcagctactgccatccaatcgagaccctggtggacatcttccaggagtaccctgatgagatcgagtacatcttcaagccatcctgtgtgcccctgatgcgatgcgggggctgctgcaatgacgagggcctggagtgtgtgcccactgaggagtccaacatcaccatgcagattatgcggatcaaacctcaccaaggccagcacataggagagatgagcttcctacagcacaacaaatgtgaatgcagaccaaagaaagatagagcaagacaagaaaaaaaatcagttcgaggaaagggaaaggggcaaaaacgaaagcgcaagaaatcccggtataagtcctggagcgttccctgtgggccttgctcagagcggagaaagcatttgtttgtacaagatccgcagacgtgtaaatgttcctgcaaaaacacagactcgcgttgcaaggcgaggcagcttgagttaaacgaacgtacttgcagatgtgacaagccgaggcggtgagccgggcaggaggaaggagcctccctcagggtttcgggaaccagatctctcaccaggaaagactgatacagaacgatcgatacagaaaccacgctgccgccaccacaccatcaccatcgacagaacagtccttaatccagaaacctgaaatgaaggaagaggagactctgcgcagagcactttgggtccggagggcgagactccggcggaagcattcccgggcgggtgacccagcacggtccctcttggaattggattcgccattttatttttcttgctgctaaatcaccgagcccggaagattagagagttttatttctgggattcctgtagacacacccacccacatacatacatttatatatatatatattatatatatataaaaataaatatctctattttatatatataaaatatatatattctttttttaaattaacagtgctaatgttattggtgtcttcactggatgtatttgactgctgtggacttgagttgggaggggaatgttcccactcagatcctgacagggaagaggaggagatgagagactctggcatgatcttttttttgtcccacttggtggggccagggtcctctcccctgcccaggaatgtgcaaggccagggcatgggggcaaatatgacccagttttgggaacaccgacaaacccagccctggcgctgagcctctctaccccaggtcagacggacagaaagacagatcacaggtacagggatgaggacaccggctctgaccaggagtttggggagcttcaggacattgctgtgctttggggattccctccacatgctgcacgcgcatctcgcccccaggggcactgcctggaagattcaggagcctgggcggccttcgcttactctcacctgcttctgagttgcccaggagaccactggcagatgtcccggcgaagagaagagacacattgttggaagaagcagcccatgacagctccccttcctgggactcgccctcatcctcttcctgctccccttcctggggtgcagcctaaaaggacctatgtcctcacaccattgaaaccactagttctgtccccccaggagacctggttgtgtgtgtgtgagtggttgaccttcctccatcccctggtccttcccttcccttcccgaggcacagagagacagggcaggatccacgtgcccattgtggaggcagagaaaagagaaagtgttttatatacggtacttatttaatatccctttttaattagaaattaaaacagttaatttaattaaagagtagggttttttttcagtattcttggttaatatttaatttcaactatttatgagatgtatcttttgctctctcttgctctcttatttgtaccggtttttgtatataaaattcatgtttccaatctctctctccctgatcggtgacagtcactagcttatcttgaacagatatttaattttgctaacactcagctctgccctccccgatcccctggctccccagcacacattcctttgaaataaggtttcaatatacatctacatactatatatatatttggcaacttgtatttgtgtgtatatatatatatatatgtttatgtatatatgtgattctgataaaatagacattgctattctgttttttatatgtaaaaacaaaacaagaaaaaatagagaattctacatactaaatctctctccttttttaattttaatatttgttatcatttatttattggtgctactgtttatccgtaataattgtggggaaaagatattaacatcacgtctttgtctctagtgcagtttttcgagatattccgtagtacatatttatttttaaacaacgacaaagaaatacagatatatcttaaaaaaaaaaaagcattttgtattaaagaatttaattctgatctcaaaaaaaaaaaaa

SEQ ID NO: 1804 - protein, 395 aa, Homo sapiens
MTDRQTDTAPSPSYHLLPGRRRTVDAAASRGQGPEPAPGGGVEGVGARGVALKLFVQLLGCSRFGGAVVRAGEAEPSGAARSASSGREEPQPEEGEEEEEKEEERGPQWRLGARKPGSWTGEAAVCADSAPAARAPQALARASGRGGRVARRGAEESGPPHSPSRRGSASRAGPGRASETMNFLLSWVHWSLALLLYLHHAKWSQAAPMAEGGGQNHHEVVKFMDVYQRSYCHPIETLVDIFQEYPDEIEYIFKPSCVPLMRCGGCCNDEGLECVPTEESNITMQIMRIKPHQGQHIGEMSFLQHNKCECRPKKDRARQEKKSVRGKGKGQKRKRKKSRYKSWSVPCGPCSERRKHLFVQDPQTCKCSCKNTDSRCKARQLELNERTCRCDKPRR

SEQ ID NO: 1805 - DNA, 3180 bp, Homo sapiens
ggaagctccgcgcggcggcgggggcggcgacggcgactggcgggtgggagtggaggcaccggctggcgggcgggggtacagggacggggcaggggctcccgctccaggttccttgaagcacttccgaccgcgaagcccggcgcgagaagcgagctaacccaagagccaacaacgagcgcggagagggcagcggactgagcggagccgccggccagagcgggctcggagcccgggtctccgccgctcgggacccggctaggcggcggcgggggcggcgatgttccactgcatccccctgtggcggtgcaaccgtcatgtggagagcatcgacaagcgccactgctcgctggtctacgtccccgaggagatctaccgctatgcccggagcctggaggagctgctgctggacgccaaccagctccgcgagctgcccgagcaatttttccagctagtcaaattacgaaagcttggacttagtgataatgaaattcagcggctccctccagaaatagcaaacttcatgcagctggtggaactagatgtgtctcgaaatgagattcctgaaattccagaaagcatttcattctgtaaagcactgcaggtagctgacttcagcggaaacccactgactaggttgccagaaagctttcctgaattacagaatttaacatgtctttctgtaaatgacatctcactacagtctctacctgaaaatattggcaatctttataacctggcttcactggaactgagagagaatcttcttacatatcttcctgactctcttacccagctgcgaagactagaagaacttgatttaggaaacaatgaaatatataatttgccagaatcaattggagccctcttacatctaaaagatctctggttggatggaaatcaactgtcagaattacctcaggaaataggaaatctgaagaacctgctgtgtttagatgtctctgaaaacaggttggaaagacttcctgaagaaatcagtggcctgacttcattaacggatttagtcatttcccagaacttattagaaacgattccggatggcattggaaaactaaagaaactgtcaatcttgaaggtggatcagaatagactcacacagttgcctgaagcagttggggaatgtgaaagtctcactgagttagttcttacagaaaatcagctcctgaccctgcctaaaagcattggaaaactaaagaagttgagcaacttgaatgcagacagaaataaattagtgtccttaccaaaagagatcggcgggtgctgcagcctcactgtgttctgtgtacgtgacaacagactaactcggatacctgcagaggtgtcacaggcaacagaacttcatgtcctggatgtggcagggaacaggttgctgcatctacctttatccctgactgccttgaagttgaaggctctgtggctatctgacaaccagtcccagcccctgcttacattccagacagacacagactacaccacaggagagaagattttaacctgtgtcttacttcctcagctgccttctgaacctacttgtcaagagaatctgcctcgctgtggtgcactggagaacttggtaaatgatgtctctgatgaagcctggaacgagcgtgctgtcaacagagtcagtgcgatccgatttgtggaggatgagaaagatgaagaagacaatgagacgagaacacttctaaggcgagccactccacacccaggggagttaaagcacatgaaaaagacagtggagaatttacggaatgacatgaatgctgctaaaggactggactcaaacaaaaacgaggtcaatcatgccattgaccgagtgaccacttctgtgtagagtttcacctccaagttttacctcctgtgtcttcctctgctgtcgagacgttcctgtctgcttcccgggagcctcacgtgctccttgtcctaaccagcccccgcgcgccatcttcccgtggagtgtggggaagctgctgtctcccaggaagtgccttactcatcccgcaaccagtcagcgcaccagtggtctcccggtgtgattttttttttttttaatttcagttgtttgtaataagtagaatacactactgtaaacatacgacctttgtttttgtcttatgttggggtaaaggaaagcaggaaggggaatttttatcctcctcccttccgtaaagtgctgggatattttgaatcccccaagttcccttggacctactgatgagagatagttttatgtatggggaaaaatggatactttttaaaccttttttggcagctcagatggtgtaaattttaaaattttgtataggtatttcataacaaaaatatgtatttcttttttgttattttatcttgaaaacggtacatattttagtatttgtgcagaaaaacaagtcctaaagtatttgtttttatttgtaccatccacttgtgccttactgtatcctgtgtcatgtccaatcagttgtaaacaatggcatctttgaacagtgtgatgagaataggaatgtggtgttttaaagcagtgttgcattttaatcagtaatctacctggtggatttgtttttaaccaaaaagatgaattatcaatgatttgtaattatatcagttgattttttttgaaaagatgaaccaaaggatttgactgctaatattttattccttacactttttttctgaataagtctctcataatgagtgcagtgtcagactgtgcctactctgatggtatgtgccatttgtaaaataaaatagagcagaaaaacacaaaaagagaacactggttcagacattcagtgggcaagtaaattatggactgcaaaataatgatttttattcaagaaagctttaaaagttttatatccagatatacaaccacaataaagcaaaataacctactatcaaaatagaaatgttgctatctttataagtgcaatttaatttgtaaatagagtttgaatcaaagtatcacaaaatactgcttcaagatttaattttaaatctgctaatttaagggatattgggaaaagttttggtgtgtttctgttgatttcttttttgtatgctgtgataaaagagaaatgaaaagtgccagtcactgtgtggtgtctaggaaaatcatatatatttttttctccaagaaataaattcatcctggacattggc

SEQ ID NO: 1806 - protein, 524 aa, Homo sapiens
MFHCIPLWRCNRHVESIDKRHCSLVYVPEEIYRYARSLEELLLDANQLRELPEQFFQLVKLRKLGLSDNEIQRLPPEIANFMQLVELDVSRNEIPEIPESISFCKALQVADFSGNPLTRLPESFPELQNLTCLSVNDISLQSLPENIGNLYNLASLELRENLLTYLPDSLTQLRRLEELDLGNNEIYNLPESIGALLHLKDLWLDGNQLSELPQEIGNLKNLLCLDVSENRLERLPEEISGLTSLTDLVISQNLLETIPDGIGKLKKLSILKVDQNRLTQLPEAVGECESLTELVLTENQLLTLPKSIGKLKKLSNLNADRNKLVSLPKEIGGCCSLTVFCVRDNRLTRIPAEVSQATELHVLDVAGNRLLHLPLSLTALKLKALWLSDNQSQPLLTFQTDTDYTTGEKILTCVLLPQLPSEPTCQENLPRCGALENLVNDVSDEAWNERAVNRVSAIRFVEDEKDEEDNETRTLLRRATPHPGELKHMKKTVENLRNDMNAAKGLDSNKNEVNHAIDRVTTSV

SEQ ID NO: 1807 - DNA, 1740 bp, Homo sapiens
gtctctcagtctttctctctttctcattctctttcaatatggaacttgaaaagcgtgaaaaaagaagcttattaaacaagaatttagaggagaaactgacggtctctgctggtggttctgaagccaaacctctgatcttcacatttgtccccactgtcagaagactaccaacccatactcagttggctgacacctctaaattccttgttaaaattccagaagaatcaagtgataagagtccagaaactgtaaataggtctaaatccaatgactacttgaccttgaatgctgggagccaacaagagagagaccaagcgaaattgacttgtccttcagaggtcagtggaacgattttacaagaaagggaattcgaagcaaacaaacttcaagggatgcagcaaagtgacctcttcaaagctgaatatgtccttattgtggactccgaaggggaagatgaggctgcaagcagaaaagttgaacaaggccccccaggggggattggcaccgcagctatccggcccaagtctctagctatctcgtccagtctggtctctgatgtagtgcgtcccaaaacacaggggactgatctcaagacctcatcacatcctgaaatgcttcatgggatggcccctcagcaaaagcatgggcagcaatacaagaccaagtcaagctacaaggcttttgcagcaatccctacaaacacattgcttttggaacagaaggcactagatgaaccagccaagactgaaagtgtctccaaggacaacacattagaaccaccagtggagctctattttcctgcacagctcaggcagcaaactgaagagctctgtgctaccattgataaggtcttacaggattccttgtctatgcattcttctgattctccttcaaggtccccaaagacattgttgggttctgacacagtcaaaactcctacaactcttccaagagcagctggtcgagaaaccaaatatgcaaatctctcctcaccaacttctacagtatctgagagtcagctgactaagcctggagtaattcgcccagtacctgtaaaatccagaatattactgaaaaaagaggaggaagtctatgaacccaaccctttcagtaaatacttggaagataacagcgacctcttttctgaacaggatgtaacagtccctcccaagcctgtctcgctccatcctttatatcagactaaactctatcctcctgctaagtcactgctgcatccacagaccctctcacatgctgactgtcttgccccaggacccttcagtcatctgtccttctccttgagtgatgaacaggagaattctcacaccctcctcagtcacaacgcatgcaacaagctgagtcatccaatggtggctattcctgaacatgaagctcttgattccaaagagcaatgaagttggagcagaggctgaaaacacaggctgctgaagtttttttggaatgctggtgctaaccacttgctagatttaactttttttttttttttccagaatgagtgctccctttatgagctgcagtgcagcagaaccaaaaaaaaagtttgctgcaattatatagcatcacagtgctctgctaacagccagcatagaagagatttacctacagctttttgcaccactgttctagcctttaatgccttctacttaatattaagctgaccgcaatactaacgtgcccctatatttggcagccaaataaagaagaatcgtgggtaaatag

SEQ ID NO: 1808 - protein, 458 aa, Homo sapiens
MELEKREKRSLLNKNLEEKLTVSAGGSEAKPLIFTFVPTVRRLPTHTQLADTSKFLVKIPEESSDKSPETVNRSKSNDYLTLNAGSQQERDQAKLTCPSEVSGTILQEREFEANKLQGMQQSDLFKAEYVLIVDSEGEDEAASRKVEQGPPGGIGTAAIRPKSLAISSSLVSDVVRPKTQGTDLKTSSHPEMLHGMAPQQKHGQQYKTKSSYKAFAAIPTNTLLLEQKALDEPAKTESVSKDNTLEPPVELYFPAQLRQQTEELCATIDKVLQDSLSMHSSDSPSRSPKTLLGSDTVKTPTTLPRAAGRETKYANLSSPTSTVSESQLTKPGVIRPVPVKSRILLKKEEEVYEPNPFSKYLEDNSDLFSEQDVTVPPKPVSLHPLYQTKLYPPAKSLLHPQTLSHADCLAPGPFSHLSFSLSDEQENSHTLLSHNACNKLSHPMVAIPEHEALDSKEQ

SEQ ID NO: 1809 - DNA, 5241 bp, Homo sapiens
ggaagcccgggagtgagagaaagcggctccgggggcatagcgggccagtaagggccgctcctcctttgaagaggttttgcgtctctttccgccggtggcgtcggcgctcacgcaggggcgggtcccggtagcgccaggcggtgcagggcgggaaggggattcgtggcgacggcggcggcagggacagcaggagcagtggtgctgtcagcgcggccgtcggagacatgggagacccggggtcggagataatagaatctgtccctccagctggccctgaggcatctgagtcaacaacggatgaaaatgaagacgacattcagtttgtcagtgaaggaccattacgacctgttcttgaatacattgatctggtcagcagtgatgatgaagagcctagcacctcttatactgatgagaatattaaacgtaaagaccatattgattatcagaaggataaagttgctttaactctggctcgtctagcccgccatgttgaagtggagaaacagcagaaagaagagaagaatagagcattcagagaaaaaattgattttcagcatgctcatgggttacaagaattggaatttattcgaggacattctgatacagaagcagcaagactgtgtgtggaccagtggctaaaaatgccaggactcaaaacaggcacaattaattgtggaacaaaaagttcattccgaagaggaggccacacgtgggtgtctgggaaaccaattttatgtcctataatgcactgtaacaaggagtttgacaatgggcaccttctcttaggacatttgaaaaggttcgatcactctccatgtgatccaacaattacactacatggacctttcttcagctcctttgcttgtgtagtatgttataaaaaatttgttactcaacaacaatatagagatcacctttttgataaggaagccacagatgatggacataacaacaaccttcttcctcagattattcagtgttttgcatgtccaaattgcttccttctttttagcagaaaggaggagtgttcaaagcatatgtctggaaagaatcatttccatcagagtttcaaactgggtgataacaaaggaattgcacatccaatatctttcccatcttttgcaaagaaacttttgatctctctgtgcaaagatgttccctttcaagttaagtgtgtggcctgccacaagacactgcgttcccacatggagctcactgcccatttcagagttcattgtcgaaatgctggacctgtagctgtagctgagaagagcattacccaggttgcagagaaattcatattaagaggttattgtccagattgcaatcaagtctttgtggatgaaaccagcacccaaaatcataagcagaattcaggacacaaagtccgagtcattaactcagtggaagaatcagtcttactctattgccacagcagcgaagggaacaaggatccttcttctgacttgcatttattgttggatcaatcaaaattttcatcacttaaaagaaccatgtctattaaagaatctagctcactggagtgcattgccattccaaaaaagaagatgaatttaaaagataaaagccatgaaggtgttgcttgtgtccagaaagaaaaatcagtagttaaaacctggttctgtgaatgcaatcagcgattcccaagtgaagatgcagtagaaaagcatgttttctcagcaaacacaatgggttataaatgtgtggtctgtggaaaggtatgtgatgattcaggggtcattcgtttacacatgagccggattcacggaggggcacatttaaataactttcttttctggtgtcggacatgcaaaaaggagttaacaaggaaagatactatcatggcacatgtgactgaatttcataatggacacagatatttttatgagatggatgaggtagaaggtgaaactttgccatcatcctctacaacattggataatttgactgctaacaagccttcatcagctattactgttattgatcattccccggcaaatagttctccgaggggtaaatggcaatgccggatttgtgaagatatgtttgattcccaggaatatgtaaaacagcactgcatgtctttggcaagccacaagtttcatagatacagctgtgctcactgcagaaagccttttcataagatagaaacattgtaccgacattgccaagatgagcatgacaatgagataaagattaaatacttctgtgggctttgtgatcttatctttaatgtggaagaagcatttctgagtcattatgaggagcaccacagcatagattatgtatttgtgtcagaaaaaactgaaacttcaattaaaaccgaagatgattttccagtaatagagaccagtaaccagttaacttgtggttgccgtgagagttacatctgtaaagtcaacagaaaagaagattatagcagatgtctccaaatcatgctggataaaggaaaactgtggtttcgctgcagtttatgttcggcaacagcacagaatttaaccgacatgaacactcatatccatcaagtgcacaaagaaaagagtgatgaggaggagcagcagtatgtaatcaagtgtggcacctgcaccaaagcatttcatgatcctgagagtgcacagcagcatttccatagaaaacattgcttcttacagaaacccagtgtggctcattttggatctgaaaaatcaaacctgtacaagtttactgctagtgcctcacatacagagagaaaactgaaacaggcaataaactattcaaaaagtttagacatggagaaaggagttgagaatgacctaagctatcagaatatagaggaagaaattgttgagcttccagatttggattacctgcgaaccatgactcatatagtctttgtagattttgataactggtcaaacttttttggtcatctaccagggcatctaaaccaaggaacatttatttggggctttcaaggaggaaacaccaattggaagcctccgctcaactgtaagatttataactacctgaacaggattggatgcttcttccttcatcctcgctgtagtaaaagaaaagatgctgctgattttgccatatgtatgcatgctggccgtctagatgaacaactacccaagcaaattcctttcaccatcctctcaggagatcaaggttttctggagctagagaatcaatttaagaagactcagaggccagctcatatactaaaccctcaccacttagagggagatatgatgtgtgccttgttaaatagcatatctgataccaccaaagaatgtgacagtgatgataacatgggtgccaaaaatacttcaataggagaagaatttatatccacagaagatgtggaattagaagaagctattagaagaagtcttgaggaaatgtaattaaagatattaccacacaacatcaagtggccttgaagagactgagataacgaattcttgagtttgttttctaaaggagaccagaaatccactattacaaatgtatttgaaaacatgtttttgctttcatatgttcaaaatctgatctttgttttgtatttttgtgctaatgtgcaaacatgtacagaagaaatagaatacatgttcatgcaaatataaattatgtattctaatataggtgtaacagtttcccagttaactttgaatttatatatttagatttaaaggattaaaaaaaaggaaagctcttgacagttgtttcccaaatagcattagttctttaattttatttgtactgtacaaatgatgctagtttatttttttagcagtgaaaatgaatataaaaaaggtgacataggtcaagttttccataaattctacttctcatgtggcactattatataatacctttgagatctttgtttatgtttattagaagagggtaatggaaactgatcatggaaacatttaaaattttatcagcaatgttctttgtgggtgccatgcatatgtaaattattgctttaattagagcagcacattgctaaaataaaaaatacaccttaatttttaagaaataatttaaatgaaacaatttccattccttttacctgcttagacttttatgtgacttgtatggtctcctggttaaagggaatggtgtcagaatatttgcataaaattatttttcataacagtccttttttatatattggtgtaaacataatattcttcaagaaataatgttgaaagcctactcaggaataatcttccttaactctttaaatttttatttcatgtgaagtgttttcagtttagttattcactgaattgtcagtttccttcatttggtattacatatttaattcttaaatattgaggccccattgtgagtaataaaaaatacgacataagtagaagactaagaagggcttgtcatattatctttgtgtatatgcttcatgttatttaaccagaaatgtcttatctctaaaaatttttagtagtaattatttaccaaacttaaaaacatttctataaatataaagcttttctttatatttaagacaaaatataaaggctagaatttggttccttctctgtaacactaaatattttagtgtgaaattgaatttttttattactatagtcttttcaatctataatttgtgtttttaatttcttgatatgtcacttctgttcctccctgcttgcattttttaaaaactagacattgtggcttgagaatttatcaatcatctttccgaaatgaccacattgtgcttttagtttgtatgtttaagtggtcaagcaaggctctaggaggtagtcactgagctggaccttaaacacatctgcaggagctcacaaaatgggagcaaaagaggcattccagaaagaagagtagttaagcagatgtgggggcagggcaagaggagacagcaccttgttgccagagattctacacaaaggtgtgatggacactgatgctctattaagaagcttttgtggtgtgtgtggtagagaataattaaggcttctgataagacaggaaagggatatttcatcatgactgttaagaaaaggtaactgggttgtttaatgttttaattgataattgtcactgatcgtatttctacttgttaaataattaaaaatcatcttaaaattcatactttgactttaatttagacacaaggagatgtaatcgctgtgtaacatcagagaaagctatatggattatcgtcagaagtaaatgtttctaacattg

SEQ ID NO: 1810 - protein, 1061 aa, Homo sapiens
MGDPGSEIIESVPPAGPEASESTTDENEDDIQFVSEGPLRPVLEYIDLVSSDDEEPSTSYTDENIKRKDHIDYQKDKVALTLARLARHVEVEKQQKEEKNRAFREKIDFQHAHGLQELEFIRGHSDTEAARLCVDQWLKMPGLKTGTINCGTKSSFRRGGHTWVSGKPILCPIMHCNKEFDNGHLLLGHLKRFDHSPCDPTITLHGPFFSSFACVVCYKKFVTQQQYRDHLFDKEATDDGHNNNLLPQIIQCFACPNCFLLFSRKEECSKHMSGKNHFHQSFKLGDNKGIAHPISFPSFAKKLLISLCKDVPFQVKCVACHKTLRSHMELTAHFRVHCRNAGPVAVAEKSITQVAEKFILRGYCPDCNQVFVDETSTQNHKQNSGHKVRVINSVEESVLLYCHSSEGNKDPSSDLHLLLDQSKFSSLKRTMSIKESSSLECIAIPKKKMNLKDKSHEGVACVQKEKSVVKTWFCECNQRFPSEDAVEKHVFSANTMGYKCVVCGKVCDDSGVIRLHMSRIHGGAHLNNFLFWCRTCKKELTRKDTIMAHVTEFHNGHRYFYEMDEVEGETLPSSSTTLDNLTANKPSSAITVIDHSPANSSPRGKWQCRICEDMFDSQEYVKQHCMSLASHKFHRYSCAHCRKPFHKIETLYRHCQDEHDNEIKIKYFCGLCDLIFNVEEAFLSHYEEHHSIDYVFVSEKTETSIKTEDDFPVIETSNQLTCGCRESYICKVNRKEDYSRCLQIMLDKGKLWFRCSLCSATAQNLTDMNTHIHQVHKEKSDEEEQQYVIKCGTCTKAFHDPESAQQHFHRKHCFLQKPSVAHFGSEKSNLYKFTASASHTERKLKQAINYSKSLDMEKGVENDLSYQNIEEEIVELPDLDYLRTMTHIVFVDFDNWSNFFGHLPGHLNQGTFIWGFQGGNTNWKPPLNCKIYNYLNRIGCFFLHPRCSKRKDAADFAICMHAGRLDEQLPKQIPFTILSGDQGFLELENQFKKTQRPAHILNPHHLEGDMMCALLNSISDTTKECDSDDNMGAKNTSIGEEFISTEDVELEEAIRRSLEEM

SEQ ID NO: 1811 - DNA, 5097 bp, Homo sapiens
ggaagcccgggagtgagagaaagcggctccgggggcatagcgggccagtaagggccgctcctcctttgaagaggttttgcgtctctttccgccggtggcgtcggcgctcacgcaggggcgggtcccggtagcgccaggcggtgcagggcgggaaggggattcgtggcgacggcggcggcagggacagcaggagcagtggtgctgtcagcgcggccgtcggagacatgggagacccggggtcggagataatagaatctgtccctccagctggccctgaggcatctgagtcaacaacggatgaaaatgaagacgacattcagtttgtcagtgaaggaccattacgacctgttcttgaatacattgatctggtcagcagtgatgatgaagagcctagcacctcttatactgatgagaatattaaacgtaaagaccatattgattatcagaaggataaagttgctttaactctggctcgtctagcccgccatgttgaagtggagaaacagcagaaagaagagaagaatagagcattcagagaaaaaattgattttcagcatgctcatgggttacaagaattggaatttattcgaggacattctgatacagaagcagcaagactgtgtgtggaccagtggctaaaaatgccaggactcaaaacaggcacaattaattgtggaacaaaaagttcattccgaagaggaggccacacgtgggtgtctgggaaaccaattttatgtcctataatgcactgtaacaaggagtttgacaatgggcaccttctcttaggacatttgaaaaggttcgatcactctccatgtgatccaacaattacactacatggacctttcttcagctcctttgcttgtgtagtatgttataaaaaatttgttactcaacaacaatatagagatcacctttttgataaggaagccacagatgatggacataacaacaaccttcttcctcagattattcagtgttttgcatgtccaaattgcttccttctttttagcagaaaggaggagtgttcaaagcatatgtctggaaagaatcatttccatcagagtttcaaactgggtgataacaaaggaattgcacatccaatatctttcccatcttttgcaaagaaacttttgatctctctgtgcaaagatgttccctttcaagttaagtgtgtggcctgccacaagacactgcgttcccacatggagctcactgcccatttcagagttcattgtcgaaatgctggacctgtagctgtagctgagaagagcattacccaggttgcagagaaattcatattaagaggttattgtccagattgcaatcaagtctttgtggatgaaaccagcacccaaaatcataagcagaattcaggacacaaagtccgagtcattaactcagtggaagaatcagtcttactctattgccacagcagcgaagggaacaaggatccttcttctgacttgcatttattgttggatcaatcaaaattttcatcacttaaaagaaccatgtctattaaagaatctagctcactggagtgcattgccattccaaaaaagaagatgaatttaaaagataaaagccatgaaggtgttgcttgtgtccagaaagaaaaatcagtagttaaaacctggttctgtgaatgcaatcagcgattcccaagtgaagatgcagtagaaaagcatgttttctcagcaaacacaatgggttataaatgtgtggtctgtggaaaggtatgtgatgattcaggggtcattcgtttacacatgagccggattcacggaggggcacatttaaataactttcttttctggtgtcggacatgcaaaaaggagttaacaaggaaagatactatcatggcacatgtgactgaatttcataatggacacagatatttttatgagatggatgaggtagaaggtgaaactttgccatcatcctctacaacattggataatttgactgctaacaagccttcatcagctattactgttattgatcattccccggcaaatagttctccgaggggtaaatggcaatgccggatttgtgaagatatgtttgattcccaggaatatgtaaaacagcactgcatgtctttggcaagccacaagtttcatagatacagctgtgctcactgcagaaagccttttcataagatagaaacattgtaccgacattgccaagatgagcatgacaatgagataaagattaaatacttctgtgggctttgtgatcttatctttaatgtggaagaagcatttctgagtcattatgaggagcaccacagcatagattatgtatttgtgtcagaaaaaactgaaacttcaattaaaaccgaagatgattttccagtaatagagaccagtaaccagttaacttgtggttgccgtgagagttacatctgtaaagtcaacagaaaagaagattatagcagatgtctccaaatcatgctggataaaggaaaactgtggtttcgctgcagtttatgttcggcaacagcacagaatttaaccgacatgaacactcatatccatcaagtgcacaaagaaaagagtgatgaggaggagcagcagtatgtaatcaagtgtggcacctgcaccaaagcatttcatgatcctgagagtgcacagcagcatttccatagaaaacattgcttcttacagaaacccagtgtggctcattttggatctgaaaaatcaaacctgtacaagtttactgctagtgcctcacatacagagagaaaactgaaacaggcaataaactattcaaaaagtttagacatggagaaaggagttgagaatgacctaagctatcagaatataggaggaaacaccaattggaagcctccgctcaactgtaagatttataactacctgaacaggattggatgcttcttccttcatcctcgctgtagtaaaagaaaagatgctgctgattttgccatatgtatgcatgctggccgtctagatgaacaactacccaagcaaattcctttcaccatcctctcaggagatcaaggttttctggagctagagaatcaatttaagaagactcagaggccagctcatatactaaaccctcaccacttagagggagatatgatgtgtgccttgttaaatagcatatctgataccaccaaagaatgtgacagtgatgataacatgggtgccaaaaatacttcaataggagaagaatttatatccacagaagatgtggaattagaagaagctattagaagaagtcttgaggaaatgtaattaaagatattaccacacaacatcaagtggccttgaagagactgagataacgaattcttgagtttgttttctaaaggagaccagaaatccactattacaaatgtatttgaaaacatgtttttgctttcatatgttcaaaatctgatctttgttttgtatttttgtgctaatgtgcaaacatgtacagaagaaatagaatacatgttcatgcaaatataaattatgtattctaatataggtgtaacagtttcccagttaactttgaatttatatatttagatttaaaggattaaaaaaaaggaaagctcttgacagttgtttcccaaatagcattagttctttaattttatttgtactgtacaaatgatgctagtttatttttttagcagtgaaaatgaatataaaaaaggtgacataggtcaagttttccataaattctacttctcatgtggcactattatataatacctttgagatctttgtttatgtttattagaagagggtaatggaaactgatcatggaaacatttaaaattttatcagcaatgttctttgtgggtgccatgcatatgtaaattattgctttaattagagcagcacattgctaaaataaaaaatacaccttaatttttaagaaataatttaaatgaaacaatttccattccttttacctgcttagacttttatgtgacttgtatggtctcctggttaaagggaatggtgtcagaatatttgcataaaattatttttcataacagtccttttttatatattggtgtaaacataatattcttcaagaaataatgttgaaagcctactcaggaataatcttccttaactctttaaatttttatttcatgtgaagtgttttcagtttagttattcactgaattgtcagtttccttcatttggtattacatatttaattcttaaatattgaggccccattgtgagtaataaaaaatacgacataagtagaagactaagaagggcttgtcatattatctttgtgtatatgcttcatgttatttaaccagaaatgtcttatctctaaaaatttttagtagtaattatttaccaaacttaaaaacatttctataaatataaagcttttctttatatttaagacaaaatataaaggctagaatttggttccttctctgtaacactaaatattttagtgtgaaattgaatttttttattactatagtcttttcaatctataatttgtgtttttaatttcttgatatgtcacttctgttcctccctgcttgcattttttaaaaactagacattgtggcttgagaatttatcaatcatctttccgaaatgaccacattgtgcttttagtttgtatgtttaagtggtcaagcaaggctctaggaggtagtcactgagctggaccttaaacacatctgcaggagctcacaaaatgggagcaaaagaggcattccagaaagaagagtagttaagcagatgtgggggcagggcaagaggagacagcaccttgttgccagagattctacacaaaggtgtgatggacactgatgctctattaagaagcttttgtggtgtgtgtggtagagaataattaaggcttctgataagacaggaaagggatatttcatcatgactgttaagaaaaggtaactgggttgtttaatgttttaattgataattgtcactgatcgtatttctacttgttaaataattaaaaatcatcttaaaattcatactttgactttaatttagacacaaggagatgtaatcgctgtgtaacatcagagaaagctatatggattatcgtcagaagtaaatgtttctaacattg

SEQ ID NO: 1812 - protein, 1013 aa, Homo sapiens
MGDPGSEIIESVPPAGPEASESTTDENEDDIQFVSEGPLRPVLEYIDLVSSDDEEPSTSYTDENIKRKDHIDYQKDKVALTLARLARHVEVEKQQKEEKNRAFREKIDFQHAHGLQELEFIRGHSDTEAARLCVDQWLKMPGLKTGTINCGTKSSFRRGGHTWVSGKPILCPIMHCNKEFDNGHLLLGHLKRFDHSPCDPTITLHGPFFSSFACVVCYKKFVTQQQYRDHLFDKEATDDGHNNNLLPQIIQCFACPNCFLLFSRKEECSKHMSGKNHFHQSFKLGDNKGIAHPISFPSFAKKLLISLCKDVPFQVKCVACHKTLRSHMELTAHFRVHCRNAGPVAVAEKSITQVAEKFILRGYCPDCNQVFVDETSTQNHKQNSGHKVRVINSVEESVLLYCHSSEGNKDPSSDLHLLLDQSKFSSLKRTMSIKESSSLECIAIPKKKMNLKDKSHEGVACVQKEKSVVKTWFCECNQRFPSEDAVEKHVFSANTMGYKCVVCGKVCDDSGVIRLHMSRIHGGAHLNNFLFWCRTCKKELTRKDTIMAHVTEFHNGHRYFYEMDEVEGETLPSSSTTLDNLTANKPSSAITVIDHSPANSSPRGKWQCRICEDMFDSQEYVKQHCMSLASHKFHRYSCAHCRKPFHKIETLYRHCQDEHDNEIKIKYFCGLCDLIFNVEEAFLSHYEEHHSIDYVFVSEKTETSIKTEDDFPVIETSNQLTCGCRESYICKVNRKEDYSRCLQIMLDKGKLWFRCSLCSATAQNLTDMNTHIHQVHKEKSDEEEQQYVIKCGTCTKAFHDPESAQQHFHRKHCFLQKPSVAHFGSEKSNLYKFTASASHTERKLKQAINYSKSLDMEKGVENDLSYQNIGGNTNWKPPLNCKIYNYLNRIGCFFLHPRCSKRKDAADFAICMHAGRLDEQLPKQIPFTILSGDQGFLELENQFKKTQRPAHILNPHHLEGDMMCALLNSISDTTKECDSDDNMGAKNTSIGEEFISTEDVELEEAIRRSLEEM

SEQ ID NO: 1813 - DNA, 1556 bp, Homo sapiens
gcagccgcggtgtcgcgaagtcctcccgggttgcccccgcggcgtcagagggagggcgggcgccgcgttggtgacggcgaccctgcagcccaaggagcgctccactcgctgccgccggagggccggtgacctcttggctaccccgcgtcggaggcttagatggctcaggcgaagatcaacgctaaagccaacgaggggcgcttctgccgctcctcctccatggctgaccgctccagccgcctgctggagagcctggaccagctggagctcagggttgaagctttgagagaagcagcaactgctgttgagcaagagaaagaaatccttctggaaatgatccacagtatccaaaatagccaggacatgaggcagatcagtgacggagaaagagaagaattaaatctgactgcaaaccgtttgatgggaagaactctcaccgttgaagtgtcagtagaaacaattagaaacccccagcagcaagaatccctaaagcatgccacaaggattattgatgaggtggtcaataagtttctggatgatttgggaaatgccaagagtcatttaatgtcgctctacagtgcatgttcatctgaggtgccacatgggccagttgatcagaagtttcaatccatagtaattggctgtgctcttgaagatcagaagaaaattaagagaagattagagactctgcttagaaatattgaaaactctgacaaggccatcaagctattagagcattctaaaggagctggttccaaaactctgcaacaaaatgctgaaagcagattcaattagtcttcaaacctaagagcatttacacaatacacaaggtgtaaaaatgataaaatactattttaattgataactagttctttgttaggtataaccacttagttgacactgatagttgtttcagatgaggaaaatattccatcaagtatcttcagttttgtgaataacaaaactagcaatattttaattatctatctagagattttttagattgaattcttgtcttgtactaggatctagcatatttcactattctgtggatgaatacatagtttgtggggaaaacaaacgttcagctaggggcaaaaagcatgactgctttttcctgtctggcatggaatcacgcagtcaccttgggcatttagtttactagaaattctttactgaagcagcacacacatttactacacacacagtgttaacaaagcactgtgcttagagggtaaaaaggaatcacaaaacaagaatctttccaaagttgtctcattcagcaatgttaaggcatctgtatcaaattattttggatgtaaagattcctgtgtctcataatatgaatgtattttttgatatacaagaaactgacataaaatgtgagaaaaccacctataatttaccactgtgaacaattatatatctatctgcttcatcttttctcaaatgcatcaattctctaaaattcctatattgtaacttgcctttttttaaaaaagttagatgctgatataaagtctgcttaattgtcaacttaaaaaaaaaaaaaaaaa

SEQ ID NO: 1814 - protein, 211 aa, Homo sapiens
MAQAKINAKANEGRFCRSSSMADRSSRLLESLDQLELRVEALREAATAVEQEKEILLEMIHSIQNSQDMRQISDGEREELNLTANRLMGRTLTVEVSVETIRNPQQQESLKHATRIIDEVVNKFLDDLGNAKSHLMSLYSACSSEVPHGPVDQKFQSIVIGCALEDQKKIKRRLETLLRNIENSDKAIKLLEHSKGAGSKTLQQNAESRFN

SEQ ID NO: 1815 - DNA, 3037 bp, Homo sapiens
atgaggggagtcgagactcccgcgccccaccacccccggcggagctgctgctgagccactcaatctgagccctggctactaataaagttcgtttaaaaatcataatcattcttaagagagcgaaagagggtgcgaactagccgctcggccccgcagggagagctggcgcgtcgggaggagacagcggcggcagcggttgcgccgcgaccaggaggagccggtggcgccgggcggcgggtccgcggccggtgggggacggtgagtagcggctcgcgctgcggtgcagcggcgctgcactcactcgccctctccaggggctgggggttcgtccggctccactggggaagactcagcttctccccggggtcccgggttgtgccttactctccggagtgggcaggggtatcgagggcaggggcctcccggcccggctcccccatcccccggttcggaccgccgagcgccggctctcccctccctgagcaccgatcccaagttccagctagagaaggtgggcggcagcgccagcccggcgccccctcccagctcccagcgatttgagagggaagatctgatctcctagaattagagttggtacagaaaccatttcagctccaaaaatgttggaggaagatatggaagtcgccataaagatggtggttgtagggaatggagcagttggaaaatcaagtatgattcagcgatattgcaaaggcatttttacaaaagactacaagaaaaccattggagttgattttttggagcgacaaattcaagttaatgatgaagatgtcagactaatgttatgggacactgcaggtcaggaggaatttgatgcaattacaaaggcctactatcgaggagcccaggcttgtgtgctcgtgttctctaccacagatagggaatcttttgaagcagtttccagttggagagagaaagtagtagccgaagtgggagatataccaactgtacttgtgcaaaacaagattgatcttctggatgattcttgtataaagaatgaggaagctgaggcactggcaaaaaggttaaagttaagattctacagaacatcagtgaaagaagatctaaatgtgaatgaagtttttaagtatttggctgaaaaataccttcagaaactcaaacaacaaatagctgaggatccagaactaacgcattcaagtagtaacaagattggtgtctttaatacatctggtggaagtcactccggtcagaattcaggtaccctcaatggtggagatgtcatcaatcttagacccaacaaacaaaggaccaagaaaaacagaaatccttttagcagctgtagcataccctaagatgttttgggaggaaaacaattgaattacattgtgcaatgcattaagaaacccatccagctgtcatggtatgttacaaggttttcagcagactttgctcctaatggctctctgaaagtgacagacttaaatattgctctgcagtgcttttcagaatgtagagtgagacctctggtggaaaaattattgccctgtggactcctttaattttttttacattagacgaagcttctcctgtttgtaaaggaatgctataagaaatttcaaacacaggttttgcggaattttaaatgctggaaaacataaatgaaatgcctaaatatattgttacagattttaatactgtggatcaaggaaagatagcaagcattcttttcctgaaattggtcatgtagcttttctgcgaaatagtattgaatctgaatactttcacaaaataatactgaaaggtaaaccctaaatcttgccagactgcattagtattttggcattgaaacttgtgcaatatctgtgtaatgtagaatgtggggtgtgcatgcagatgtctggtactggagtaagctgaaggtatgtgcagtatttaagaaaatgtacattctaattaattcacttataaaaccatttacatattgtgtatatgtttttattttcaaatgataaactctagacatatattttgcaaaatgagcttgggtttaaaaagtgctttgtgccaaaaatatcatacctaatttttatagtgctttactatcagaatttatattgtttattatatcttttaaaagcagtaagcagttttcatctgacagcgtagataaaagaggagtataggaatttgaatgctagagcatctcccaggtgagccttattgcagatctttttgatatagtcacccataagcatggtgagctcctgctctcataaggtcagccaaagccccttaagaaggtacacagcacatctgcagtcattcaggaggtcctgtgaagtgtggtgatgcatctaacaccttttgctgctcactgagaacccagctttgaacttacaagattacactaaccatttttaaagtgcacaaaaatattattattagtcttaactaaaattacatattttataatgccctgcaactctaaaccatccttttgtttacacatttttgtatggtattttaagattatcaatcacttcaacatttctataaccttgtttgtatagcactttctcaagagctgtcagtcccacatacagaatcatttcttttacaaaatgatttaatatgtaatcatgtgtcaggacataaattttgtcacttgggacagtagctttccagctaagataattgcgtgaactctgttaaaactgattatcactcatcaatggctttatttttaacctataaataacccctttcaatatacctggtttttacagcattgcaaaatctgtaaaaataacttttattggaaaatgtcatgaagtcatttttcattatttgtactaaacaatgttttatgtactccttttgtgttttatcttttgtttttccatctgtactcccctcatcctcctaatgttgagaaaatcaaatttcctgggtgtgtccttgttaagtgatcaaaagtaaatgttctctttgccattttagatggaaaaataaaaaaaattaaaaagtaaaaaaaaaaaaaaaaaaaaaaaaaaaa

SEQ ID NO: 1816 - protein, 237 aa, Homo sapiens
MLEEDMEVAIKMVVVGNGAVGKSSMIQRYCKGIFTKDYKKTIGVDFLERQIQVNDEDVRLMLWDTAGQEEFDAITKAYYRGAQACVLVFSTTDRESFEAVSSWREKVVAEVGDIPTVLVQNKIDLLDDSCIKNEEAEALAKRLKLRFYRTSVKEDLNVNEVFKYLAEKYLQKLKQQIAEDPELTHSSSNKIGVFNTSGGSHSGQNSGTLNGGDVINLRPNKQRTKKNRNPFSSCSIP

SEQ ID NO: 1817 - DNA, 2623 bp, Homo sapiens
ttcttgttcatagagtgctggaatatgaatgagccaaattgtgctgttccattgacactggttgctacagaattaactttactcggagatccgaggagccatcggcagttcccaggagtaagaacctgagagcgtgtgagaatttgagagggaagatctgatctcctagaattagagttggtacagaaaccatttcagctccaaaaatgttggaggaagatatggaagtcgccataaagatggtggttgtagggaatggagcagttggaaaatcaagtatgattcagcgatattgcaaaggcatttttacaaaagactacaagaaaaccattggagttgattttttggagcgacaaattcaagttaatgatgaagatgtcagactaatgttatgggacactgcaggtcaggaggaatttgatgcaattacaaaggcctactatcgaggagcccaggcttgtgtgctcgtgttctctaccacagatagggaatcttttgaagcagtttccagttggagagagaaagtagtagccgaagtgggagatataccaactgtacttgtgcaaaacaagattgatcttctggatgattcttgtataaagaatgaggaagctgaggcactggcaaaaaggttaaagttaagattctacagaacatcagtgaaagaagatctaaatgtgaatgaagtttttaagtatttggctgaaaaataccttcagaaactcaaacaacaaatagctgaggatccagaactaacgcattcaagtagtaacaagattggtgtctttaatacatctggtggaagtcactccggtcagaattcaggtaccctcaatggtggagatgtcatcaatcttagacccaacaaacaaaggaccaagaaaaacagaaatccttttagcagctgtagcataccctaagatgttttgggaggaaaacaattgaattacattgtgcaatgcattaagaaacccatccagctgtcatggtatgttacaaggttttcagcagactttgctcctaatggctctctgaaagtgacagacttaaatattgctctgcagtgcttttcagaatgtagagtgagacctctggtggaaaaattattgccctgtggactcctttaattttttttacattagacgaagcttctcctgtttgtaaaggaatgctataagaaatttcaaacacaggttttgcggaattttaaatgctggaaaacataaatgaaatgcctaaatatattgttacagattttaatactgtggatcaaggaaagatagcaagcattcttttcctgaaattggtcatgtagcttttctgcgaaatagtattgaatctgaatactttcacaaaataatactgaaaggtaaaccctaaatcttgccagactgcattagtattttggcattgaaacttgtgcaatatctgtgtaatgtagaatgtggggtgtgcatgcagatgtctggtactggagtaagctgaaggtatgtgcagtatttaagaaaatgtacattctaattaattcacttataaaaccatttacatattgtgtatatgtttttattttcaaatgataaactctagacatatattttgcaaaatgagcttgggtttaaaaagtgctttgtgccaaaaatatcatacctaatttttatagtgctttactatcagaatttatattgtttattatatcttttaaaagcagtaagcagttttcatctgacagcgtagataaaagaggagtataggaatttgaatgctagagcatctcccaggtgagccttattgcagatctttttgatatagtcacccataagcatggtgagctcctgctctcataaggtcagccaaagccccttaagaaggtacacagcacatctgcagtcattcaggaggtcctgtgaagtgtggtgatgcatctaacaccttttgctgctcactgagaacccagctttgaacttacaagattacactaaccatttttaaagtgcacaaaaatattattattagtcttaactaaaattacatattttataatgccctgcaactctaaaccatccttttgtttacacatttttgtatggtattttaagattatcaatcacttcaacatttctataaccttgtttgtatagcactttctcaagagctgtcagtcccacatacagaatcatttcttttacaaaatgatttaatatgtaatcatgtgtcaggacataaattttgtcacttgggacagtagctttccagctaagataattgcgtgaactctgttaaaactgattatcactcatcaatggctttatttttaacctataaataacccctttcaatatacctggtttttacagcattgcaaaatctgtaaaaataacttttattggaaaatgtcatgaagtcatttttcattatttgtactaaacaatgttttatgtactccttttgtgttttatcttttgtttttccatctgtactcccctcatcctcctaatgttgagaaaatcaaatttcctgggtgtgtccttgttaagtgatcaaaagtaaatgttctctttgccattttagatggaaaaataaaaaaaattaaaaagtaaaaaaaaaaaaaaaaaaaaaaaaaaaa

SEQ ID NO: 1818 - protein, 237 aa, Homo sapiens; identical to SEQ ID NO: 1816

SEQ ID NO: 1819 - DNA, 2353 bp, Homo sapiens
ggtttcatatgaactctcccgccacccgggaacagtggctgccaccgtttgtgttttcccgagtttgaattcttgcaggtgaccaagatggagttttctggaagaaagtggaggaagctgaggttggcaggtgaccagaggaatgcttcctaccctcattgccttcagttttacttgcagccaccttctgaaaacatatctttaatagaatttgaaaacttggctattgatagagttaaattgttaaaatcagttgaaaatcttggagtgagctatgtgaaaggaactgaacaataccagagtaagttggagagtgagcttcggaagctcaagttttcctacagagaaaacttagaagatgaatatgaaccacgaagaagagatcatatttctcattttattttgcggcttgcttattgccagtctgaagaacttagacgctggttcattcaacaagaaatggatctccttcgatttagatttagtattttacccaaggataaaattcaggatttcttaaaggatagccaattgcagtttgaggctataagtgatgaagagaagactcttcgagaacaggagattgttgcctcatcaccaagtttaagtggacttaagttggggttcgagtccatttataagatcccttttgctgatgctctggatttgtttcgaggaaggaaagtctatttggaagatggctttgcttacgtaccacttaaggacattgtggcaatcatcctgaatgaatttagagccaaactgtccaaggctttggcattaacagccaggtccttgcctgctgtgcagtctgatgaaagacttcagcctctgctcaatcacctcagtcattcctacactggccaagattacagtacccagggaaatgttgggaagatttctttagatcagattgatttgctttctaccaaatccttcccaccttgcatgcgtcagttacataaagccttgcgggaaaatcaccatcttcgtcatggaggccgaatgcagtatggcctatttctgaagggcattggtttaactttggaacaggcattgcagttctggaagcaagaatttatcaaaggaaagatggatccagacaagtttgataaaggttactcttacaacatccgtcacagctttggaaaggaaggcaagaggacagactatacacctttcagttgcctgaagattattctgtccaatccaccaagccaaggggattatcatgggtgcccattccgtcacagtgatccagagctgctgaagcaaaagttgcagtcatacaagatctctcctggagggataagccagattttggatttagtaaaggggacacattaccaggtagcctgtcaaaaatactttgagatgatacacaatgtggatgattgtggcttttctttgaatcatcctaatcagttcttttgtgagagccaacgtattctaaatggtggtaaagacataaagaaggaacctatccaaccagaaactcctcaacccaaaccaagtgtccagaaaaccaaggatgcatcatctgctctggcctctttaaattcctctctggaaatggatatggaaggactagaagattactttagtgaagattcttaggcagttttataaccctttttcctcaatagcctgtttcctgtttttaagattttgcctttgttgttgaaaaagggtttcactctgtcaccaaggcttagtgcagtgacacaattacagctgattgcagccttgaccttcccagctcaagtgatcctcctacctcagcctcccaagtagttaggaccacaggtgtgcacctcatatccagataatttttttcaatttttttttgtagaggtggggggtctccctatgttgcccaggcagatctcagactcctgggctcaagcgatcctcacacctcagcgtcccagagtgctgggattacggttgtgagccactgtgcctggcctttttttttttttttaacctttttgtttaacttctctcttcactgcatcccaatccatctacaggcatgcacacttattaggaaaggaggtttgaggtaacaacagagactttcactatattttgctttgacagaaggaaagaggaggagtttctattaaaatctgtcacttgagtgatgtcatttaagtcctattttaggagataaaaacagctttggggactggttaaagtcccccagaaactacaataaagaacaacttttgttttaactcttaatcactttgtaattttgactcaatccttttctggaccatttttgttaataaatatcaaagtgtaaaaaaaaaaaaaaaaaaaaaaaaaaaaaaaaaaaaaaaaaaaa

SEQ ID NO: 1820 - protein, 509 aa, Homo sapiens
MEFSGRKWRKLRLAGDQRNASYPHCLQFYLQPPSENISLIEFENLAIDRVKLLKSVENLGVSYVKGTEQYQSKLESELRKLKFSYRENLEDEYEPRRRDHISHFILRLAYCQSEELRRWFIQQEMDLLRFRFSILPKDKIQDFLKDSQLQFEAISDEEKTLREQEIVASSPSLSGLKLGFESIYKIPFADALDLFRGRKVYLEDGFAYVPLKDIVAIILNEFRAKLSKALALTARSLPAVQSDERLQPLLNHLSHSYTGQDYSTQGNVGKISLDQIDLLSTKSFPPCMRQLHKALRENHHLRHGGRMQYGLFLKGIGLTLEQALQFWKQEFIKGKMDPDKFDKGYSYNIRHSFGKEGKRTDYTPFSCLKIILSNPPSQGDYHGCPFRHSDPELLKQKLQSYKISPGGISQILDLVKGTHYQVACQKYFEMIHNVDDCGFSLNHPNQFFCESQRILNGGKDIKKEPIQPETPQPKPSVQKTKDASSALASLNSSLEMDMEGLEDYFSEDS

SEQ ID NO: 1821 - DNA, 1947 bp, Homo sapiens
gtggtttctaacgctgaacttaaaaagtgttgagatgaataatgaagaggaccttctgcaggaggactcaacaagagatgaaggcaatgagactgaagccaacagcatgaacacattaagaaggacaaggaagaaagtcactaaaccatatgtttgttcaactgaagtgggagaaacggatatgtccaattcaaatgattgcatgagggacagcagtcaaattttgaccccacctcaactctcttctagaatgaaacacattagacaagccatggccaaaaatcgcctccagtttgtacgatttgaagcaacagacctccacggcgtgtccaggtctaagactatccctgcacacttttttcaagagaaagtgagccatggtgtttgcatgccccgaggttatcttgaagtgataccaaatccaaaggacaatgaaatgaataacataagagccacatgttttaatagcgacatagtcctaatgccagagttatcaacctttagagttttgccatgggctgacagaactgcaagagtgatatgtgataccttcactgtgactggtgagcctcttttgacttccccaaggtacattgcaaagaggcagctgagccatctgcaggcctctggcttttccctgctttctgctttcatctatgatttttgcatttttggtgtgcccgaaattttaaattcaaagattatatcttttcctgctttaacatttttaaataaccatgatcagcccttcatgcaggaacttgttgatggcttgtatcacactggagccaatgtcgagagtttttcctcctctaccaggcctggtcagatggaaatctctttcctgcctgaatttggcattagctcagctgataatgcatttaccctcagaacaggtgtcaaagaagtggcaaggaaatataattacattgccagcttcttcattgagactggattttgtgattcagggattttgtctcatagtctctgggatgtcgataggaagaaaaacatgttctgcagcacttctggaactgagcagctcacgatcactgggaaaaaatggttggcaggactcttgaagcactctgctgcgctcagctgcctgatggcgccttctgttagctgccgaaagcgttattccaaggacaggaaagacctgaagaagagtgtgcctacaacatggggatacaatgacaacagctgtatatttaatatcaaatgtcatggagagaaaggcacccggatagaaaataaactaggctcagcaacagcaaacccttacttggtgctggctgcaactgttgctgccggcttagatggacttcatagcagtaatgaggtcttggctggtccagatgagagcacagacttttaccaagtggaaccttctgagatccctttaaaactagaagatgcccttgtggcactggaagaagatcaatgccagagacaggctctaggagaaacctttattcgatattttgttgccatgaagaaatatgagttggagaatgaagaaatagctgcagagagaaataaattcttagagtattttatttagaatagagctcacaactactcctttagacatgtaattgttacttaaagctaatctaccaaaacaaaaagactgaacttttgtaattaacaacagcaacaataacaagattacgaatgcttttgacttttttttttgtccatggaatatttgacagatgaagtaggactgctgagaagattctgataacagaaacaaacaacaaagttgtggtgaagctataatatgcaaacttaccagatcttgtcagtcatttcctatgtgtatgttgacctggataagaatatccaattttgggtggcaataaatatattcgcacattaagaaaaaaaagacttaagcattagaaagcaaaatttaaatgactaaaaaaaaaaaaaaaaaaa

SEQ ID NO: 1822 - protein, 509 aa, Homo sapiens
MNNEEDLLQEDSTRDEGNETEANSMNTLRRTRKKVTKPYVCSTEVGETDMSNSNDCMRDSSQILTPPQLSSRMKHIRQAMAKNRLQFVRFEATDLHGVSRSKTIPAHFFQEKVSHGVCMPRGYLEVIPNPKDNEMNNIRATCFNSDIVLMPELSTFRVLPWADRTARVICDTFTVTGEPLLTSPRYIAKRQLSHLQASGFSLLSAFIYDFCIFGVPEILNSKIISFPALTFLNNHDQPFMQELVDGLYHTGANVESFSSSTRPGQMEISFLPEFGISSADNAFTLRTGVKEVARKYNYIASFFIETGFCDSGILSHSLWDVDRKKNMFCSTSGTEQLTITGKKWLAGLLKHSAALSCLMAPSVSCRKRYSKDRKDLKKSVPTTWGYNDNSCIFNIKCHGEKGTRIENKLGSATANPYLVLAATVAAGLDGLHSSNEVLAGPDESTDFYQVEPSEIPLKLEDALVALEEDQCQRQALGETFIRYFVAMKKYELENEEIAAERNKFLEYFI

SEQ ID NO: 1823 - DNA, 375 bp, Homo sapiens
atgggtttcagagacctgaaaagccccactggcctccaggtgcacaatggttacctggctgaccagagctgcaacaaggggtatgtgccatcacaagcagacgtggcagtaattgaagcagtctccagtccattgtccggtaatttgtgtcatgctctacattggtataattacatcaagtcttacgaaaaggaaaaagccagcctagcaggaatgaagaaagctttgggcaagtatggacctgctaatgtggaagatagtagaggaagtggagctacagatagtgaagatgacaatgacatttatctatttggatttgataagggggaggaaagcaaagaatcaaaaaggcaaagggaagaataccctgcatag

SEQ ID NO: 1824 - protein, 124 aa, Homo sapiens
MGFRDLKSPTGLQVHNGYLADQSCNKGYVPSQADVAVIEAVSSPLSGNLCHALHWYNYIKSYEKEKASLAGMKKALGKYGPANVEDSRGSGATDSEDDNDIYLFGFDKGEESKESKRQREEYPA

SEQ ID NO: 1825 - DNA, 5099 bp, Homo sapiens
gatgaccgtggttaaggcagtagaaagcaggctcgacactgagacgcggttccagccctagaaggattgcattttacgattcaggcaaacttcgagtctcctcatgtgacatgtgtgcactcctggaccgttttaattatgagaaacgtggtttgcagcatgattccttccagtcgataaatcggaatctctctcgctcccaccccttcttaacttcaggcttcctgcatcccggagcactcccggcagccccttccctcccccgccccggggatgctccgactcggcgcttagccattcatcaaccggttcacaccggcggcggccgccgcggagtgacgtccggagggggcgggcctccgcccccgcctgtcggctcctggcccgcggttccaggccgcgattggtggctggagggttgcacgtcgcgccggctataaaggggagggcttgtgacgcaagggcgcctcggcgcgtgtattggctccttcggctgcgggccggctcggctacgcgctctgctccgagccgctcactgcatggtagagtctggtgcccccgccgccgcctgcatcgccgccaccgccgctccgccacgaccaccgccgcctcctgccctgcagccaccgccaccgcctgtgtcgccgccgcctcgggaccggctgtatgattaggccacaatcttcaatgagtaaacatattcctcaattctgtggtgttcttggtcacacatttatggagtttctgaagggcagtggagattactgccaggcacagcacgacctctatgcagacaagtgaactgtagaaactgattactgctccaccaagaagcccccataagagtggttatcctggacacagaagtgttgaattgaaatccacagagcattttacaagagttctgacctggatggggtaaacctcagtgcacttcttttctgttggcctcagtattactggattgaagaattgctgcttcttgttaggaggttcatttcacttatcattacttacaacttcatactcaaagcactgagaatttcaagtggagtatattgaagtagacttcagtttctttgcatcatttctgtattcaatttttttaattatttcataaccctattgagtgttttttaactaaattaacatggctcgaatgaaccgcccagctcctgtggaagtcacatacaagaacatgagatttcttattacacacaatccaaccaatgcgaccttaaacaaatttatagaggaacttaagaagtatggagttaccacaatagtaagagtatgtgaagcaacttatgacactactcttgtggagaaagaaggtatccatgttcttgattggccttttgatgatggtgcaccaccatccaaccagattgttgatgactggttaagtcttgtgaaaattaagtttcgtgaagaacctggttgttgtattgctgttcattgcgttgcaggccttgggagagctccagtacttgttgccctagcattaattgaaggtggaatgaaatacgaagatgcagtacaattcataagacaaaagcggcgtggagcttttaacagcaagcaacttctgtatttggagaagtatcgtcctaaaatgcggctgcgtttcaaagattccaacggtcatagaaacaactgttgcattcaataaaattggggtgcctaatgctactggaagtggaacttgagatagggcctaatttgttatacatattagccaacatgttggcttagtaagtctaatgaagcttccataggagtattgaaaggcagttttaccaggcctcaagctagacagatttggcaacctctgtatttgggttacagtcaacctatttggatacttggcaaaagattcttgctgtcagcatataaaatgtgcttgtcatttgtatcaattgacctttccccaaatcatgcagtattgagttatgacttgttaaatctattcccatgccagaatcttatcaatacataagaaatttaggaagattaggtgccaaaatacccagcacaatacttgtatatttttagtaccatacagaagtaaaatcccaggaactatgaacactagaccttatgtggtttattccttcaatcatttcaaacattgaaagtagggcctacatggttatttgcctgctcactttatgtttacatctcccacattcataccaatatacgtcaggtttgcttaaccattgatttttttttttttttaccaagtcttacagtgattattttacgtgtttccatgtatctcactttgtgctgtattaaaaaaacctccattttgaaaatctacgttgtacagaagcacatgtctttaatgtcttcagacaaaaaagccttacattaatttaatgtttgcactctgaggtgcaacttaacagggagggcctgagaaaagaatgggagggggctattaattatttttagcaaaatgttgcctttgtcttgtgcaaacatgtagaatatgctctttaatttagtaaaatatttttttaaaaggtagagatgctttgttattgtaatcataaacttcctgaaattcttgtaatttttttcccatacttatcagaagtgtgtttaccaacttatttttgtttgaaagtgtgattttttttttccttcccaacctctcttgcaaaaaaagaaatgggtttctgctaatgaattgagcagacatctaatattttatatgccttttgagctgtgtaacttaatatttggatacttgacaatttgttttattatgtaattgataaaatggtgatgtgtattaatgttagttcaaccatatatttatactgtctggggatgtgtggttatagttctgtgggagaaataattttgtcagtgttcaccagcttgtaaaaacttagtgcgagagctgaaacatctaaataaataatgacatgcatttatcatcattgagattggtttgcttaaaattaacttattttgtagaagacaaaatgaattgcacttcacttaatgtgtgtcctcatctttttacaaataaatgaaggattataaatgatgtcagcattttagtaaacttttagacaaaatttgttagggtcattcatgaaaactttaatactaaaagcactttccattatatactttttaaaggtctagataattttgaaccaatttattattgtgtactgaggagaaataatgtatagtagaggacagccttggtttgtaaagctcagttccactagttcatggttttgtgcaacttctgagcctcagttttctcctttgcaaattaataattacatacctttatagattttgaaattaatttaaatattagtatttggtacatgaaggcttaatgttaagtttcctttaatgatccacaataatccctttgatcacgttaatctaaatctagatgtctttgtctaattttttttgaatagcagttataaatgtaaaggactcaaagtttaagtaaaaagtgatactccaccttgtgtttcaaagaatttagttccacctcttcataccagtttaacacttaatatatttcattggattttagacagggcaaaaggaagaacaggggcctctggaggcccttggttatttaaatcttggattatttgtgatagtaatcacaaatttttggctaatttttaacctgaggttttgttttttttttaaaggaaatgcagcctagtcttgagaacataattttatataatcaattactaaatgttaaactattaccacacagcccataaaacagcatttgcgtttattgagagagaggatgtgccatcatgattaatgaaaactatcttttgagtttgaaaagaaattaatttgcagtgtttggattgtatatatggtgctaaaaataaattaatttactttataaaccttatctgtacattatacgatgtgatgaaatttgctttttatccaaatattttgtatcttgtaaatatggctaattataggaatgcctataatacatcttagattccttatatctaataagagttcaaagagttatgagttgaagtcttgaatgcaggaaactatctgatagtgttctaaaatttggttacttgggtttggatacccttagtgggatgatgtaaatagaggctagctacctaggcttgtctatagcaaccataatgttgatgtaagtaatgcggttactgaatcataagaaaatgccatctctttttagttgaaggaaaactctggaagtaggtgccattggtcattctgcagtgcactgcaaccattgtttcccctagtgccctcttttccctagggcattgctctcctattcccacgccttaacacagctctatacctagaagcagccagcccaggcatgcagtcacatttaatcacatcccccttctagagtgcttcaaaatgatgtagtccctcaacttggctaaagaatctcaatctcttgaaatttatttttttaatgtcatattcatctggtaaatatctactgtttgccaggcatttaagaatatggcaaagaacataaaagatggtgtcaccagattttggtcaccaatgagtacccgacccgttgccatgattaagagagaatgctttctattggagtttcaggaaatataatttgagaatactttaaagggaagtggaagtataagtgaatgatatttttcttttacatgtaaacaatgaagttatttcaaagttaagttttaaacaaaatacatgaagtagtgtctgccatacatgttaatattctacattcttgcttccttaaattaatatgtttgtgtgtatatatgtgcctcacacctgaattgaaaattaaagactggtttaaaagtggtttaaaagtgacatttaatgtttctccattacgtttggggtaaccagcctaagtggaatcttggaaggaaagtaagggaaaaacttgtatttgccttcaatgaattaaaccagtgatatgtgttaacgtatgaatgaaaggattgatggtgattttataattatatatattgccgcagtaaccagttaataaattgatagctaccaaaaaaaaaaaaaaaaaa

SEQ ID NO: 1826 - protein, 173 aa, Homo sapiens
MARMNRPAPVEVTYKNMRFLITHNPTNATLNKFIEELKKYGVTTIVRVCEATYDTTLVEKEGIHVLDWPFDDGAPPSNQIVDDWLSLVKIKFREEPGCCIAVHCVAGLGRAPVLVALALIEGGMKYEDAVQFIRQKRRGAFNSKQLLYLEKYRPKMRLRFKDSNGHRNNCCIQ

SEQ ID NO: 1827 - DNA, 6948 bp, Homo sapiens
ggggctgaaagacacacagaagtcttcatggatatagttgatacatttaatcatttaattcctactgaacacttagatgatgccctatttctaggatccaacctggagaatgaagtctgtgaggattttagtgcaagtcaaaatgtcttagaggactcgctgaagaacatgctcagcgataaggatcctatgctaggatctgcaagtaaccagttctgtttgcctgttttggatagcaatgatcccaatttccagatgccttgttcaacagttgttggtcttgacgatattatggatgaaggagttgttaaagaaagtggcaatgataccattgatgaagaagaactgattttacctaacaggaacttaagggacaaggtagaagaaaattcagtgagatctccaagaaaatcacctcgtttaatggcacaagaacaagtaagaagtttgcgacagagcactattgccaagcgttcaaatgcagcaccattaagtaacacaaaaaaagcatctgggaagactgtatctactgctaaagcaggagtgaaacaaccagaaaggagtcaggttaaagaagaagtatgtatgtcactgaaacctgagtaccataaggagaatagaaggtgcagccgaaatagcggacaaattgaagtggtacctgaagtatcagtgtcttcaagtcattcttcagtgtcatcttgtcttgaaatgaaggatgaagatggattagattctaagcataagtgtaataatccgggagaaatagatgtgccatctcatgaattaaattgttcacttctttcagagacttgtgttactattggagaaaagaaaaatgaagctttgatggaatgtaaagccaagcctgttggtagtccattgtttaagttttcagataaagaagaacatgaacaaaatgattccatttcaggtaaaacgggtgagactgttgttgaagaaatgatagcaacaagaaaagttgaacaagattcaaaggagacagtaaaattatcccatgaagatgaccatattcttgaggacgctggatcttctgatatttctagtgatgctgcttgtacaaatccaaataagacagaaaacagccttgtaggtttgcctagttgtgtagatgaagtgactgaatgtaatttggaattgaaggataccatgggtattgctgataaaactgagaacacccttgaaagaaataaaattgaaccgttgggttattgtgaagatgcggagtctaataggcagttggagagcactgagtttaataaatcaaacttagaggtggttgatactagtacttttggaccggaaagtaatatcttggaaaatgctatttgtgatgtgcctgaccaaaattcaaaacagttgaatgctatagaaagtactaaaatagagtcccatgaaacagcaaaccttcaggatgacagaaacagccagtcaagtagcgtttcttacttagagtcaaaaagtgtaaaatccaaacatacaaaacctgtaattcattctaagcaaaacatgaccacagatgctccgaagaaaattgttgcagcaaagtatgaagtaatacatagcaaaactaaagttaatgtcaaaagtgtgaaacgaaatactgatgtaccagaatctcagcaaaattttcataggccagtcaaagtcagaaaaaaacaaattgataaggagccaaagattcagagttgcaattctggggttaaatctgtgaaaaaccaagctcattctgtactgaaaaaaacattacaggatcaaactttagtacaaattttcaagcccttaactcattctttgagtgataagtcacacgctcatcctggttgcttgaaagaacctcatcatcctgcacaaactggacatgtatcacattctagccagaaacagtgtcataagcctcagcaacaggccccagcaatgaaaaccaatagtcacgtgaaggaagagcttgaacacccaggcgttgagcattttaaggaagaggataaactgaaactgaaaaaacctgagaagaacctacaaccccgccaaagaagaagcagcaaaagtttttctttagatgagccaccattgttcattccagataacatagctaccataagaagagaaggctctgatcatagctcctcatttgaaagcaaatatatgtggactcccagcaagcagtgtgggttttgcaaaaaaccacatggcaacaggtttatggttggctgtgggagatgtgatgactggtttcatggtgattgtgttgggttaagtctttctcaagcacagcagatgggcgaggaagacaaagaatatgtctgtgtaaaatgttgtgctgaagaagacaaaaagactgaaatactagatccagatactttggaaaaccaagctacagttgaattccatagtggagataaaacaatggagtgtgaaaagcttggattatcaaaacacacaacaaatgatagaaccaaatatatagatgatacagtgaagcacaaggtcaaaattttaaaacgggagtctggtgaaggcagaaattcatcagactgtagagataatgaaattaaaaaatggcagctagctcctcttcgtaagatgggacaaccagttttacctcggagatcctcagaagaaaaaagtgaaaaaataccgaaagagtctacaactgttacttgcacaggagaaaaagcttcaaaaccaggtactcatgagaagcaagagatgaaaaagaagaaagttgaaaaaggagtgcttaatgtacatcctgctgcttctgcttccaagccttctgcagatcagatcaggcaaagtgtcagacattctctcaaagacattcttatgaagagacttacagactcaaatttgaaggtaccagaggaaaaggcagcaaaagttgccacaaaaattgagaaagagcttttctctttttttcgggacacagatgctaaatataagaacaaatatagaagtttgatgtttaatttgaaagatcctaaaaacaatatattatttaaaaaagtactgaaaggagaagtaactcctgatcatcttatcagaatgagtccagaagaactagcttctaaagagttagctgcttggagacgaagagaaaacagacataccatagaaatgattgagaaagagcagagagaagtggaacgacggccaatcaccaaaataactcataaaggtgaaatagaaattgagagtgatgccccaatgaaagaacaggaagcagccatggagattcaggaaccagccgccaataagtcattggagaagccagaaggatctgaaaaacaaaaagaggaggttgactctatgtctaaagataccactagtcaacacagacagcatctttttgatctcaactgcaaaatctgcataggtcgaatggcaccacctgtagatgatctttctccaaaaaaagtaaaagttgttgtaggagtagctcgcaaacattcagacaatgaagcagaaagtatagcagatgcattatcttcaacctcaaatattttggcttctgaattctttgaggaggagaaacaggagtctccaaagtcaacgttctctcctgctccacgtccagagatgcctggaactgttgaagttgagtctacctttctggctcgattgaacttcatctggaaaggttttatcaacatgccttctgtggcaaaatttgttaccaaagcctatccagtatctggctccccagaatacctgacagaggacctaccagatagtattcaagtaggtggcaggatatcacctcagacagtttgggattatgtggaaaaaataaaagcatcaggaaccaaggaaatttgtgtggttcgcttcacaccagtaactgaagaagatcaaatttcttatactttgctctttgcatacttcagtagcagaaagcgctatggagtagctgctaacaacatgaagcaggttaaagatatgtaccttattcctttgggtgccacagataaaattccacaccctcttgtgccttttgatggacctgggcttgaactgcatagacctaatctattgttgggcttaattattcgtcagaaactgaagcgacagcacagtgcctgtgctagtactagtcatatagctgagactcctgaaagtgcaccaccaatagcattgccacctgataaaaaaagtaaaatagaagtttctacagaagaagcaccagaggaagaaaatgacttttttaattcttttacaactgtattacacaagcagagaaataaacctcagcagaatcttcaggaagaccttccaacagcagttgaacctttaatggaagtcaccaaacaggagccaccaaaacctttaagatttcttcctggcgtgttgattggctgggagaatcaacctactactctggaattagcaaataaacctcttcctgtggatgatatacttcaaagccttttgggcaccactggtcaagtatatgaccaggcccagtcagtgatggaacaaaacactgttaaagaaattccatttttaaatgagcagaccaactcaaaaatagagaaaacagataatgtggaagtaactgatggtgaaaacaaggagataaaagttaaagtagataatatttcagaatctacagataagtcagcagaaatagaaacatcagtagtagggtcctcttccatttctgcagggtctttgacgagtcttagtctcagaggtaagccaccagatgtttctacagaagcatttttaacaaatttatcaattcagtcaaaacaagaggaaactgtggagagtaaagagaaaacattaaaaagacagcttcaggaagatcaagagaataatttgcaagataaccagacttcaaatagttctccatgcagatctaatgtaggaaaaggaaacatagatggtaatgtgagctgtagtgaaaaccttgttgctaatacagcgaggtctccacagtttatcaacctgaaaagggatcctaggcaagcagcaggacgaagtcagcctgtaactacttcagaaagcaaagatggagatagttgccggaatggagaaaaacacatgctgcctggcctgtcacacaacaaggagcacttaacagaacaaatcaatgtagaggaaaagttgtgttctgcagagaaaaactcgtgtgttcagcagagtgacaatttaaaagttgcacaaaactcaccatcagtagaaaacatacagacttctcaagcagaacaagcaaaacccttacaggaggatattttaatgcaaaatattgaaactgtgcacccatttcgaagaggatcagcagtagcgacatctcattttgaagttggaaacacatgtccatcagaatttccttctaaaagcatcacctttacttccagaagcaccagccccagaacaagtacaaacttttcacccatgaggccacagcagcccaaccttcagcatctcaagtctagcccacctggatttccatttccagggcctcctaattttcccccacaaagcatgtttggatttccaccacatttgccacctccattacttccccctccaggctttggctttgctcaaaatcccatggttccctggccacctgttgttcatctcccaggtcagccacagcgtatgatgggtcctctctcacaagcatcaaggtatataggcccgcagaatttttaccaggttaaagacattcggaggccagaaaggcgccatagtgacccttggggtaggcaagaccaacagcaactggataggccatttaataggggtaaaggggaccgccagagattttatagtgattcacaccatttgaaaagagagcgacatgaaaaggaatgggagcaagaatctgaaaggcatagacgcagagacagaagccaagacaaggacagagacagaaaaagcagggaggaagggcacaaagataaagagagggcacggttatcacatggtgatcgaggaacagatggaaaagcaagcagagatagtaggaatgtagacaagaagccagataaacctaaaagtgaagactatgagaaggacaaagaacgagagaaaagtaaacacagagaaggagaaaaggacagggataggtaccacaaagatagggaccacactgacagaactaaaagcaaaaggtaaaatttgcaggctgcttcaggattacatttaaataactgttaaaatgttgtatcttgtaaacaaaagaaagattgcctgctaggattgtgccatctttaaaatttttactattggtcatttgcagaacagtaaattctgtgtgttggtacagagtgctctgtaccagtgctcatcatcccttcttcataccaacggtccctagttataggaatttaatatttttaaaagttttacattgctgtatattcaaagatttgttttattaatatgcaataaaggcttagaaattttagttttattccttaattggtaaatatggttaactatggaatatatttacttcctctagtgaatgtcctttatataatgactaatttgggagtaatgtgtgctctgtaagtttgttttaaattgcactgtttttaaagaaactgtagaggagcaacaaaaatccaagcaacttcataatcagattatgctaatcatttagttgagcagtttttgaccaagaatcagaagcccaaggggtacatttattgctttaatctgcactcattgaagtcatttattaccatatactacagctttgtggtaggccattattttcattttcatttttggctcttcagaaacttgaatacttaagcttgtacatgatcttgtgttttgctatcctttttactgtaaaatgtaaatattttaagggatattttgattctaaatatgataaaataatttctcacctattttgtgtgtgtgacttgaaattcagtagtaaaagaatttcttctttaaagcttt

SEQ ID NO: 1828 - protein, 2039 aa, Homo sapiens
MDIVDTFNHLIPTEHLDDALFLGSNLENEVCEDFSASQNVLEDSLKNMLSDKDPMLGSASNQFCLPVLDSNDPNFQMPCSTVVGLDDIMDEGVVKESGNDTIDEEELILPNRNLRDKVEENSVRSPRKSPRLMAQEQVRSLRQSTIAKRSNAAPLSNTKKASGKTVSTAKAGVKQPERSQVKEEVCMSLKPEYHKENRRCSRNSGQIEVVPEVSVSSSHSSVSSCLEMKDEDGLDSKHKCNNPGEIDVPSHELNCSLLSETCVTIGEKKNEALMECKAKPVGSPLFKFSDKEEHEQNDSISGKTGETVVEEMIATRKVEQDSKETVKLSHEDDHILEDAGSSDISSDAACTNPNKTENSLVGLPSCVDEVTECNLELKDTMGIADKTENTLERNKIEPLGYCEDAESNRQLESTEFNKSNLEVVDTSTFGPESNILENAICDVPDQNSKQLNAIESTKIESHETANLQDDRNSQSSSVSYLESKSVKSKHTKPVIHSKQNMTTDAPKKIVAAKYEVIHSKTKVNVKSVKRNTDVPESQQNFHRPVKVRKKQIDKEPKIQSCNSGVKSVKNQAHSVLKKTLQDQTLVQIFKPLTHSLSDKSHAHPGCLKEPHHPAQTGHVSHSSQKQCHKPQQQAPAMKTNSHVKEELEHPGVEHFKEEDKLKLKKPEKNLQPRQRRSSKSFSLDEPPLFIPDNIATIRREGSDHSSSFESKYMWTPSKQCGFCKKPHGNRFMVGCGRCDDWFHGDCVGLSLSQAQQMGEEDKEYVCVKCCAEEDKKTEILDPDTLENQATVEFHSGDKTMECEKLGLSKHTTNDRTKYIDDTVKHKVKILKRESGEGRNSSDCRDNEIKKWQLAPLRKMGQPVLPRRSSEEKSEKIPKESTTVTCTGEKASKPGTHEKQEMKKKKVEKGVLNVHPAASASKPSADQIRQSVRHSLKDILMKRLTDSNLKVPEEKAAKVATKIEKELFSFFRDTDAKYKNKYRSLMFNLKDPKNNILFKKVLKGEVTPDHLIRMSPEELASKELAAWRRRENRHTIEMIEKEQREVERRPITKITHKGEIEIESDAPMKEQEAAMEIQEPAANKSLEKPEGSEKQKEEVDSMSKDTTSQHRQHLFDLNCKICIGRMAPPVDDLSPKKVKVVVGVARKHSDNEAESIADALSSTSNILASEFFEEEKQESPKSTFSPAPRPEMPGTVEVESTFLARLNFIWKGFINMPSVAKFVTKAYPVSGSPEYLTEDLPDSIQVGGRISPQTVWDYVEKIKASGTKEICVVRFTPVTEEDQISYTLLFAYFSSRKRYGVAANNMKQVKDMYLIPLGATDKIPHPLVPFDGPGLELHRPNLLLGLIIRQKLKRQHSACASTSHIAETPESAPPIALPPDKKSKIEVSTEEAPEEENDFFNSFTTVLHKQRNKPQQNLQEDLPTAVEPLMEVTKQEPPKPLRFLPGVLIGWENQPTTLELANKPLPVDDILQSLLGTTGQVYDQAQSVMEQNTVKEIPFLNEQTNSKIEKTDNVEVTDGENKEIKVKVDNISESTDKSAEIETSVVGSSSISAGSLTSLSLRGKPPDVSTEAFLTNLSIQSKQEETVESKEKTLKRQLQEDQENNLQDNQTSNSSPCRSNVGKGNIDGNVSCSENLVANTARSPQFINLKRDPRQAAGRSQPVTTSESKDGDSCRNGEKHMLPGLSHNKEHLTEQINVEEKLCSAEKNSCVQQSDNLKVAQNSPSVENIQTSQAEQAKPLQEDILMQNIETVHPFRRGSAVATSHFEVGNTCPSEFPSKSITFTSRSTSPRTSTNFSPMRPQQPNLQHLKSSPPGFPFPGPPNFPPQSMFGFPPHLPPPLLPPPGFGFAQNPMVPWPPVVHLPGQPQRMMGPLSQASRYIGPQNFYQVKDIRRPERRHSDPWGRQDQQQLDRPFNRGKGDRQRFYSDSHHLKRERHEKEWEQESERHRRRDRSQDKDRDRKSREEGHKDKERARLSHGDRGTDGKASRDSRNVDKKPDKPKSEDYEKDKEREKSKHREGEKDRDRYHKDRDHTDRTKSKR

SEQ ID NO: 1829 - DNA, 1142 bp, Homo sapiens
atgtctcctacaaagaatgcaaaagcgagtcttattcaccacttggcacatggatccatccatgatgtaggtgcacaacaaactttggatggcagcaattgccaaaataaatatggtcctctggtgtatagtgataatgaaaatctgttttgtgagtgtccaaggctgtattcaggcaagctgtgccagtttgcaagttgtgaaaacaacccatgtggaaatggtgccacctgtgttccaaaatccggaacagatattgtctgcctctgcccatatgggaggtctggacccctctgcactgatgctattaatattactcagccaaggttcagtggcacagatgcctttggatacacctcattcctggcttattcacggatctcagacatcagcttccattatgaattccacctgaagtttcagctggcaaacaaccactcagcactgcaaaataacttgatattttttactggacagaaaggccatgggttgaatggcgatgacttcctggctgtgggcctgctcaatggcagtgtggtttatagttataacctggggtctggcatagcaagcatcaggagcgagcccctcaatctgagccttggagtccacactgttcatctgggcaagttcttccaagagggctggctgaaggtagatgatcataaaaataaatccattatcgccccaggaagactggttggtctcaatgtcttcagtcagttttatgtaggtggctacagtgaatacactccagatctcttaccaaatggagcagattttaaaaatggttttcaagttcaaaaggcaagagacagactgcagtcaacccatccataccaccaaggggtagcccacagaggccagagcaagccaagaggattaaggacaacattgtgcttggaaacattaagattgcacactcctggaagtatgtcaactgccacagtctttatctcgctgtgtcatcaaggctggagtacagtggtgccatctcagctcactgcaaccttcatctccagggctcaatcaatcctcccaccttagcctctcatgtagctgagccactaaacccagctaacatatccttacaaagctgatttatattgtagtagagttataaaataaagacatgctttaaa

SEQ ID NO: 1830 - protein, 348 aa, Homo sapiens
MSPTKNAKASLIHHLAHGSIHDVGAQQTLDGSNCQNKYGPLVYSDNENLFCECPRLYSGKLCQFASCENNPCGNGATCVPKSGTDIVCLCPYGRSGPLCTDAINITQPRFSGTDAFGYTSFLAYSRISDISFHYEFHLKFQLANNHSALQNNLIFFTGQKGHGLNGDDFLAVGLLNGSVVYSYNLGSGIASIRSEPLNLSLGVHTVHLGKFFQEGWLKVDDHKNKSIIAPGRLVGLNVFSQFYVGGYSEYTPDLLPNGADFKNGFQVQKARDRLQSTHPYHQGVAHRGQSKPRGLRTTLCLETLRLHTPGSMSTATVFISLCHQGWSTVVPSQLTATFISRAQSILPP

SEQ ID NO: 1831 - DNA, 3325 bp, Homo sapiens
tccttgaaacccgccggcgcacatgaggccgctgcccccgccgcaggcgctggcggccccctcgcggtgcccgtggtgatgccatgccccgccaccacgcgggaggagaggagggcggcgccgccgggctctgggtgaagagcggcgcagcggcggcggcggcgggcggggggcgcttgggcagcggcatgaaggatgtggagtcgggccggggcagggtgctgctgaactcggcagccgccaggggcgacggcctgctactgctgggcacccgcgcggccacgctcggtggcggcggcggtggcctgagggagagccgccggggcaagcagggggcccggatgagcctgctggggaagccgctctcttacacgagtagccagagctgccggcgcaacgtcaagtaccggcgggtgcagaactacctgtacaacgtgctggagagaccccgcggctgggcgttcatctaccacgctttcgtttttctccttgtctttggttgcttgattttgtcagtgttttctaccatccctgagcacacaaaattggcctcaagttgcctcttgatcctggagttcgtgatgattgtcgtctttggtttggagttcatcattcgaatctggtctgcgggttgctgttgtcgatatagaggatggcaaggaagactgaggtttgctcgaaagcccttctgtgttatagataccattgttcttatcgcttcaatagcagttgtttctgcaaaaactcagggtaatatttttgccacgtctgcactcagaagtctccgtttcctacagatcctccgcatggtgcgcatggaccgaaggggaggcacttggaaattactgggttcagtggtttatgctcacagcaaggaattaatcacagcttggtacataggatttttggttcttattttttcgtctttccttgtctatctggtggaaaaggatgccaataaagagttttctacatatgcagatgctctctggtggggcacaattacattgacaactattggctatggagacaaaactcccctaacttggctgggaagattgctttctgcaggctttgcactccttggcatttctttctttgcacttcctgccggcattcttggctcaggttttgcattaaaagtacaagaacaacaccgccagaaacactttgagaaaagaaggaacccagctgccaacctcattcagtgtgtttggcgtagttacgcagctgatgagaaatctgtttccattgcaacctggaagccacacttgaaggccttgcacacctgcagccctaccaagaaagaacaaggggaagcatcaagcagtcagaagctaagttttaaggagcgagtgcgcatggctagccccaggggccagagtattaagagccgacaagcctcagtaggtgacaggaggtccccaagcaccgacatcacagccgagggcagtcccaccaaagtgcagaagagctggagcttcaacgaccgaacccgcttccggccctcgctgcgcctcaaaagttctcagccaaaaccagtgatagatgctgacacagcccttggcactgatgatgtatatgatgaaaaaggatgccagtgtgatgtatcagtggaagacctcaccccaccacttaaaactgtcattcgagctatcagaattatgaaatttcatgttgcaaaacggaagtttaaggaaacattacgtccatatgatgtaaaagatgtcattgaacaatattctgctggtcatctggacatgttgtgtagaattaaaagccttcaaacacgtgttgatcaaattcttggaaaagggcaaatcacatcagataagaagagccgagagaaaataacagcagaacatgagaccacagacgatctcagtatgctcggtcgggtggtcaaggttgaaaaacaggtacagtccatagaatccaagctggactgcctactagacatctatcaacaggtccttcggaaaggctctgcctcagccctcgctttggcttcattccagatcccaccttttgaatgtgaacagacatctgactatcaaagccctgtggatagcaaagatctttcgggttccgcacaaaacagtggctgcttatccagatcaactagtgccaacatctcgagaggcctgcagttcattctgacgccaaatgagttcagtgcccagactttctacgcgcttagccctactatgcacagtcaagcaacacaggtgccaattagtcaaagcgatggctcagcagtggcagccaccaacaccattgcaaaccaaataaatacggcacccaagccagcagccccaacaactttacagatcccacctcctctcccagccatcaagcatctgcccaggccagaaactctgcaccctaaccctgcaggcttacaggaaagcatttctgacgtcaccacctgccttgttgcctccaaggaaaatgttcaggttgcacagtcaaatctcaccaaggaccgttctatgaggaaaagctttgacatgggaggagaaactctgttgtctgtctgtcccatggtgccgaaggacttgggcaaatctttgtctgtgcaaaacctgatcaggtcgaccgaggaactgaatatacaactttcagggagtgagtcaagtggctccagaggcagccaagatttttaccccaaatggagggaatccaaattgtttataactgatgaagaggtgggtcccgaagagacagagacagacacttttgatgccgcaccgcagcctgccagggaagctgcctttgcatcagactctctaaggactggaaggtcacgatcatctcagagcatttgtaaggcaggagaaagtacagatgccctcagcttgcctcatgtcaaactgaaataagttcttcattttctttccaggcatagcagttctttagccatacatatcattgcatgaactatttcgaaagcccttctaaaaagttgaaattgcaagaatcgggaagaacatgaaaggcagtttataagcccgttaccttttaattgcatgaaaatgcatgtttagggatggctaaaattccaaggtgcatcgacattaacccactcatttagtaatgtaccttgagttaaaaagcctgagaaaccaaacacagctaatgctatggggtgtatgaatatgtcaagtttaggtcatttagaagatttgacactgtattttgaaattatgggagtaaacaccttcaaatttcaggcatttctgctttgtgactaaatacaaactacattttcaagattaggccataatgtatatttaaacacaatggctatcaacagctgctaata

SEQ ID NO: 1832 - protein, 932 aa, Homo sapiens
MPRHHAGGEEGGAAGLWVKSGAAAAAAGGGRLGSGMKDVESGRGRVLLNSAAARGDGLLLLGTRAATLGGGGGGLRESRRGKQGARMSLLGKPLSYTSSQSCRRNVKYRRVQNYLYNVLERPRGWAFIYHAFVFLLVFGCLILSVFSTIPEHTKLASSCLLILEFVMIVVFGLEFIIRIWSAGCCCRYRGWQGRLRFARKPFCVIDTIVLIASIAVVSAKTQGNIFATSALRSLRFLQILRMVRMDRRGGTWKLLGSVVYAHSKELITAWYIGFLVLIFSSFLVYLVEKDANKEFSTYADALWWGTITLTTIGYGDKTPLTWLGRLLSAGFALLGISFFALPAGILGSGFALKVQEQHRQKHFEKRRNPAANLIQCVWRSYAADEKSVSIATWKPHLKALHTCSPTKKEQGEASSSQKLSFKERVRMASPRGQSIKSRQASVGDRRSPSTDITAEGSPTKVQKSWSFNDRTRFRPSLRLKSSQPKPVIDADTALGTDDVYDEKGCQCDVSVEDLTPPLKTVIRAIRIMKFHVAKRKFKETLRPYDVKDVIEQYSAGHLDMLCRIKSLQTRVDQILGKGQITSDKKSREKITAEHETTDDLSMLGRVVKVEKQVQSIESKLDCLLDIYQQVLRKGSASALALASFQIPPFECEQTSDYQSPVDSKDLSGSAQNSGCLSRSTSANISRGLQFILTPNEFSAQTFYALSPTMHSQATQVPISQSDGSAVAATNTIANQINTAPKPAAPTTLQIPPPLPAIKHLPRPETLHPNPAGLQESISDVTTCLVASKENVQVAQSNLTKDRSMRKSFDMGGETLLSVCPMVPKDLGKSLSVQNLIRSTEELNIQLSGSESSGSRGSQDFYPKWRESKLFITDEEVGPEETETDTFDAAPQPAREAAFASDSLRTGRSRSSQSICKAGESTDALSLPHVKLK

SEQ ID NO: 1833 - DNA, 1998 bp, Homo sapiens
acttccgctcgagcgcgcctcgcgcggccgcggcgcgagccgggacccctggaagggtcgggtgcgcggcccaggaggtaccgctgtctcctcacaatcggccaggcctgcagccgctgccgccgccgccgccgccgccgccctactcagggagtggcccaggcctgcggcgcgccaccctcacctccttcattcctaccgtcaaagcccagccttggctacctgacccccctgtggtctcgaactcggttagtccggtgaagggacagagaagcctgggttcccggcggcatcactgagatgctcagtcctgaattctgccctccattaggattatctgctttgtgggataatttcctcattggttgagtcagtgagttgcgtgtctgcaagagagcatcctatctggtcggagcagagcatggacatgggaacgagtgctctcagcaagaagccgtggtggaccctgcctcaaaactttcatgcaccaatggtgtttcacatggaagaggaccaggaggagctcatcttcgggcatggtgacacataccttcgctgcattgaggtgcacagccacacccttattcagctggagagttggttcacagctacaggccagactcgtgtgactgtagtcggaccacacagggcaaggcagtggctgctgcacatgttttgttgtgtggggagccaggactcctatcatcatgctcgaggtgggagcacagcatggccgtgggaacgagtgctctcagcaaggagccgtggtggaccctgcccgaaaactttcattctccaatggtgttccacatggaagaggaccaggaggagctcatcttcggacttgatgacacgtaccttcgctgcattgagctgcacagccacacccttattcagctggaggtgtttcacagctacaggccagacacgtgtgactgtagtcggaccaccaatggcaaagcagtggctgctgctcatgttccattgcgtggggagccaggactccaagtgtcacgctcgaggtctgaagatgctagagcgtgtccgaagccagcccctgaccaatgatgacctggtcacctccgttagcctgccaccgtacaccggagactgatctcccctgggaagaggggatgagaggagaagtcttggcttcgcttttgatggagtcttactctgtcgcccaggctggagtacaatggtgcgaactcagccacctgctacctctgccttctgggttcaagcaattctctgcctcagcctcctgagtaactggaattgcaggtcagagcagagcatggccatgggaacaagtgccctcagcaagaagccgtggtagaccctgcctgaaaactttcatgatccaatggtgtttcacatggaagaggaccaggaggagctcatctttggtgagtggcctttgcccacatcccctccttcatccttgtcttctccattttcaatttttcccttctttcctaccttcatcagtcacacatcggttcccccaaggctacctccccactccccaagggctggtgcttgatagaccctcctctcgcctcttatgctcacagggcatggtgacacataccttcactgcattgaggtgcacagcccctgaccaaccatgatctggtcgcctccattagtgtgccaccgtacaccagagacctgtctttggcctccaggataagtggaaccgtctgtcttagcgtacctcagcctttcccttaccaagtgattggtcgttaggtattctatttgagttcactctattcgtaattaaggacagatctcccctgggaagtggggatgagaggagaagtcttggcttcacttttggtgagaaagacatgaaagacactgaagaaagtttgaacttgtggcggggacctgtccctctcaggccttctaggcacgtgcctgagggaagtctcctgagtgtaagaagtgttattggcaaagcaatccaataaaataagctacctgtgatgc

SEQ ID NO: 1834 - protein, 230 aa, Homo sapiens
MDMGTSALSKKPWWTLPQNFHAPMVFHMEEDQEELIFGHGDTYLRCIEVHSHTLIQLESWFTATGQTRVTVVGPHRARQWLLHMFCCVGSQDSYHHARGGSTAWPWERVLSARSRGGPCPKTFILQWCSTWKRTRRSSSSDLMTRTFAALSCTATPLFSWRCFTATGQTRVTVVGPPMAKQWLLLMFHCVGSQDSKCHARGLKMLERVRSQPLTNDDLVTSVSLPPYTGD

SEQ ID NO: 1835 - DNA, 664 bp, Homo sapiens
gcggctagcagggagaggggcggagaggcagcgaacctctcaatgtgcagcaggccgcgagggctatataaagctcgggtctcggacctactggaactggtcaagattgcccgcgagctggcagcggccttccgcccagctctgcggcgtcatggagaacgcgggaggcgcagagggtacagagagtggagctgcggcgtgcgcggccaccgacggccctacgcggcgcgcgggcgcggactccggatacgcaggcttctggagaccctgggtggacgccggaggcaagaaagaagaggagacgccgaaccacgccgcggaggcgatgcccgatggccctggaatgaccgcagcctcaggaaagctttaccaattcaggcacccagtcagactattttggccaaaatcaaaatgttatgattacttatatcaagaagcagaagctcttctgaaaaattttccaattcaagccacaatttcattttatgaagattctgatagcgaagatgaaattgaggatctgacctgtgaaaattaatctgattagctacttttgattatatccaaagcttgtggggtttaaatttagtgtacaaatgtatcataattattttaaactaatttatttgtatataaattattaataaaatgaaatattttgtaa

SEQ ID NO: 1836 - protein, 128 aa, Homo sapiens
MENAGGAEGTESGAAACAATDGPTRRAGADSGYAGFWRPWVDAGGKKEEETPNHAAEAMPDGPGMTAASGKLYQFRHPVRLFWPKSKCYDYLYQEAEALLKNFPIQATISFYEDSDSEDEIEDLTCEN

SEQ ID NO: 1837 - DNA, 2259 bp, Homo sapiens
aatgcgcctcacccctggcgaccccggaagtgggtcgggggcttggcctctgcccggccacagagccggagctggaggtgctgtcccgtctggcggcgatccccgggcagggcccggggccggggtttgaagatgctgaacgtcccttcccagtctttcccggcccccaggtcgcagcagcgtgtcgcctccggggggcgtagcaaggtacctttaaaacagggcagaagccttatggattggattcgactgaccaaaagtggaaaggatctaacgggattaaaaggcaggttaattgaagtaactgaagaagaacttaagaaacacaacaaaaaagatgattgttggatatgcataagaggtttcgtttataatgtcagcccttatatggagtatcatcctggtggagaagatgaactaatgagagcagcaggatcagatggtactgaactttttgatcaggttcatcgttgggtcaattatgaatccatgctgaaagaatgcctggttggcagaatggccattaaacctgctgttctgaaagactatcgtgaggaggaaaagaaagtcttaaatggcatgcttcccaagagccaagtgacagatacacttgccaaagaaggtcctagttatccaagctatgattggttccaaacagactctttagtcaccattgccatatatactaaacagaaggatatcaatttagactcaataatagttgatcatcagaatgattcctttagagcagaaacaattattaaggattgtttatatcttatacatattgggctaagccatgaggttcaggaagatttttctgtgcgggttgttgagagtgtgggaaaaatagagattgttctacaaaaaaaagagaatacttcttgggactttcttggccatcccctgaagaatcataattcacttattccaaggaaagatacaggtttgtactacagaaagtgccagttaatttccaaggaagatgttactcatgatacgaggcttttctgtttgatgctgccaccaagcactcatcttcaagtgcccattgggcaacatgtttacctcaagctacctattacaggtacagaaatagtaaagccatatacacctgtatctggttccttactctcagagttcaaggaaccagttcttcccaacaataaatacatctactttttgataaaaatctatcccactggactcttcacaccagagcttgatcgtcttcagattggagattttgtttctgtaagcagtcctgagggcaattttaaaatatccaagttccaagaattagaagatctctttttgttggcagctggaacaggcttcacaccaatggttaaaatactgaattatgctttgactgatatacccagtctcaggaaagtgaagctgatgttcttcaataaaacagaagatgatataatttggagaagccaattggagaaattagcatttaaagataaaagactggatgttgaatttgttctctcagcacctatttctgaatggaatggcaaacagggacatatttcaccagctcttctttctgaatttttgaaaagaaatttggacaaatccaaagttctcgtctgcatttgtggaccagtgccatttacagaacaaggagtaaggttgctgcatgatctcaacttttccaaaaatgagatccatagttttacagcataatgaagagctgtcattgtcctttattcaactagtttatctaaatttgtgattgcttagggttttttaagagaacatttttgtacataacaaaaggttaactagaatccagccttcagtttcttaaatgaaatcaaatgttccttcagtacaggtaacttcttggctttcttttgtaccacaacttattttactactgatatttgacctggaaagttaatcatggcaacaaatacatacaggattctttgttatgaatcacaaatttccttgccatttaaattatatcactgttctacaataagcacttgtgttttatgacatgataaagtaaatgatcacttcgatcatgtttctatgctgtaaaatgtcttattagcaatacagattaaattttaccttgcactgttaactcaggaaatgatcatttatgtccttgttattaatgttaaaacatagaatgttataacttattaagtgatccaaacatttttttgtgtgtgtatggcattgatgcagaatagaataaaattatacttaagttctttttaaaaaaaaaaaaaa

SEQ ID NO: 1838 - protein, 521 aa, Homo sapiens
MLNVPSQSFPAPRSQQRVASGGRSKVPLKQGRSLMDWIRLTKSGKDLTGLKGRLIEVTEEELKKHNKKDDCWICIRGFVYNVSPYMEYHPGGEDELMRAAGSDGTELFDQVHRWVNYESMLKECLVGRMAIKPAVLKDYREEEKKVLNGMLPKSQVTDTLAKEGPSYPSYDWFQTDSLVTIAIYTKQKDINLDSIIVDHQNDSFRAETIIKDCLYLIHIGLSHEVQEDFSVRVVESVGKIEIVLQKKENTSWDFLGHPLKNHNSLIPRKDTGLYYRKCQLISKEDVTHDTRLFCLMLPPSTHLQVPIGQHVYLKLPITGTEIVKPYTPVSGSLLSEFKEPVLPNNKYIYFLIKIYPTGLFTPELDRLQIGDFVSVSSPEGNFKISKFQELEDLFLLAAGTGFTPMVKILNYALTDIPSLRKVKLMFFNKTEDDIIWRSQLEKLAFKDKRLDVEFVLSAPISEWNGKQGHISPALLSEFLKRNLDKSKVLVCICGPVPFTEQGVRLLHDLNFSKNEIHSFTA

SEQ ID NO: 1839 - DNA, 2207 bp, Homo sapiens
tccggcgccccgcgccgcctccgctgcgggtcgggagcgcgcgtctccgccgcacctcggatctaggagctactcgcccggccctgggcggtgggaggcggcggcggcggcggcgctcgcgcacctcggaggagccaggagccggaaccagggccgagcccgcgggccggggctagccagccggtcggagatgtccgcccagaggttaatttctaacagaacctcccagcaatcggcatctaattctgattacacctgggaatatgaatattatgagattggaccagtttcctttgaaggactgaaggctcataaatattccattgtgattggattttgggttggtcttgcagtcttcgtgatttttatgtttattgtgctgaccttgctgaccaagacaggagccccacaccaagacaatgcagagtcctcagagaagagattcagaatgaacagctttgtgtcagactttggaagacctctggagccagataaagtattttctcgccaaggcaacgaggagtccaggtctctctttcactgctacatcaatgaggtggaacgcttggacagagccaaagcttgtcaccagaccacagcccttgacagtgacgtccaactccaggaagccatcagaagcagtgggcagccagaggaggagctgaacaggctcatgaagtttgacatccccaactttgtgaacacagaccagaactactttggggaggatgatcttctgatttctgaaccacctattgttctggaaactaagccactttcccagacctcacacaaagacctggattgagaaacatgctctgtaaagggtcttcctgaagatgtggattctatctttatgtagcaagaaatctacatccaccaaaattgtgtgtgtttgggggagagagagacatagagatagagacagagaggcagagaagagacccctttagaagagagctgagctgattaagctgagtggttttttgttttgttttgtttttgctttttaatacatttggagctttgggagtattaaagtatttacaccaagcttgtccaacccgtggcatgtgtcccaggacagctttgaatgtggcccaatacaaattttaaactttattaaaacatgagttttgtttttttttttgctattttttttaaagctcgtcagctatcgttagtgttagtgtactttatgtgtggcccaagacaactcttcttccagtgtggcacagggaagctaaaagattggacacctctgatttatactagctcgttttgcttgttgaaaaatttggccaaatacctattgtcagcattcttgggtgaggattagcctaccatgttctaatctggccctgccactactatgctctacctttggtgagttgctttacctctctgggctgccccatttttaactgtaggttgacaggtctagagtgatccatcccacctctaatattttgtgaatttatgactttgccttcagatgaggctgagctatacataaaacagtataaactagggtactgcctcgtatctcttgtaggctctctcaaatctctgtaccttccacttaaccctaattgagccaagctttagtcaggggatctggttgtctaccagaatgtcaggagactcatcttacacagtcatggtggccaatgtttctggtgggttgtgctgaaacagctcttctgagaacttccaaccacccatgctctaacctggagacagccatcccctgcctcagaataagtaccaattcgtagtacatgtatggtactcttgtccccaagaaatgttaggaagcttgtcagctgaatgagaggaggtgccttctgggtatctctgtgttggtgtatctgtgccattggctacagaacaagaaaaatactatttgccatgctattaccttggcagatgtgtaggtgatagtcatctggctttgagctgagatggtcagtgggttgtaaattccccactagcagatattcagggtggcctgagttatgtaaacaagtgagcaacacagctttaatttcatggaggaatcaaagctgcacactggtattaaaacaacttgattttgcgcacacagttgcatgcatggcaagctgttaacctctgggtggcattttcattatgaatttgttcaccacctgtcttgcttaagctacaaaataaatgcatttgactgc

SEQ ID NO: 1840 - protein, 205 aa, Homo sapiens
MSAQRLISNRTSQQSASNSDYTWEYEYYEIGPVSFEGLKAHKYSIVIGFWVGLAVFVIFMFIVLTLLTKTGAPHQDNAESSEKRFRMNSFVSDFGRPLEPDKVFSRQGNEESRSLFHCYINEVERLDRAKACHQTTALDSDVQLQEAIRSSGQPEEELNRLMKFDIPNFVNTDQNYFGEDDLLISEPPIVLETKPLSQTSHKDLD

SEQ ID NO: 1841 - DNA, 5051 bp, Homo sapiens
ggaattcagaggcagagctttcagatgattcttttgaaaattcagacaaaacagctagacaatctaaaaaagagatgaagaagaaagatacagtgccttggtggataactgaagatgattttaaagatgatgttatctactgaactccgggttattcctcctcattcctcaaagattttagctgctgtttcactgacttcttggaacaaatgtgagctatttgaaaacaaagaagacttctcagcctgttatggaaatagaagaggagtctgctgaaaagattcaatttcttaagagcagtggaacctctctcttaagtactgatagcttagaaacaaatgaactagtagtttctgagctcaaccatagtagtctcggagtgggattggacacattagaagaacaagaggagaaagaacaattttttgccaggcttgagaaaggcttgacatcttccattgattattcgagattaaataaggaattggattctaatgactctacacattttaaagctttacatattaatcaagccaacgcagaactaactgatgacgaacatgagaatgaatcgaaacatgaagaactggcagaaaattacagtgatgattttgaagatgagtatgttggtgcaccgttgactactaaagatgaagagatgccttccaaagagaattccaaatcagaaaaaataagtgtgcccaaacaggaagaagaaaaaactggcatgcttgctaatgttgtgctgcttgattcattagactctgttgcagaggtcaatcttgatgaacaagataaaataacacctaagccaaggtgcctaccagaaatgactgagaatgaaatgacaggaacaggtgtttcttatggacaaagcagtagtgacgttgaagccctacatcaagcttattgtcatatagcccattcattgggagatgaagacaaacaaaaaattgagagtaacacagtggaagatatcaagagctcagtgaaaggtcatcctcaagaaaatgaagagaattcaaaaaacatctctactatggaatctgatctgcccacagtagaggagctgatgaaacctatcagaatagattcctttgggatcagtggttttgatttacaacctgtcagctctgagaaagtggccgaaagaaaagaaactgaattttttagctctttacccctgaagatgaacccaaatattttgtctcaagactcacaacatgtgaaccttttttttgacaaaaatgatgagaatgtgattttacaaaagaccacaaatgagagtatggaaaacagctgtccacaagtaactgaagtaactgccacagaagaacatgttgataaaatgtaccttaatattttgaggaaaaaaataactgttaattcttcatcattatctcaggatgacaaaattaataaaacttacagatctcaacttagttctgaagaagaaggggctgtaatgggtaaacaggtaccatacaagaaggccagaagtgcacctcctttacttaaaaggaaaccccagagtggattatatgcgtcagttaggagctcaggctatggcaaacccagttcaccactcaagatgttttctactcttgaaaagaaaacttcagaggacattataaaaagcaaaaacttgagatcgatttctacctccaatcaacctaggaaaaaagaaatcttatctggaacaaaactcatcaagcctgcagctttggataaaccagctcacaaaactgaaagttgcctgtctactcgtaagaagtctgaaaatcccacagaaactgattcctgtattcagtttcagactgattccttaggatactgtggtgagaacaaggagaagaaattacttatgtttaaaagagttcaggaagcagaggataaatggaggggtgcgcaagccctaattgagcaaattaaagccacattctcagaaaaggagaaagaactagaaaataagttggaagaactaaagaaacaacaggaaaaagaactcttcaaattgaatcaagataattatattcttcaagccaagttaagcagctttgaagaaacaaacaaaaaacaaaggtggttacattttggagaagcagctgatcctgtcactggagaaaagttgaagcaaatccaaaaagaaatacaagaacaagagacacttcttcaaggatatcaacaggaaaatgaacgattatataatcaagtaaaagatctccaagaacaaaacaagaaaaatgaggagcgaatgtttaaggaaaaccaaagtttattcagtgaggtagcttccttaaaagaacagatgcacaaaagtcgttttctgtctcaagtagttgaagattcagagcccacaagaaatcagaattttacagatctgttagcagaactacggatggcacagaaagaaaaagacagtttattggaagacatcaaaagactgaaacaagacaaacaagctcttgaagtagacttcgaaaaaatgaagaaagagagggaccaagccaaagatcagattgcttatgtcacaggtgagaaattatatgaaataaaaattttagaagaaacacataaacaagaaatcagtcgtctgcaaaaaagattacagtggtatgctgaaaatcaggaacttctggataaagatgcacttcggcttagagaagcaaatgaggaaattgagaagctcaaacttgagattgagaaactgaaagctgaatctgggaatccatctattcggcagaagatacgcttaaaagataaagcagcagatgccaaaaaaattcaggatctggagcgacaagttaaggaaatggaagggattctgaagagaagatatcccaattctttacctgctttaatattggctgcatcagcagctggtgatacagtggataaaaatacagtggaatttatggagaaaaggataaaaaagctagaagctgatctggagggcaaagatgaagatgcaaagaaaagccttcgtaccatggaacaacagtttcagaaaatgaagattcagtatgaacaaagactagagcagcaggagcagctacttgcctgcaaattgaatcaacatgactctcccagaattaaagccctagagaaggaacttgatgacatcaaggaagcccatcagatcactgtaagaaaccttgaagccgaaatagacgttcttaaacatcagaatgctgaattagacgtcaagaaaaatgataaagatgatgaagattttcagtctatagaattccaggtggaacaggctcatgctaaagctaaattagtaagactcaatgaagaactggctgcaaaaaagagagaaatacaagacctctcaaaaactgtggagaggcttcagaaagacagaagaatgatgctatcaaatcagaactcaaagggcagagaggaaatgtctgccaaaagggcaaagaaagatgttttgcactcaagtaaaggaaatgctaactccttccctggaaccctggacagcaagctgtaccaaccacatactttcactgattcccatgtttcagaagttttacaagaaaactacagattaaaaaatgagctagaaggattaatttcagagaagaatgaactgaagatgaaatctgaagcagtgatgaatcaatttgaaaactccatgagaagggtcaaggaagatactgcagcacacattgcatccctcaaagcatctcatcagagagaaatagagaaactcctttgccaaaatgcagtagaaaattcttcttccaaagtagctgaactaaatcgtaaaatagcaactcaagaggtacttataagacatttccaaagtcaagttaatgagctgcagagtaaacaagagtctctcgtagtttctgaagttcgagaagaaattctacagaaagagattacaaaactcttagaagaattgagagaagccaaagaaaaccatacaccagagatgaaacatttcgtgggcttagaaaagaaaattaagcagatggaaatgagacatgcacaaagagaacaggaacttcaacagataatacagcaaacacaccaagtagtagaaactgagcaaaacaaagaagttgaaaaatggaaaagactggcacagttaaagaatcgtgagctggagaagttccgcacagaactagactcaatattagatgttctccgagagctgcaccggcaaggagtggttgtgccagttgcttttgcagatgaaatgaatgcaccagagtattaatagaaattcagatttcataatgaccttattaaaaggcctgaagatggatgggattgtgccactgtcaggacagcttatgaaaaacaagtgttccaatatgtttccagaaagcaaacaaccaaagcaacatttcaaaataaattgcctttaaccaataagaaaaaaaacatataatggtgtattttactaaaaatcattaaccagtctcattttaagtgatttatggacagtttcctttatagcagagaagggctcacttgtatgctagaaatagaaagaaaagaaaattgaacatactccgccacatttttattgataatgtgaggtttttaaaatttttattttagatccagggggtacatgtgcttgttgtaacatgggtgtattgaataatggtgggaattgggcttctagtgtacccatcatccaaatattaaacactgtacccaacaggtaatttttcaacgcttactgccgctcacactctttcccctattggagtccccagtgtctgttatctccatctttatgtctctgtgtacccattgtttagctcctacttttaagtgagaatatatgcaatattttattttttatgtctgatttagttcacataggataatggcctccagctctatccatgttgctgcaaatgacatgatttcattcttttttatagttgcataatactccatttatatatctctctctatatatatctcacgttttctttatccagtcaattgttggtagatacttaggttggttccatgaatttgctattgtaaatattgctgcaataaacatacatgtacag

SEQ ID NO: 1842 - protein, 1327 aa, Homo sapiens
MEIEEESAEKIQFLKSSGTSLLSTDSLETNELVVSELNHSSLGVGLDTLEEQEEKEQFFARLEKGLTSSIDYSRLNKELDSNDSTHFKALHINQANAELTDDEHENESKHEELAENYSDDFEDEYVGAPLTTKDEEMPSKENSKSEKISVPKQEEEKTGMLANVVLLDSLDSVAEVNLDEQDKITPKPRCLPEMTENEMTGTGVSYGQSSSDVEALHQAYCHIAHSLGDEDKQKIESNTVEDIKSSVKGHPQENEENSKNISTMESDLPTVEELMKPIRIDSFGISGFDLQPVSSEKVAERKETEFFSSLPLKMNPNILSQDSQHVNLFFDKNDENVILQKTTNESMENSCPQVTEVTATEEHVDKMYLNILRKKITVNSSSLSQDDKINKTYRSQLSSEEEGAVMGKQVPYKKARSAPPLLKRKPQSGLYASVRSSGYGKPSSPLKMFSTLEKKTSEDIIKSKNLRSISTSNQPRKKEILSGTKLIKPAALDKPAHKTESCLSTRKKSENPTETDSCIQFQTDSLGYCGENKEKKLLMFKRVQEAEDKWRGAQALIEQIKATFSEKEKELENKLEELKKQQEKELFKLNQDNYILQAKLSSFEETNKKQRWLHFGEAADPVTGEKLKQIQKEIQEQETLLQGYQQENERLYNQVKDLQEQNKKNEERMFKENQSLFSEVASLKEQMHKSRFLSQVVEDSEPTRNQNFTDLLAELRMAQKEKDSLLEDIKRLKQDKQALEVDFEKMKKERDQAKDQIAYVTGEKLYEIKILEETHKQEISRLQKRLQWYAENQELLDKDALRLREANEEIEKLKLEIEKLKAESGNPSIRQKIRLKDKAADAKKIQDLERQVKEMEGILKRRYPNSLPALILAASAAGDTVDKNTVEFMEKRIKKLEADLEGKDEDAKKSLRTMEQQFQKMKIQYEQRLEQQEQLLACKLNQHDSPRIKALEKELDDIKEAHQITVRNLEAEIDVLKHQNAELDVKKNDKDDEDFQSIEFQVEQAHAKAKLVRLNEELAAKKREIQDLSKTVERLQKDRRMMLSNQNSKGREEMSAKRAKKDVLHSSKGNANSFPGTLDSKLYQPHTFTDSHVSEVLQENYRLKNELEGLISEKNELKMKSEAVMNQFENSMRRVKEDTAAHIASLKASHQREIEKLLCQNAVENSSSKVAELNRKIATQEVLIRHFQSQVNELQSKQESLVVSEVREEILQKEITKLLEELREAKENHTPEMKHFVGLEKKIKQMEMRHAQREQELQQIIQQTHQVVETEQNKEVEKWKRLAQLKNRELEKFRTELDSILDVLRELHRQGVVVPVAFADEMNAPEY

SEQ ID NO: 1843 - DNA, 3995 bp, Homo sapiens
cgaattttcaaagaacatattttccgttcacccccgctggtcttttactgccatcaatacactgttcttggtgcaaatacttcagcctctttattcaaagtatgttttatgtttttgccaaatatgatctctaattgaaagtttatttttggttttggatgaatctgcggagcttaagttgtgagaagaaagggggaacaagacacaatgaaagaaaagtccaaaaatgctgcgcggactaggagggagaaggaaaacagtgaattttatgaactggctaaattactgcctttgccctcggctatcacctcgcagctggacaaagcatccataatcagactcacgaccagctatctcaaaatgagagtggtgttcccagaagggctcggcgaggcgtggggccactcaagtcggaccagccccctggacaacgttggccgagaactgggctcccatctgctccagaccctggatggcttcatcttcgtggtagccccagatgggaagatcatgtacatctcagagacagcctcagtccacttgggtctttctcaggtagagctgaccggaaacagcatttatgaatacattcacccggcagaccacgacgagatgacggcggtgctcaccgcccatcaaccctaccactctcacttcgtgcaggagtatgagatcgagcgctccttcttcctgaggatgaagtgcgtcttggccaagcgtaacgccggcctcacctgtggcggctacaaggtcatccactgcagcggctacttgaagatccgccagtacagcctggacatgtcccccttcgacggctgctaccaaaacgtgggcctggtggccgtgggccactcgctgcctcccagcgccgtcacggagatcaagctacacagcaatatgtttatgttccgcgccagcctggacatgaagctcatctttctggactccagggtggcggagctgacggggtacgaacctcaggacctgattgagaagactctgtaccaccatgtgcacggctgcgacaccttccacctgcgctgcgcgcaccatttgctgctggtgaagggacaggtgaccaccaagtactacaggttcctggcgaaacacggcggctgggtatgggtgcagagctacgcgaccatcgtgcacaacagtcgctcctccaggccacactgtatcgtcagcgtcaactatgtcctcacagacacagaatacaaagggctgcagctctccctggatcagatctcagcctccaaaccagccttctcctataccagcagctccacccccaccatgactgacaacagaaagggggccaaatcccggctctccagctcaaagtcaaaatccaggacttccccataccctcagtattcgggatttcacacagaaagatcggaatctgatcatgacagccagtggggcggaagtcccttgaccgacacggcctctccgcagcttctggaccccgccgataggcctggctcccagcacgacgcatcgtgcgcctacagacagttttcggaccgcagctctctctgctatggctttgcgcttgaccactcgaggctggtggaagagaggcatttccatacccaggcctgtgaaggaggccgatgtgaggcaggcaggtacttcctgggaacgccgcaggccgggagggagccctggtggggctctcgcgcagccttgcccctgacaaaggcctccccagaaagcagagaagcctatgaaaacagcatgcctcacatcgcttcagtccacaggatccatgggcgaggtcattgggatgaagatagtgtggtcagttctccagaccctgggtcggccagtgaatcaggtgaccgatatcgtactgagcagtatcaaagtagcccacatgaacccagcaaaattgaaactcttataagagccactcagcaaatgattaaagaagaagagaacagattacagctaaggaaagccccctcagaccaactggcttccattaatggggctgggaaaaaacactccctgtgttttgcaaactaccaacagcccccaccaacaggtgaagtctgccatggctctgctcttgccaacacttcaccatgtgaccatatccagcagagagagggaaaaatgttgagcccccatgaaaatgactatgacaacagtcccaccgcactatctcggataagtagtcccaattcggatcgcatttcaaaatccagtttgatcctagctaaagactatctgcattcggatatatctcctcatcagacagcaggagaccaccctactgtctctccaaactgctttggctctcaccggcagtattttgacaagcatgcttacacattaactggatatgccctggagcacttatatgacagcgaaaccattagaaactattccttgggctgtaatggctcacactttgatgtaacttcccatctgaggatgcaaccagacccagcacaaggacacaagggaacatctgttataataaccaacggaagctgatgttttgctgaaatattttgttctttaaggatctctgaaacatatttatagtttaataccccattaccagcatttactatgccacagattgttagagagtataacttaagttactgggtatttgatacgtgttcctataaaatcaaagaaaacatagcactagcattcagggttatacacagaaaagggagctaaattgaatacacaaatttcccctctaattatatgggaaccagaatagataaattttgacttgaaaaatattcatgtagatcaagtgtgcatatatactacatgagaggactgatgaatgacaacattgcattgtgactatccagtgatcctcaaacacacaaactattacttacaaactgcggtatacattttacatatggaaatataggctatgtaatgtaaatacatcaaaaatgggtaattttctttgactctgtcacactaaacttcttaacgaaatttccattcccaaaataactgagaaagagagagatacatcttataaactgacttctttgtggtttcaaatcagccagctcatttggttcaggcataaattagagaaatggttctggatatggtgcaaaaatgagttttcacctggtatccattataaacaatcaggaagaggtaatttttcaccttgcttttcagttagacaaggaccaggattgcactgacatggcgctgagggtttttctaagtaagaacactgagatattgggacacacatcaaaaacctggagtgctcaattggaagtagttctatgaatatggaaaggccagaggcagagtgaaataaaatgctatctcaaagtttaacacaatttaagggctcagcataagtaaacaacatatttggggtttgcttgtaaaaccaactaaataaaaaattcaaaccaattcacccagaaaaaagaccaataggtgcaaaaataaaaggaaaaccagtgaagtgccacatgacagcagtgttaagtgtttgaaaacgtttcaaagcacatatgtgccaatgtgacaacatgtggaaagcctcaggagagagtctaagataaaagcttaggctgatagacaagtagttaagagctaagagcagtactctgaaggaataggcaaaatgtttattttccttattgtttgtaaacaacaaacttggtcttacatctgtgtggtatagtagaaaggccagctgactagatctctggattctaattttggccctacctgtaacttaattttgtgaccacagttgtaccattcaccgtgcctgggctctagtttcctggtttgtaaggcagccccagcgttcatgttctgtgatagagcagaactgaacttattacctaattaactctctgctatgagttgtcaagactgatcattctgttttttctgtacacagaagtttagatgctttgtgacttaagcaggtgtgtgggctcctttaggcaggttacagttaactttctaga

SEQ ID NO: 1844 - protein, 766 aa, Homo sapiens
MKEKSKNAARTRREKENSEFYELAKLLPLPSAITSQLDKASIIRLTTSYLKMRVVFPEGLGEAWGHSSRTSPLDNVGRELGSHLLQTLDGFIFVVAPDGKIMYISETASVHLGLSQVELTGNSIYEYIHPADHDEMTAVLTAHQPYHSHFVQEYEIERSFFLRMKCVLAKRNAGLTCGGYKVIHCSGYLKIRQYSLDMSPFDGCYQNVGLVAVGHSLPPSAVTEIKLHSNMFMFRASLDMKLIFLDSRVAELTGYEPQDLIEKTLYHHVHGCDTFHLRCAHHLLLVKGQVTTKYYRFLAKHGGWVWVQSYATIVHNSRSSRPHCIVSVNYVLTDTEYKGLQLSLDQISASKPAFSYTSSSTPTMTDNRKGAKSRLSSSKSKSRTSPYPQYSGFHTERSESDHDSQWGGSPLTDTASPQLLDPADRPGSQHDASCAYRQFSDRSSLCYGFALDHSRLVEERHFHTQACEGGRCEAGRYFLGTPQAGREPWWGSRAALPLTKASPESREAYENSMPHIASVHRIHGRGHWDEDSVVSSPDPGSASESGDRYRTEQYQSSPHEPSKIETLIRATQQMIKEEENRLQLRKAPSDQLASINGAGKKHSLCFANYQQPPPTGEVCHGSALANTSPCDHIQQREGKMLSPHENDYDNSPTALSRISSPNSDRISKSSLILAKDYLHSDISPHQTAGDHPTVSPNCFGSHRQYFDKHAYTLTGYALEHLYDSETIRNYSLGCNGSHFDVTSHLRMQPDPAQGHKGTSVIITNGS

SEQ ID NO: 1845 - DNA, 7598 bp, Homo sapiens
gtaggccggcgccagctccactctgtccctcctcgccgggtctgtgcgtctttgcgtctgtctgtctgactgatggtcctcacacgcggttccctgtgactgggcgcgaccccggcaagcgcggcttggagggcggacggggcgcggcgatacagctgcccgctcgcatctttggccctgcgctcagctcctcacccggcgtgggaagttaaagtaaaaccgaaagggaagaaggcgcggtggcaggagctgacagagtgatgggaaacgcgtgagccaggccgagagtttcaggtttcttgctgtatggatcactgattgaataatagatggctttacctcgtctcacaggagccttgcgttccttttcaaatgtcaccaagcaagataattataatgaagaagtggctgacttaaagataaagcgatctaaacttcatgaacaagttttagatttgggcctgacatggaagaagataataaaatttttgaatgaaaaactggagaagagtaaaatgcaaagtataaatgaagacttaaaagatatattacatgctgcaaagcagatagttggaactgataatgggagagaagcaattgaaagtggggctgcatttctcttcatgacatttcacttgaaggactctgttggtcacaaggaaacaaaggctatcaaacagatgtttggcccctttccttcatcatctgccactgcagcttgtaatgctactaatcgaattatttctcattttagtcaagatgatcttactgctcttgtgcagatgacagaaaaagaacatggcgatagggttttttttggtaaaaatttagcattttcatttgacatgcatgatttggaccactttgacgaactgccaataaatggtgaaactcagaaaactataagcctagattataagaagtttctgaatgaacatctccaggaggcttgcaccccagaactcaagcctgtggaaaaaacaaatggctcctttttgtggtgtgaagttgaaaagtacctaaattcaactttgaaggaaatgactgaagtgccaagagtagaagatctttgctgtactttatatgatatgcttgcttctattaaaagtggtgatgaacttcaggatgagctatttgaactgctgggacctgaaggacttgaacttattgagaaactcctccagaacagaattacaattgtggatagatttcttaattcttcaaatgatcataggtttcaggctcttcaagacaattgtaaaaaaattttaggagaaaatgctaaacccaattatggttgtcaagtcactattcagtctgaacaagaaaagcagttaatgaaacaatatcgacgtgaagaaaaaagaattgccagacgagaaaaaaaggctggagaagatttagaagtttcagaaggacttatgtgctttgatcctaaggaattgcggatacaaagagaacaggcacttctgaatgctagaagtgttccaattctgagcaggcagagagatgcagacgttgaaaaaatacattatccccatgtgtatgattcccaggctgaagccatgaaaacatcagcatttattgctggtgcaaagatgattttgccagaaggaatccaaagagagaataacaagctttatgaagaagtaaggattccctacagcgaaccaatgccactcagctttgaggaaaagccagtttatatccaagacttagatgagatcggacagctggcttttaaaggaatgaagagactcaatagaatccagtcaatagtgtttgagactgcctacaacaccaatgagaacatgctgatttgtgcccctacaggagctggaaaaaccaacattgcaatgctgacagtcttgcatgaaattcgccaacattttcaacaaggtgttatcaaaaagaatgaatttaagattgtatatgttgctccaatgaaagccttggcagctgaaatgacagattacttcagcagacgtctagagccactaggcatcattgtgaaagaattgactggtgacatgcagttgtccaaaagtgaaattttacgaactcagatgcttgtgaccacaccagaaaaatgggatgtagtgacaagaaagagtgttggggatgtagctctttcccagattgtaaggctccttattcttgatgaagttcatttgctgcatgaagatagaggaccagtattagaaagcatagttgcccgtactttacggcaggtggaatccacacagagtatgataaggattctcggactgtctgcaactttacctaactacctcgatgttgccacatttttacatgttaatccatacattggacttttcttctttgatggccgttttcgaccagtacctcttggacagacatttttggggattaaatgtgcaaataagatgcagcagttgaataacatggatgaagtatgttatgaaaatgttttgaagcaagtaaaggctggacaccaggtgatggtgtttgtacatgctcgaaatgccactgtaagaacagctatgtctctaatagaaagagcaaaaaattgtggccatattcccttcttttttcctacccaaggacatgactatgtacttgcagaaaaacaggtacaaaggtcgagaaataagcaagtacgagaattattcccagatggttttagtattcatcatgcaggaatgcttcggcaggacagaaatttagttgaaaacttgttttctaatgggcatatcaaagtcctagtgtgtacagctacgttagcctggggtgtcaatcttcccgcccatgctgttattattaagggaacacaaatatatgctgcaaaaagaggctcctttgttgaccttggaattttagatgtcatgcagatatttggtcgagctggacgaccacaatttgacaaatttggggaaggaataattataacaacgcatgataaactcagccattacctcactttgctcactcaacgaaacccaattgagagtcagtttctggaaagccttgcagataacctaaatgcagagattgctctgggaacagttactaatgtggaagaagcagtgaagtggataagttacacttatctttatgtacggatgagagcaaatccattagcatatggcatcagtcacaaggcttatcagattgacccaacattaagaaagcatcgagaacagttggtcattgaagttggacgaaaactagacaaagctcagatgattcgttttgaggagcgaactggatatttttcctcaactgatttgggtagaactgccagccattactatattaaatacaacaccattgagacctttaatgaactctttgatgctcacaaaacagaaggtgatatctttgccatagtctccaaagctgaagaatttgatcaaattaaggtcagagaagaggaaatagaggagttagataccttattaagcaatttttgtgaactctccactcctggaggtgtagagaatagttatgggaaaataaacatcttacttcaaacttatatcagccgaggagaaatggacagtttctcccttatatcagattctgcatatgttgcacagaatgcagctagaattgtccgtgctctttttgaaattgctctgaggaaacgttggcctaccatgacctacaggctcctgaatcttagtaaagtcattgacaagaggctttggggttgggctagccctttgagacaattttcaatcctaccaccacacatcctaacaagattagaagaaaaaaagcttactgtggataagctgaaagacatgaggaaagatgaaataggtcacattttacatcatgtgaatattggactgaaggtcaaacaatgtgttcatcagattccttctgttatgatggaagcatccattcagcctatcacaaggactgtcctccgagtgacactcagcatctatgctgatttcacttggaatgatcaggtacatgggacagtaggagaaccttggtggatttgggtagaagatcctacaaatgatcatatttatcattcagagtattttctagctctaaaaaaacaagtcattagtaaagaagcccaactactggtatttacaatccctatttttgagcctttgccttcccaatactacatccgagcagtgtctgatagatggttgggtgctgaggcagtatgtattatcaactttcaacatctaattctaccagagagacatcctcctcatacagaattactggatcttcagcctttaccaatcacagctttgggatgtaaagcatatgaagccctgtacaacttcagccactttaaccctgtacagacacaaatatttcatacattgtatcacacggattgtaatgtcctacttggagcacctactggatcgggaaagactgttgcagctgaattagccattttcagagtcttcaacaaataccctacttcaaaggcggtatatattgcacccctaaaagccctagtacgtgaaagaatggatgattggaaagttagaatagaagaaaaacttggtaaaaaagttattgaactaacaggggatgtgactcctgatatgaaatccattgccaaggctgaccttatcgtcactacgccagagaagtgggatggagtcagcagaagctggcaaaataggaactatgttcagcaagtcactattctcatcatagatgagatccatctgcttggggaggaaagaggccctgttctagaggtcattgtatctcgaacaaattttatctcatcacacacagaaaagcctgttagaatagttggactatctactgcattagctaatgccagagaccttgctgattggctcaatattaagcagatgggcttgtttaacttccgaccatcagtacgcccagttccactggaagttcacattcaaggctttccaggtcaacattactgtcctcgtatggctagtatgaacaagcctgcatttcaggcaattagaagccattctccagccaaacctgttttgatatttgtctcatcaagacgtcaaactcgtcttactgctttggaattgatcgccttcctggctactgaagaagatccaaagcagtggttaaacatggatgaaagagagatggagaacatcattgcaacagtaagagattccaacctcaagctgacccttgctttcgggataggaatgcatcatgctggactacatgagagggaccgaaaaacagtagaggaactatttgtaaactgtaaagttcaggttcttattgctacaagcacattagcctggggtgtaaactttccagctcatttagtaattattaagggaacagaatactatgatggaaaaacaagacgttatgtggattttcccattacagatgtcctccagatgatggggcgtgctgggaggccgcagttcgatgaccaaggcaaagctgtaattctagttcatgacataaagaaagacttttataaaaaatttctttatgaacctttcccagtagaatcaagtttattaggagtgctctctgaccacttaaatgcagagattgctggtggtacaattacatctaagcaagatgcattggattatatcacctggacttactttttccgacgtcttatcatgaatcccagctattacaatttgggtgatgtgagccatgattctgtgaacaagtttctgtcccatctgattgagaagtccctgattgaattggaactttcctactgtattgaaattggagaggataatcgcagcattgaacctctaacttatggccgaattgcctcctattactatttgaagcatcaaacagttaaaatgttcaaggaccgcttgaagcctgaatgcagtactgaagaactgctttcaattctaagtgatgcagaagaatatacagatttgccagtgagacacaatgaagatcatatgaatagtgaactggcaaaatgtcttcccattgaatcaaatcctcattcatttgacagccctcacaccaaagcacatctcctgctacaggcacatctcagccgagccatgctaccctgcccagattatgacactgataccaaaacagtcttggaccaagctctcagagtatgtcaggcaatgctggacgtggctgcaaaccagggctggctggtgactgtcctgaatatcaccaacctgattcagatggtgatccagggtcggtggttaaaggactcttctcttcttacactaccaaacatagaaaaccatcatcttcaccttttcaagaaatggaagccgattatgaagggcccacatgctaggggtcggacctccatcgagtcccttcctgaactgatccatgcctgtggagggaaagaccatgtatttagctccatggtagaaagtgagctacatgctgcaaaaacgaaacaggcatggaatttcttatctcacttgccagtgataaatgttggcataagtgttaaaggctcgtgggatgacttagttgaaggacataatgaactctctgtctcaactctgactgcagacaaacgagatgacaacaaatggatcaaattgcatgctgaccaagagtatgtgcttcaagtgagcttgcagagagtccactttgggttccacaagggaaagccagagagctgtgcagttactcctcgatttcccaaatcaaaagacgaaggatggtttttgatattaggagaagtggataagagagaacttattgctttgaaaagagtaggatatattcgaaatcatcatgttgcttccctttctttttatacccctgaaatacctggaaggtatatctacacattatatttcatgagtgactgctaccttggcctggaccagcagtatgacatctatctcaacgttacacaagcgagtctttctgcacaggtcaacaccaaggtctctgattccctgactgacctggcattaaagtaacttgacctgaacaatccatttgaaaggagtggctaagaattctctctgttcagtcatctagacaaatcgaattacttgatgtttgccttgaaagaatcaacttctaacctcaaccatccaggaaattgacagtggctgcagtattgactccagtgacataaagttaaccacagtggccttttaacaaatgttgccttttataatgttatctttatgagtttcttgatatgtaagatgaaaaagcatttagaataatcttttaatttgtgtatatttgggatgatatttaggagctatcaatcaaattttacatctcacaatgtactgtttacatggatattggctgctttttttaaggaaaaccacattgagatgtgacaagtgttaggacttgtcacagatttctaactctgccgcataaactataaatctgtaaggtggtacacagcgtgtcttgttagcaaaatttatactttgatatgatcacatgtagaagtagcttcaagaatttcttgtagtcataaatgtttaataatatatgatgtaaaattatattatggagcctaatgatgataacaaagaaaacaatatactgatcttagaaaatgtagacatggttaactgggaaataaaatatagagtggcacttcaagaaaaaaa

SEQ ID NO: 1846 - protein, 2202 aa, Homo sapiens
MALPRLTGALRSFSNVTKQDNYNEEVADLKIKRSKLHEQVLDLGLTWKKIIKFLNEKLEKSKMQSINEDLKDILHAAKQIVGTDNGREAIESGAAFLFMTFHLKDSVGHKETKAIKQMFGPFPSSSATAACNATNRIISHFSQDDLTALVQMTEKEHGDRVFFGKNLAFSFDMHDLDHFDELPINGETQKTISLDYKKFLNEHLQEACTPELKPVEKTNGSFLWCEVEKYLNSTLKEMTEVPRVEDLCCTLYDMLASIKSGDELQDELFELLGPEGLELIEKLLQNRITIVDRFLNSSNDHRFQALQDNCKKILGENAKPNYGCQVTIQSEQEKQLMKQYRREEKRIARREKKAGEDLEVSEGLMCFDPKELRIQREQALLNARSVPILSRQRDADVEKIHYPHVYDSQAEAMKTSAFIAGAKMILPEGIQRENNKLYEEVRIPYSEPMPLSFEEKPVYIQDLDEIGQLAFKGMKRLNRIQSIVFETAYNTNENMLICAPTGAGKTNIAMLTVLHEIRQHFQQGVIKKNEFKIVYVAPMKALAAEMTDYFSRRLEPLGIIVKELTGDMQLSKSEILRTQMLVTTPEKWDVVTRKSVGDVALSQIVRLLILDEVHLLHEDRGPVLESIVARTLRQVESTQSMIRILGLSATLPNYLDVATFLHVNPYIGLFFFDGRFRPVPLGQTFLGIKCANKMQQLNNMDEVCYENVLKQVKAGHQVMVFVHARNATVRTAMSLIERAKNCGHIPFFFPTQGHDYVLAEKQVQRSRNKQVRELFPDGFSIHHAGMLRQDRNLVENLFSNGHIKVLVCTATLAWGVNLPAHAVIIKGTQIYAAKRGSFVDLGILDVMQIFGRAGRPQFDKFGEGIIITTHDKLSHYLTLLTQRNPIESQFLESLADNLNAEIALGTVTNVEEAVKWISYTYLYVRMRANPLAYGISHKAYQIDPTLRKHREQLVIEVGRKLDKAQMIRFEERTGYFSSTDLGRTASHYYIKYNTIETFNELFDAHKTEGDIFAIVSKAEEFDQIKVREEEIEELDTLLSNFCELSTPGGVENSYGKINILLQTYISRGEMDSFSLISDSAYVAQNAARIVRALFEIALRKRWPTMTYRLLNLSKVIDKRLWGWASPLRQFSILPPHILTRLEEKKLTVDKLKDMRKDEIGHILHHVNIGLKVKQCVHQIPSVMMEASIQPITRTVLRVTLSIYADFTWNDQVHGTVGEPWWIWVEDPTNDHIYHSEYFLALKKQVISKEAQLLVFTIPIFEPLPSQYYIRAVSDRWLGAEAVCIINFQHLILPERHPPHTELLDLQPLPITALGCKAYEALYNFSHFNPVQTQIFHTLYHTDCNVLLGAPTGSGKTVAAELAIFRVFNKYPTSKAVYIAPLKALVRERMDDWKVRIEEKLGKKVIELTGDVTPDMKSIAKADLIVTTPEKWDGVSRSWQNRNYVQQVTILIIDEIHLLGEERGPVLEVIVSRTNFISSHTEKPVRIVGLSTALANARDLADWLNIKQMGLFNFRPSVRPVPLEVHIQGFPGQHYCPRMASMNKPAFQAIRSHSPAKPVLIFVSSRRQTRLTALELIAFLATEEDPKQWLNMDEREMENIIATVRDSNLKLTLAFGIGMHHAGLHERDRKTVEELFVNCKVQVLIATSTLAWGVNFPAHLVIIKGTEYYDGKTRRYVDFPITDVLQMMGRAGRPQFDDQGKAVILVHDIKKDFYKKFLYEPFPVESSLLGVLSDHLNAEIAGGTITSKQDALDYITWTYFFRRLIMNPSYYNLGDVSHDSVNKFLSHLIEKSLIELELSYCIEIGEDNRSIEPLTYGRIASYYYLKHQTVKMFKDRLKPECSTEELLSILSDAEEYTDLPVRHNEDHMNSELAKCLPIESNPHSFDSPHTKAHLLLQAHLSRAMLPCPDYDTDTKTVLDQALRVCQAMLDVAANQGWLVTVLNITNLIQMVIQGRWLKDSSLLTLPNIENHHLHLFKKWKPIMKGPHARGRTSIESLPELIHACGGKDHVFSSMVESELHAAKTKQAWNFLSHLPVINVGISVKGSWDDLVEGHNELSVSTLTADKRDDNKWIKLHADQEYVLQVSLQRVHFGFHKGKPESCAVTPRFPKSKDEGWFLILGEVDKRELIALKRVGYIRNHHVASLSFYTPEIPGRYIYTLYFMSDCYLGLDQQYDIYLNVTQASLSAQVNTKVSDSLTDLALK

SEQ ID NO: 1847 - DNA, 3470 bp, Homo sapiens
gtaggccggcgccagctccactctgtccctcctcgccgggtctgtgcgtctttgcgtctgtctgtctgactgatggtcctcacacgcggttccctgtgactgggcgcgaccccggcaagcgcggcttggagggcggacggggcgcggcgatacagctgcccgctcgcatctttggccctgcgctcagctcctcacccggcgtgggaagttaaagtaaaaccgaaagggaagaaggcgcggtggcaggagctgacagagtgatgggaaacgcgtgagccaggccgagagtttcaggtttcttgctgtatggatcactgattgaataatagatggctttacctcgtctcacaggagccttgcgttccttttcaaatgtcaccaagcaagataattataatgaagaagtggctgacttaaagataaagcgatctaaacttcatgaacaagttttagatttgggcctgacatggaagaagataataaaatttttgaatgaaaaactggagaagagtaaaatgcaaagtataaatgaagacttaaaagatatattacatgctgcaaagcagatagaagtgaattgtccattccagaagaggaggctggatggaaaagaggaggatgagaagatgagcagagcttctgacagattcagaggactaagatgacaaaaatgactaaaatggacaaaagaagaaatagaaaatctgaatatttgactattaaaggaatttaatctgtaattaaaaaccttaagtacaaagaaatctatatgctatgatggctttaatggagaatgtcataatgtcatttaaaaaggtatgagagtactattgtagattaaaagaggttaaaggcatataataatcaaaatgtaatgtatgatccttgattgactcttgaatcagaaaaaaattacgtatttttggggccgttggagaaatctgaatatgggctggacatcattaggtaatattagatctcaggtgtgataatgttgtggctatgtaagaggatatcctaaatctcaggagaagcatactgcagtatatatagtggtatctcatgaagattaaaatgtactgtcaaatgtgtcagcaaaagaaatacacatgatgtgtgtgtgtgatcaagtgtttataatgagtggattaataaatatgagaagatagggtgatttgttgtaaagtaataaaggtttaaaaattacatgattcagtagagaaaaagcattttatgaatatctaacattacttatgataaaaaatctcagcaaactaggaatagaaggggattttgttaatctgataagctgtagctataaaaaacttggagaaaacatacttaatgctacaaagttagaagcttccctgaggtacggaattagacacaaatgcctgttaccacttctgtttctcactgtattaaaaatccttgctaacataatatggcaagaaaaagtaagggcataaagactggaaaaaaaaacttttccatttttcacatgactgtacctgtagaaaatgaatttaacaaggttaatataaaaatcaattttatttctacttactagaagcacattaaaaattacacttatctttatgtaacgtaatacattttaccttaaattttaaaattttaatttattttacgtttacaaaagcatcataaacatcaaatacgtaggagtaaatttaacaaaaaataagcaagacttcatggaaaactaaaatattgagagaatttaaagaagatctaaataaacagagggatataccaagaattggaagactcactattataatgatatattttttacccaaattgatctgtagattcagtgctatcccaggcacagtcttatgtttgagggtgtgtgtgtgtgtgtgtgtgtatgtgtgcatgtgtgtgtgtggaaattgacaagggtaatatgaaagttatatggaaattcaaaggcaaagagcagcctggttaactttgaaaaataaaaagggagaacttactctagtagatcttaaaacttattataaagataagtatacagtgtggtgttggtccaagaataggcaaatggactagtatgacagaatatagcccagaaacaaacctacggatagaaatatacttgatttataatgaaggccaaacaatagtgagacaaggctattttttcagtatatggtgctgggtcaactgcatatacagatgaaaaaaagtacctattttacaaataattttaaacagcctacagaattaagcatgatacacaaaacaatacatcttctaaaagatgtaaaagagtgtcttcaggatctttgtatgtgcgaaaatttatcaaacagagaacaaaaagtacaaagggaatgattaagttggactgtagtaaaattaataccttctatttattaagagtaaaaaggcaaaacatggagtgggagaatatagcttcaagatatataaccaaaaagagagcttttatccaggttaaatacgagctcctacaaatcaataaggaaaggacagataatcctatatgaacatgagtaagagctttgaacaaggacttcacaagagatagttgaccagtaaacatgaaaagggcttcagcttcattggtagtcaaggatatgccactgcatgcccattagaatggttaaaatgtaaaagactgacatacctattgttaggatcaagaatgtgaactagaatttttgtctactgctgctagagtttacaattggtacaaccactttgagtaactgtttgacagtgtctactattacctactgtggttggacaagtgaaattttaaatcttaggacataaatatccaataaaaatgcttgtacatacatgtatatcaaaaataggtgcattcattgcaacattatttgtgatagccttaatgtagaaacaacccagttcattgttaaaaagcttaagttgtagtatgtagactgccttatagcagtaacggattacagctatgtataacattgtaagtgaatcttataatgttgacaaaagaagccatacaacacatattatgattccattaatatgaaactgaaaactaggcatgaccagtctctggttttagaagtcaggatagtggctgcttttgaggaaggaggtagtgactaggagtgaatatgagggaggtttctggggagctgataatgttctgattcttgaagtagttaaccagattacacaggtgtgttcgttttttgataattctttgaactgtatgtgtactgtatattttcttgttatattcaataaaaagaattactatgatttttatattacatagattaaataagaagtatttcagattgataagtaacacatgcttgtgtatttatttagcttaaggtttggctatcatggtgagaactcctatgtaccctgctcaggtcctggtaaacagtatcataagtataataaattggtgtttttcattctca

SEQ ID NO: 1848 - protein, 111 aa, Homo sapiens
MALPRLTGALRSFSNVTKQDNYNEEVADLKIKRSKLHEQVLDLGLTWKKIIKFLNEKLEKSKMQSINEDLKDILHAAKQIEVNCPFQKRRLDGKEEDEKMSRASDRFRGLR

SEQ ID NO: 1849 - DNA, 4614 bp, Homo sapiens
ggggctgcaggaaaggcgcgagcagaggcggcggcgggtgtactgtaggtggtcggtccggcagcagcccggcccccggacgcaggacgtggccccaggcagccctcgcagctcagtgctctagccggggcaagcccgcgtctccgcctgctggacgggcccaggcgagatgtagggctctgggcgcggaggccgccggtggggcggctgatcgcggaggatcgcggagggcgcgccgaggatggagagagcgatggagcaactcaaccgcctgacgcgctcgctgcgccacgcgcgcaccgtggagttgcccgaggataatgaaactgctgtttatacattaatgccaatggttatggctgatcaacacaggtctgtttctgaactactatcaaattcaaaatttgatgtcaattatgcattcggacgtgtgaaaagaagcttgcttcacattgcagcaaattgtggatcggtggaatgcttggttttgctgttaaagaaaggagcaaatcctaactatcaagatatttcaggctgtacaccccttcatttggcagcaagaaatgggcagaagaaatgtatgagtaaattattagaatatagcgctgatgtcaacatttgtaataatgaaggccttacagcaatacattggctggctgtgaatgggcggacagaactactccatgaccttgtgcagcatgtcagtgatgttgatgttgaggatgccatggggcagacagcactgcatgttgcctgccagaacggtcacaagacgacagtgcagtgcttgctagacagtggtgctgatattaacaggccaaatgtatcaggagcaactccattgtactttgcttgcagtcatggtcagagagatacagcacagatcctactattacgaggagccaaatatctgccagataaaaatggagtaactcctctggatttatgtgtacagggtggatatggagagacttgtgaagtattaattcaatatcacccgaggctttttcagactattattcaaatgacacagaatgaagacctccgagaaaacatgttacggcaagttctggagcatttgtctcagcaaagtgaaagccagtacctaaagattctaacaagccttgctgaagttgctacaacaaatggtcataaactgcttagcctctctagcaattatgatgctcaaatgaagagccttttaaggattgtgagaatgttttgtcacgtctttcgaattggtccatcctcccccagtaatggaattgatatgggctacaatgggaataaaactccaagaagccaggtgttcaagcctctggaattgctttggcactcgttagatgaatggctagttttaacagccacagaattgatgaaaaacaaaagagactcaacagagatcacttctattttactgaaacaaaaaggccaagatcaagatgctgcttccattcctccatttgaacctccaggacctgggagctatgaaaatctgtccactggcacaagggaatctaaaccagatgctcttgcagggagacaggaagccagtgcagattgtcaggatgttatttctatgacagctaaccggctaagtgctgtcattcaagctttttacatgtgctgttcttgtcagatgcctccgggaatgacttcacctcgtttcattgaatttgtctgcaaacatgatgaagttttaaaatgctttgttaatagaaatcccaaaattatatttgaccactttcactttctccttgaatgtcctgagttgatgtcaagattcatgcatatcataaaagcacagccttttaaagatcgctgtgaatggttctatgaacatttgcattcaggacagccagattcagatatggtgcacaggccagtgaatgaaaatgatatcctgctggttcacagagattctatttttaggagtagctgtgaagttgtgtcaaaagcaaattgtgcaaagctaaagcaagggattgctgtacggttccatggagaagaaggcatgggtcaaggtgttgtgcgtgagtggtttgatattctgtccaatgagatagtcaatcctgattatgcattgtttacccagtcagctgatggaacaacttttcagcctaatagcaactcttatgtaaatcctgatcacttgaactattttcggtttgctgggcagatcttgggattagcgttgaaccacaggcagctggtcaatatttacttcacacgatccttctacaagcacattcttggtattcctgtaaattaccaagatgtggcatccattgatccagaatatgcgaaaaatttgcaatggattttagataatgatataagtgatctgggtctagaactaactttttctgttgagactgatgtgtttggagcaatggaagaggtgcctttgaaacctgggggtgggagtattcttgtgacacaaaataataaagcggagtacgtccagcttgttactgaacttcgaatgacaagagccattcagcctcagatcaatgcttttttacagggctttcatatgttcattccaccctccctcatacagctttttgatgaatatgaattggagctactgctttctggcatgccagaaattgatgtgagtgattggataaaaaatacagaatacacaagtggctatgaaagagaagatccagttattcagtggttctgggaagttgtagaagacattactcaagaggagagagttcttctcttacagtttgttacgggcagttccagggtcccacatggtgggtttgctaatatcatgggtggaagtggattgcaaaactttacaatcgctgctgtgccatatactccaaatcttttaccaacttcaagcacatgcatcaacatgctcaagttacctgaatacccaagtaaagaaatactcaaggacagacttcttgtggcactacattgtggcagctatggttacacaatggcataatgaagtctggaaaactcctctgactactgatgcacaattcagaatggcagaagtaatttgggaaaatgtcaacaaaaaagcagcctaaatgcaacccataggcagggctgatgcttccaatttataaaggatcatcaggttttctgtttctctcttttcccttttatgttttctctgtttgtgatacaattagaaaatataaaatcacagtagattttattttttaaaatgctaactgaaagtaatagagactgtcctttttcataattaattttatccaagattgtattaaggcaaaatctgattctacattccacctctgctatgtaactgccttgttaaaagggtgttttctcctaatttctgatatattatatgaggtcatccagctggtgtgttcttttgcatgtaaactgccatttatattttagaaaactattgtatagaatggatttagattgtctataaagccacaaatacgtattttgccacagtgtattctatattgcaatgatttttttagcattttaatattttaatatatattgtaaaatttagactgatgatactaacagttgatgaaatgacatataatttatatatgaaagcttacgctatattgtatgaattatttgcatctttcagtggccagttttccatatgtatatattatggtctcaatgtttttcttacgcctcattttaatttataatgaaggtaaaattaaaatgtattttaccacgtttcttttcattacttttatctgtgagctctgacacatctgaaaaagtaatctgatgtgcaaattataatttaaatatgttaatttttttgcttcttaaatttgcttttcatcattaaaatgtcaagttcaagtgatatgtgcctaatatcacttggatgttggtgggtttttgaatttttgggtggttaatcagttttattttgaaaagacgtacttgaatagttacagcatatgtttgaacaggaagtaggaacatgcatacacgaagaaatgctaacggaaggatttgttatgtttaggatcttcccttggaaactaaaaatagaatattaatgacattactgtttgtagaatgacatatgcagattttctcataagcagtcattgtgtttgccagtaatgtttgagagacatgtaagttgaaagttttgctaaattataaagctcctttaattcgttggttttgattctcttattctcttgtcttttctaaatgttaacaaaatatatcttaacagattacatgaaatttaggaattatttaaaagttaccattagctctaaaattaagattcggatgctttatttatagtaactgaagctaataatgttttatgttttgattttttgaaatttaattgtagaagtcactgccttctgagttttcaaatagataaccacctttaatattacactgcttataatactaatgtttacagatatgtttctgtttataaccatataatacattggctttgtcatattagttttttttgcaagtagttatgtaaaagagatagataataaaatattaaataactgagaaaaaaaaaaaaaaaaaaaaaaaaaaaaaaaaaaaaaaaaaaaaaaaaaaaaaaaaagaaaaaaaaaaaaaaaa

SEQ ID NO: 1850 - protein, 909 aa, Homo sapiens
MERAMEQLNRLTRSLRHARTVELPEDNETAVYTLMPMVMADQHRSVSELLSNSKFDVNYAFGRVKRSLLHIAANCGSVECLVLLLKKGANPNYQDISGCTPLHLAARNGQKKCMSKLLEYSADVNICNNEGLTAIHWLAVNGRTELLHDLVQHVSDVDVEDAMGQTALHVACQNGHKTTVQCLLDSGADINRPNVSGATPLYFACSHGQRDTAQILLLRGAKYLPDKNGVTPLDLCVQGGYGETCEVLIQYHPRLFQTIIQMTQNEDLRENMLRQVLEHLSQQSESQYLKILTSLAEVATTNGHKLLSLSSNYDAQMKSLLRIVRMFCHVFRIGPSSPSNGIDMGYNGNKTPRSQVFKPLELLWHSLDEWLVLTATELMKNKRDSTEITSILLKQKGQDQDAASIPPFEPPGPGSYENLSTGTRESKPDALAGRQEASADCQDVISMTANRLSAVIQAFYMCCSCQMPPGMTSPRFIEFVCKHDEVLKCFVNRNPKIIFDHFHFLLECPELMSRFMHIIKAQPFKDRCEWFYEHLHSGQPDSDMVHRPVNENDILLVHRDSIFRSSCEVVSKANCAKLKQGIAVRFHGEEGMGQGVVREWFDILSNEIVNPDYALFTQSADGTTFQPNSNSYVNPDHLNYFRFAGQILGLALNHRQLVNIYFTRSFYKHILGIPVNYQDVASIDPEYAKNLQWILDNDISDLGLELTFSVETDVFGAMEEVPLKPGGGSILVTQNNKAEYVQLVTELRMTRAIQPQINAFLQGFHMFIPPSLIQLFDEYELELLLSGMPEIDVSDWIKNTEYTSGYEREDPVIQWFWEVVEDITQEERVLLLQFVTGSSRVPHGGFANIMGGSGLQNFTIAAVPYTPNLLPTSSTCINMLKLPEYPSKEILKDRLLVALHCGSYGYTMA

SEQ ID NO: 1851 - DNA, 5504 bp, Homo sapiens
aattgacaaagtcacgtgtgctcagggggccagaaactggagagaggagagaaaaaaatcaaaagaaggaaagcacattagaccatgcgagctaaatttgtgatcgcacaaaatcaagatgttagattgatgcagaagatcactccgttccaaagggaaagttttcatctcacgagtttggagctgagggcccgtggggcaacatggccgaaggcggggctagcaaaggtggtggagaagagcccgggaagctgccggagccggcagaggaggaatcccaggttttgcgcggaactggccactgtaagtggttcaatgtgcgcatgggatttggattcatctccatgataaaccgagagggaagccccttggatattccagtcgatgtatttgtacaccaaagcaaactattcatggaaggatttagaagcctaaaagaaggagaaccagtggaattcacatttaaaaaatcttccaaaggccttgagtcaatacgggtaacaggacctggtgggagcccctgtttaggaagtgaaagaagacccaaagggaagacactacagaaaagaaaaccaaagggagatagatgctacaactgtggtggccttgatcatcatgctaaggaatgtagtctacctcctcagccaaagaagtgccattactgtcagagcatcatgcacatggtggcaaactgcccacataaaaatgttgcacagccacccgcgagttctcagggaagacaggaagcagaatcccagccatgcacttcaactctccctcgagaagtgggaggcgggcatggctgtacatcaccaccgtttcctcaggaggctagggcagagatctcagaacggtcaggcaggtcacctcaagaagcttcctccacgaagtcatctatagcaccagaagagcaaagcaaaaaggggccttcagttcaaaaaaggaaaaagacataacaggtcttcttcatatgttctttcctttacccggttgcaaagtctacctcatgcaagtataggggaacagtatttcacaagcagtagctgacctgggattttaactactattggggaactgtgaattttttaaacagacaaatcactctaagcaaattacatttgagcagggtgtcatgttttatgttaattcagagaataagatactatgtctgtcaatatgtgcatgtgtgagagggagagagcctgagtctgtgtgtgtacatgaggatttttatataggaatgtagacacatatataaagaggctttgtctttatatatttgtgtatagatcaaagcacacaccctctctcatataattggatatttccaagaattgaaaacccatgtgaagcattatagatagttttaaatttaacccactggagttttcttgaaataccacttcttttatattatataaaactaaaaacacgactgttaccttttgtgtgaaccaaaggatacttcagatctcagagctgccaattatggggtactaaaggtttttaagacatccagttctcccgaatttgggattgcctctttttcttgaaatctctggagtagtaatttttttcccccttttttgaaggcagtaccttaacttcatatgcctctgactgccataagcttttttgattctgggataacataactccagaaaagacaatgaatgtgtaatttgggccgatatttcactgttttaaattctgtgtttaattgtaaaattagatgcctattaagagaaatgaaggggaggatcatcttagtggcttgttttcagtagtattttaatatcagcttcttgtaaccttttccatgttgtgagggttgtaagggattgtgtggcaacagcagcttcccttggctaactcaatcttctacccattgcttagagcagggagccctccttatttactactgaagaccttagagaactccaattgtttggcatatatttttggtggtggtttttattcctcctggagagttatctaatttgtttctaaaacaaacaagcagcaaagaaatgaattaaatactggggttgagaattaaaattaagtggatgttcacagttgcccaatatatatgacctgcaaatgatacgaaaaagtgcagcatttagtggcagttaacaagagtgacaagcctggggcagaggtaccaaacctctcccaccagagagctagaagtattttatacagtaactttgatcttatggaagtgaccttcaatgcttattctgaagtaacctatatggtggatacaggatgaacattcagtgccagggagaatcttctcaggttggttctcgttagagtgataaactggctaggggccatagtattggtcctgttaggtttcggtcatggaaaaaaaaattattttggggtcatcctggctctagatgttatgggcaaatttctgaaacatctgcaagaaggtaccagttaattatagtgcttaatattgggaataagattaagcattataattataatgtatgggcctgttggtgtaagctcagataattaaataaaaatagcatgactcaaatgagacatattctgctgaacagtttctacttcctctcccgcctgtcctgtcatgggagacgtgtatagttgctgctgtttcagcaaaccaccataagacgaaaatgcctcaggttgggttgccagtcctttacaactcagcttgaatttcacaacagtgattgtgagaatctgcgtggtatacactgaaatatcggtgtgctgtgatgcaaagcttacctttgacgatattgaatgtgatatagctgtagagaagtacttccttgccttatgtgaggatttcaaacttatttaaattatgtagacaaatcaaagtggcattgcttaatttttagcaggcataataagcaagttaacagtaaaatgcaaaacatgataagcgttgctcaatttttagcaggtataataagcaggttaacagtaaaaatgcaaaacatgatagataagtcactttgaaaattcaaaccaaagttccttcaccttatggaaataggaaattatggacttcaaaattggacacttcctgtttacaaaaagaaattcagagctaaaatcatggtaaaaaaaaatagaaacacttgagaactatggtctttatgggtgcaatttgaaatccttttcatcatcttaccagactaaactaagagcacataccaaacctatcttatggttgaaagttggggtttattttttatatgagaatattatcactattacataacatactcaggacaaagaactttgctcagggaacataccatgtaatatttttgttgtttctttacagactagtctacagtcctgcttactcaaaacaaaccaaataacttatacctttatataagtattatgtactgatgatagtaactacctctgagtttgacacagatcaaaatttttgaatatcagatatcagttatcctatttttatttcatgtgaaaactcctctaaagcagattccctcaactctgtgcatatgtgaatatcactgatgtgaacacattgttcatttacataggtaaaatattactctgtttacagcaaaaggctacctcatagttgatacatagcacacctgtatgtatgctgttccagccttacaggtggctgataattctctggtacagaacctttttatctgtattataaatagcaattcacaactgcatgtttctgacaaacacttgtgaataatgaagcatctcgttttagttagcaaagtctccaaacatttccttaaaataatcatgtatttagtttaaagaattatgggcactgttcaacttaagcaaaacagaacacggaagcagtcttagaagcaccactttgcccagaggtggaggttggaaggggtagcagggagaggggttggtgtatgcaggtattcatgctaggcaaagagtttaaaagacgccaatgtccttcatttactgtctgtgctgccctgaagccaagcgtattgcagcattatagccccaggcacataactaactagcactggcttgccaaggaatgaacatgcaatgccattactagctattgagggaaaagggtctgtgtgaagcatcactttgcagggattactaatggtggggcagcaggtctgtgaattaagttatctcttgacctcaccctcatgtcaacacaaatgtaattcctaaacaagatgcattgccagtctcttagccctgtaagctgatcttttgctacatggcagactataatgaaaacatttttatacttgggtttctagtcttcactagaaggccttggatgtatttttgcagttgaaagatttagaaagatttttacctgcttataacttggaagtttagagtgcaatgtaagaaaaaagatcaagaaatgtcatgttattagcatcagtccacctccaatattgccgatactttttttattctggctcagttttattttgcaccagtgcggccccaagttactgctggttgtatttagtttgtgaataggagcccataagtgttaatagactttgtaacattcactataagatgaattatacaggacatgggaaatctcattaagtcttaaagttaatttaaattaatttatctgttttctctaagaaatgtttatcataaaatatatatgtgtatttcccctttggttataaaatttgggaaagtatgtacaagtgcagctgcactgactttaattttctagatgtcttaatgagatttatttgttttagagaagaacatcttgttaaaagcatcaaactctgtcttacatagctgtcaacagcctctttaagatgtggtggttgtatgatctgtgtcttaattgttcagttagagtgagaagttgacctatgattcatttttaaattttatatttggaacaaagctgcaagttatggtaaagtactgtactgtgagaagtattatgatatttaatgcatctgtggcttaacacttgtgagagttaccagcttgaaaatgatggtgttgactacctcttgaatcacatctatcaaccactggcacctaccaccaagctggcttcaattagtatgtgttgctttttggtattaacaactaaccgtactagagaccaaagtgaaccctgatttttatatgtctttaataatggtgttttatctagtgtttttaaattatcctgtgtagtatttagattacctcattgtccattttgactcatgttgtttacaagtgaaaataaaaacacttgaactgtatgtttttaaaagacaaaaaaggggtagatgtttggaatgcgtttcactcgcatgcagtcatctggagggactgaagcactgtttgcctttctgtacactctgggttttatattctcatttcatgcctaatgtcttattctgtcaattatggatatgttgaggtttaaaaaaattacttgattaaaaataaaacatataacgttggcattt

SEQ ID NO: 1852 - protein, 250 aa, Homo sapiens
MAEGGASKGGGEEPGKLPEPAEEESQVLRGTGHCKWFNVRMGFGFISMINREGSPLDIPVDVFVHQSKLFMEGFRSLKEGEPVEFTFKKSSKGLESIRVTGPGGSPCLGSERRPKGKTLQKRKPKGDRCYNCGGLDHHAKECSLPPQPKKCHYCQSIMHMVANCPHKNVAQPPASSQGRQEAESQPCTSTLPREVGGGHGCTSPPFPQEARAEISERSGRSPQEASSTKSSIAPEEQSKKGPSVQKRKKT

SEQ ID NO: 1853 - DNA, 5437 bp, Homo sapiens
caggcagccccagcgtccccgggccctcggccccaccgagtgccggctcccgcgctctgcggcggcaagccccttggaattttcaaaatgaattatacagagtccagcccattgagagaatcaactgccataggttttacacctgagttagaaagtatcatacctgtgccttccaataagaccacttgtgaaaactggagagagatacatcatctggtttttcatgtagcaaatatttgttttgcagttgggttggttattccaactactcttcaccttcatatgatatttcttaggggaatgttaactctaggatgtaccctttatatcgtctgggccactctctaccgatgtgccttggatataatgatctggaactctgtgttcttgggtgtcaacattttgcatctgtcgtatcttttatacaagaagagaccggtaaagattgaaaaggaactcagtggcatgtaccggcgattgtttgaaccactccgtgtgcctccagatttgttcagaagactaactggacagttttgcatgatccaaaccttgaaaaagggccaaacttatgctgcagaggataaaacctcagttgatgaccgtctgagtattctcttgaagggaaaaatgaaggtctcctatcgaggacattttctgcataacatttacccctgtgcctttatagattctcctgaatttagatcaactcagatgcacaaaggtgaaaaattccaggtcaccattattgcagatgataactgcagatttttatgctggtcaagagaaagattaacatactttctggaatcagaacctttcttgtatgaaatctttaggtatcttattggaaaagacatcacaaataagctctactcattgaatgatcccaccttaaatgataaaaaagccaaaaagctggaacatcagctcagcctctgcacacagatctccatgttggaaatgaggaacagtatagccagctccagtgacagtgacgacggcttgcaccagtttcttcggggtacctccagcatgtcctctcttcatgtgtcatccccacaccagcgagcctctgccaagatgaaaccgatagaagaaggagcagaagatgatgatgacgtttttgaaccggcatctccaaatacattgaaagtccatcagctgccttgatcagagagagaattcaggttaccaagacggaaggtgtcttgaagagatcctgaaaaataccagcactttttcatggcttttaggttattctgctttagtgcatccagactggtagagtcggagggaggaagtgaggaagggtcaaggatggaagagttctttcacttaccctttttattagtcagcttttaaagtaattgttttactgagccttctgactatgccttgttctcttttgagatatatattttcacagtcttttctagatatattattgttttaacttaacaaatcttagcaatctctcaatgccttttcacttatttttttccaagttatgattctttttcctcacagtcttttttgttccatagcaatgaggttgtccatttgataattttaacaaacaatgtaagtttaaaattgaggctaaggtaacatgaaaaagcagggaatctcaaactttattccatatatacacacacacacacacacacacacacacacatacatacatacatatatatatatatatacatatatatacatacacacatacatataattttttttttttttgagatggagtttcactctgtcgcccaggctggagtgtagtggcacattctcagctcactgcaaactccacctcctggattcacgccactctcctgcctcagcctcccgagtagctgggactacaggcacctgccaccgcgcccagctaatttttttgtatttttagtagagatggggtttcactgtgttagccaggatggtctcgatctcctgacctcgtgatccgcccaccttggcctcccagagtgctgggattacaggcgtgagccaccgcgcccggcctattccatatttttttaatgggacattttagagaaaggtgtgatttgactggttttatttttctcccaggccagaagtattactccactagatcaccttacttaattgggcactgtgtggataacttgataatgaacaaaactctcagattttactcacattacccttgtattatgccatttataaactgctctgaaacctgaagctggaaagataacagatgggtttctgagcacggggttaacctccagctaaactcaacttccttgggatttggagtcaccatgttgtgcacactctggtgtgggaaacactttatgtagggtgggaggacaggggagttaaatggctgggcaggtgccacaggatgaggccactgaaagatctgcttcattctttgatctgtattctgaagttccagattgttcatctagaggcagagacatctcttttaaaaaagtgccagatgccccagtgccagagctgcgaacgtgaacacagtggaaggcagagggtttactacaggccaggccatggacaccccacccaggtactgcagtgagggccttgattccagagctctttttcctactgaaatcatggtttagtaaacagtggcatttggctggtgggaaatgcgtaactggtcagtgtgtctggccagcgtggctgtggcacttggccaggacgctccgttgaatgaagctcattgattggccatgctggtcatgtctattttgcttcatccactagaaccaactttgagtcagtctcctgttacgttaaatggctaagaaaagttccaaatgaagttgttctcaggtgaactgagccaaaagaagcaactcttaccatgaggtgatttctgttagaggagacatataaataagctcatctagggtcacctcattttcctaaatatgtttttaaagcaattattgtagtaatttcatttgagttaaatttacatgctcggtcactcattgagaaaatttacacagactctgaatccagttcctgtcatcttcagatgttggtttattgacatcacagtaaaaaggctactgtcgactggacacagtggctcacacatgtaatcacagcactttggggggccaaggtgggtggattgcttaagcccaggagttcaagaccagcctgggcaacatggctaaaccccatctctacaaaaaaaattagctgggtgtggtggtacatacctgtagtcccagctactcagaaggctgaggtgggaggttcacttgaacctgggaggttgaggttgcagtgagcacagatcacaccactgcactccagcctgggcaacagagtgagaccctatttcaaaaaaaggctgctttcactgtactgctgcagcagtctcttcaggtagctaaattaggagcttgttttggagaaatgaagcaaaggtgaatgacagcctaggcttgaaattataaagctctctcaggttgaactctctcgtgcgctctcgctctcactttcgccctgtacctgagagcacaggtgtaactgtgatgtcatagtgccgagactactttcctttaaccattggggttaagttgggcagcccatttagtttacacgcgcataagactaatttacaaaatcactctatacagtcattagatgtaacatccttccctgagtagaaagtaatgcatgtgtttggagattattttctgtaatgctgggaacaaacctgttttaaaagcacactgctaaaagtaggtgatataagaccatttgctgtttttattaaagtatgtgtgtgtatcagtgtctcaatgtgaagattgtaacctcaagattaggaatcttaaaagagccacttagcctgaatgggaaacgtgagactatttttaaacacacacctctaaggaagaagcctcccatatagacttgatctcaaagaagcagataagaagacagaaaagtgttttaagtgtaagatctcctatggagtactttaaattcatttatacaaatgaataagtgtatctttgtataatgcataaatacatagataaaaacatgtttgctgccaaagttcccaataagatgcttcctgtgttttttggcctttacttagctgaatgatcaaagttcagaaaatggtctgcaaaagttactccatatacaaccccaaatctactactttaaatgtaacatcaactcagttgtatgaatctggagtgtaatatttatattagaatgtatatgtcatttaaaatattttgaaagccctcataaatatttatatttactaaactaatagcatagacactatataaatccgcagtgatgcttatatatcttaaattagtaataatgggtgctatataattattttcagttactatccctgacactctggaatcttctccatttctccctatcactcaatttcattttaatcattggacacctttgcgttttgctgctaacagtgtgtgtatgtcaccctctttatatctggttttcccacttgtctgaagctctcctgatcttagaacctggagctgcagattcctccatgtcagctcccatcacggccccaaagacagagtcacttggttgctgagtcacttggttgctggaaaaatctttggggaaagctggtataagctacacactgacctgtccccagtgtttccaggtaatgacttggcactccagagaaagtttcatgctgttgcgtgtggtggctccaagccaagcacctggcatgcaggtcagcccttcccagcgggcgtggcgtcgtcctcttcacagatgccacgttgcagccccaaggcctcaccattttgcgttttttagaaacccattttcttggtcatttataaagctgctttatagatatctttgatcctggcatgccttggtttcctctcccttccctctttccaatcctggtttcctaacctcctcttgtagtaattctcaactcaactcaaagtcccaagaatttggaatggtaggatgctgtgcggggagctcgaggctgaggcataatcactgcttcggttctgctcatcaggggacacgctcccttactcatggcagccatgtttgattgtcacagagccccccgaatactctgtctatagtgacacactgtaggtgtcataaattttaagaaacctgcttttaagtactatttataggtttttctgttatacttgcaacctagttttaaaatacatgaggattttatgaaagctttatacagacatttataggaaactcattctttgattttaggtgccatttaaattgataacacttactttataaaaagatgctttttgtctggatagagccttatagtttaaaatatcttcatatattgccatttgatcaaataaatttcttacttagaaaa

SEQ ID NO: 1854 - protein, 360 aa, Homo sapiens
MNYTESSPLRESTAIGFTPELESIIPVPSNKTTCENWREIHHLVFHVANICFAVGLVIPTTLHLHMIFLRGMLTLGCTLYIVWATLYRCALDIMIWNSVFLGVNILHLSYLLYKKRPVKIEKELSGMYRRLFEPLRVPPDLFRRLTGQFCMIQTLKKGQTYAAEDKTSVDDRLSILLKGKMKVSYRGHFLHNIYPCAFIDSPEFRSTQMHKGEKFQVTIIADDNCRFLCWSRERLTYFLESEPFLYEIFRYLIGKDITNKLYSLNDPTLNDKKAKKLEHQLSLCTQISMLEMRNSIASSSDSDDGLHQFLRGTSSMSSLHVSSPHQRASAKMKPIEEGAEDDDDVFEPASPNTLKVHQLP

SEQ ID NO: 1855 - DNA, 5507 bp, Homo sapiens
agagcgccgatggctggggacccgaggtccgcgccacccacccgcaacctccttccccgagcctttgggaacgggttgttggccagacaagtcccagaaactgcctgctttgaagcatgaataagtgcgaaaagactcttagcaatgaattttcaaaatgaattatacagagtccagcccattgagagaatcaactgccataggttttacacctgagttagaaagtatcatacctgtgccttccaataagaccacttgtgaaaactggagagagatacatcatctggtttttcatgtagcaaatatttgttttgcagttgggttggttattccaactactcttcaccttcatatgatatttcttaggggaatgttaactctaggatgtaccctttatatcgtctgggccactctctaccgatgtgccttggatataatgatctggaactctgtgttcttgggtgtcaacattttgcatctgtcgtatcttttatacaagaagagaccggtaaagattgaaaaggaactcagtggcatgtaccggcgattgtttgaaccactccgtgtgcctccagatttgttcagaagactaactggacagttttgcatgatccaaaccttgaaaaagggccaaacttatgctgcagaggataaaacctcagttgatgaccgtctgagtattctcttgaagggaaaaatgaaggtctcctatcgaggacattttctgcataacatttacccctgtgcctttatagattctcctgaatttagatcaactcagatgcacaaaggtgaaaaattccaggtcaccattattgcagatgataactgcagatttttatgctggtcaagagaaagattaacatactttctggaatcagaacctttcttgtatgaaatctttaggtatcttattggaaaagacatcacaaataagctctactcattgaatgatcccaccttaaatgataaaaaagccaaaaagctggaacatcagctcagcctctgcacacagatctccatgttggaaatgaggaacagtatagccagctccagtgacagtgacgacggcttgcaccagtttcttcggggtacctccagcatgtcctctcttcatgtgtcatccccacaccagcgagcctctgccaagatgaaaccgatagaagaaggagcagaagatgatgatgacgtttttgaaccggcatctccaaatacattgaaagtccatcagctgccttgatcagagagagaattcaggttaccaagacggaaggtgtcttgaagagatcctgaaaaataccagcactttttcatggcttttaggttattctgctttagtgcatccagactggtagagtcggagggaggaagtgaggaagggtcaaggatggaagagttctttcacttaccctttttattagtcagcttttaaagtaattgttttactgagccttctgactatgccttgttctcttttgagatatatattttcacagtcttttctagatatattattgttttaacttaacaaatcttagcaatctctcaatgccttttcacttatttttttccaagttatgattctttttcctcacagtcttttttgttccatagcaatgaggttgtccatttgataattttaacaaacaatgtaagtttaaaattgaggctaaggtaacatgaaaaagcagggaatctcaaactttattccatatatacacacacacacacacacacacacacacacatacatacatacatatatatatatatatacatatatatacatacacacatacatataattttttttttttttgagatggagtttcactctgtcgcccaggctggagtgtagtggcacattctcagctcactgcaaactccacctcctggattcacgccactctcctgcctcagcctcccgagtagctgggactacaggcacctgccaccgcgcccagctaatttttttgtatttttagtagagatggggtttcactgtgttagccaggatggtctcgatctcctgacctcgtgatccgcccaccttggcctcccagagtgctgggattacaggcgtgagccaccgcgcccggcctattccatatttttttaatgggacattttagagaaaggtgtgatttgactggttttatttttctcccaggccagaagtattactccactagatcaccttacttaattgggcactgtgtggataacttgataatgaacaaaactctcagattttactcacattacccttgtattatgccatttataaactgctctgaaacctgaagctggaaagataacagatgggtttctgagcacggggttaacctccagctaaactcaacttccttgggatttggagtcaccatgttgtgcacactctggtgtgggaaacactttatgtagggtgggaggacaggggagttaaatggctgggcaggtgccacaggatgaggccactgaaagatctgcttcattctttgatctgtattctgaagttccagattgttcatctagaggcagagacatctcttttaaaaaagtgccagatgccccagtgccagagctgcgaacgtgaacacagtggaaggcagagggtttactacaggccaggccatggacaccccacccaggtactgcagtgagggccttgattccagagctctttttcctactgaaatcatggtttagtaaacagtggcatttggctggtgggaaatgcgtaactggtcagtgtgtctggccagcgtggctgtggcacttggccaggacgctccgttgaatgaagctcattgattggccatgctggtcatgtctattttgcttcatccactagaaccaactttgagtcagtctcctgttacgttaaatggctaagaaaagttccaaatgaagttgttctcaggtgaactgagccaaaagaagcaactcttaccatgaggtgatttctgttagaggagacatataaataagctcatctagggtcacctcattttcctaaatatgtttttaaagcaattattgtagtaatttcatttgagttaaatttacatgctcggtcactcattgagaaaatttacacagactctgaatccagttcctgtcatcttcagatgttggtttattgacatcacagtaaaaaggctactgtcgactggacacagtggctcacacatgtaatcacagcactttggggggccaaggtgggtggattgcttaagcccaggagttcaagaccagcctgggcaacatggctaaaccccatctctacaaaaaaaattagctgggtgtggtggtacatacctgtagtcccagctactcagaaggctgaggtgggaggttcacttgaacctgggaggttgaggttgcagtgagcacagatcacaccactgcactccagcctgggcaacagagtgagaccctatttcaaaaaaaggctgctttcactgtactgctgcagcagtctcttcaggtagctaaattaggagcttgttttggagaaatgaagcaaaggtgaatgacagcctaggcttgaaattataaagctctctcaggttgaactctctcgtgcgctctcgctctcactttcgccctgtacctgagagcacaggtgtaactgtgatgtcatagtgccgagactactttcctttaaccattggggttaagttgggcagcccatttagtttacacgcgcataagactaatttacaaaatcactctatacagtcattagatgtaacatccttccctgagtagaaagtaatgcatgtgtttggagattattttctgtaatgctgggaacaaacctgttttaaaagcacactgctaaaagtaggtgatataagaccatttgctgtttttattaaagtatgtgtgtgtatcagtgtctcaatgtgaagattgtaacctcaagattaggaatcttaaaagagccacttagcctgaatgggaaacgtgagactatttttaaacacacacctctaaggaagaagcctcccatatagacttgatctcaaagaagcagataagaagacagaaaagtgttttaagtgtaagatctcctatggagtactttaaattcatttatacaaatgaataagtgtatctttgtataatgcataaatacatagataaaaacatgtttgctgccaaagttcccaataagatgcttcctgtgttttttggcctttacttagctgaatgatcaaagttcagaaaatggtctgcaaaagttactccatatacaaccccaaatctactactttaaatgtaacatcaactcagttgtatgaatctggagtgtaatatttatattagaatgtatatgtcatttaaaatattttgaaagccctcataaatatttatatttactaaactaatagcatagacactatataaatccgcagtgatgcttatatatcttaaattagtaataatgggtgctatataattattttcagttactatccctgacactctggaatcttctccatttctccctatcactcaatttcattttaatcattggacacctttgcgttttgctgctaacagtgtgtgtatgtcaccctctttatatctggttttcccacttgtctgaagctctcctgatcttagaacctggagctgcagattcctccatgtcagctcccatcacggccccaaagacagagtcacttggttgctgagtcacttggttgctggaaaaatctttggggaaagctggtataagctacacactgacctgtccccagtgtttccaggtaatgacttggcactccagagaaagtttcatgctgttgcgtgtggtggctccaagccaagcacctggcatgcaggtcagcccttcccagcgggcgtggcgtcgtcctcttcacagatgccacgttgcagccccaaggcctcaccattttgcgttttttagaaacccattttcttggtcatttataaagctgctttatagatatctttgatcctggcatgccttggtttcctctcccttccctctttccaatcctggtttcctaacctcctcttgtagtaattctcaactcaactcaaagtcccaagaatttggaatggtaggatgctgtgcggggagctcgaggctgaggcataatcactgcttcggttctgctcatcaggggacacgctcccttactcatggcagccatgtttgattgtcacagagccccccgaatactctgtctatagtgacacactgtaggtgtcataaattttaagaaacctgcttttaagtactatttataggtttttctgttatacttgcaacctagttttaaaatacatgaggattttatgaaagctttatacagacatttataggaaactcattctttgattttaggtgccatttaaattgataacacttactttataaaaagatgctttttgtctggatagagccttatagtttaaaatatcttcatatattgccatttgatcaaataaatttcttacttagaaaa

SEQ ID NO: 1856 - protein, 360 aa, Homo sapiens; identical to SEQ ID NO: 1854

SEQ ID NO: 1857 - DNA, 1854 bp, Homo sapiens
gcccgctgcggtcacgctgcgcccggcgccgcagggtgggcggcgaggcactcacgagggggacgctgagggcttccgcgcgggccacccgggtcaagcgcgctccgccgggaaacttctgcgggcgccgggctgaagctccgggcagggctgggaaggaaaggaaataccaaaatatttgcagactggatccaaatcaggagcccagatgaacttaaagaagcgagcatgggattcttagtttttcaagatccgtacacacgaagcctttaatcagcatcaactccagtgtccgttttctctggttttgtgaagactgcacaaaactctcatgatggagaaccaaaggacttagttacctgtttcagtgtcatctaaagtcaactgaaaagtgaagcaggcagtaatacagccatggaaagaaattcaagtttatggaagaacctaatagatgaacacccagtctgcacaacctggaagcaagaggccgaaggagccatttatcatcttgccagtattttatttgtagtaggtttcatgggtggcagtggattcttcgggctcctttatgtcttcagtttgctggggttgggttttctctgttctgctgtctgggcttgggtagatgtctgtgcagctgacatattttcctggaattttgtactgtttgtcatctgcttcatgcaatttgttcatattgcatatcaagttcgcagcataacctttgcccgagaattccaagtgttgtacagctcccttttccagcccctggggatctctttgcctgtcttcagaacgattgctttgagctctgaagtggttactttggaaaaggaacactgttatgccatgcaggggaaaacttccattgataaactctccttgcttgtttcaggaaggatcagagtgacagttgatggcgaatttctgcattacattttcccccttcagttcctggattctcctgagtgggattcactgagacccacagaggaaggcatttttcaggtaaccctcactgcagaaactgattgtcgatatgtgtcttggaggagaaagaaattatatctgctctttgctcagcatcgctacatctcccgccttttttcagtgctaattggcagtgacattgcagataaactctatgccttgaatgacagggtatatataggaaaaagatatcactatgatattcggctacccaacttctatcaaatgtcaactccagaaatacgcagatcacccctgacacaacattttcagaattccagacgatactgtgataaatgacatcaaagtctgaaatttataagtataaaaaaagactctctcttcatcattccccagtgaaatagcaaaatacaaaaaaagagctccctaatgtttttataaatcaaattcagaagcgagatgccattgccaactgttttattcctttcaacaactgcattgtgaataaactttacaaatttttcttgtatttctcattgttataattggggagggggtggataactatgggcagtttgcccttttctgcatcaaaactgggagaatgaaattccactttctcaattcttttctcacatttactcaaatgcattgtcttgccctatggactcaggagttgcttctcaagaaacagccagcaagtattctcagcctgagggtgggttgctactgtccacataggcatttccggaattcacttttttgctacaacctccagtgaaagcaattattttaaatgtgcagttacttgatgtgactaaaaagtagaataaatgcaagagataataatatgtgaatcttgaagcctattttattgctacaaataaaataacatttaaaaag

SEQ ID NO: 1858 - protein, 291 aa, Homo sapiens
MERNSSLWKNLIDEHPVCTTWKQEAEGAIYHLASILFVVGFMGGSGFFGLLYVFSLLGLGFLCSAVWAWVDVCAADIFSWNFVLFVICFMQFVHIAYQVRSITFAREFQVLYSSLFQPLGISLPVFRTIALSSEVVTLEKEHCYAMQGKTSIDKLSLLVSGRIRVTVDGEFLHYIFPLQFLDSPEWDSLRPTEEGIFQVTLTAETDCRYVSWRRKKLYLLFAQHRYISRLFSVLIGSDIADKLYALNDRVYIGKRYHYDIRLPNFYQMSTPEIRRSPLTQHFQNSRRYCDK

SEQ ID NO: 1859 - DNA, 2010 bp, Homo sapiens
ctccccaccttctctcccgaaggcgaaaatggcagggccaggcgagaacctgggacagcggtggccctagccctgcgatcctcacccctcctgctaggagaggctgcgggctgcccgcggacgatgtggccgcggctgctcccgagcgcatcttcggcccgggtccccgccgccacccctcttctctgctccttccatcccgcccagaggagttgatgccgctgtcgccgccgccgccgctgctgaagccgcggctgatggatgccagggagtgccgcattgcttagcgaccccgcctctgggtttgctgatgatctctctccgccctggagctcagcgctgaagagctaccttattattaatcagaatttccatcgccacccctggcaggcgtatccttcagcagggaccgcaggaacattcacagtgcaggggctgagatgtgcgtgggggttgtttttgttacatcttggaagagaagagaagaggacagtaccaagatcagaaacacccgtgctaggtggaattaggggtgatttgttaggaaagagaaaggacaagaagaggagtgcggagcccttcaggggttcacatctctttaaaggaaaggaaagagggagccaaagtagggtgttgtattttagggggcagaggaagaagtttacaccccccggcccccccagctttgctgggggaaagcaggagcaacagggcacttgattggacaccaagattattaatttcctgtaggggagaggaagcaggcagcaggaggtctgggggctggagtctggtggtggcaaggaccaggtttgctttgggacagtcaacaaggtcttctgagggaaagctcagagataggcagaacaatgactcatttgcaagccggtctctcccctgagaccctggagaaagctcgcctggagctcaatgaaaacccagacacgctgcaccaggacatccaggaggtgagggatatggtcatcaccaggccggacattggctttctgcgcacggatgatgccttcatcttacgcttcttgcgggctaggaagtttcatcactttgaggccttccgcctcctggcgcagtactttgagtaccggcagcagaacctggacatgttcaaaagctttaaggccaccgaccctggcatcaagcaggcactgaaggatggcttccctgggggcctggccaatctggaccactatggcaggaagattctagtcctttttgctgccaattgggatcagagcaggtacacactggtggatattttgcgtgccatcttactttctttagaagccatgattgaagatcctgagcttcaagtgaatgggtttgttttgatcatagactggagtaacttcactttcaagcaagcctctaaactcacaccaagtatgctgcgattagctattgaaggcctgcaggatagtttcccagcgcgatttggaggaattcattttgtcaatcaaccatggtatatccatgccctgtacaccgtgatccggcctttcctgaaggagaaaactcggaaaaggatatttttgcatggtaacaacctgaacagtctacaccaactaattcatcctgagatcctgccctctgagtttggaggaatgctgcctccttatgacatggggacatgggcaagaacactgctagaccatgaatatgacgatgacagcgagtacaatgtagactcctacagcatgcctgtgaaggaagtagagaaggaactctccccaaagtccatgaagagatctcaatcagtagtggatcctacagtactaaaacgcatggataaaaatgaggaagaaaacatgcaaccattgctttctctggactaataacttctctacatccccttcatggattagaaatggaaagtattggttttcagcaacagggacaacactgtagaggaattaccagctggaaaccgacttattcatgttaatgtagcataatatataacaaggcatcaggctttccttggcctgaacc

SEQ ID NO: 1860 - protein, 327 aa, Homo sapiens
MTHLQAGLSPETLEKARLELNENPDTLHQDIQEVRDMVITRPDIGFLRTDDAFILRFLRARKFHHFEAFRLLAQYFEYRQQNLDMFKSFKATDPGIKQALKDGFPGGLANLDHYGRKILVLFAANWDQSRYTLVDILRAILLSLEAMIEDPELQVNGFVLIIDWSNFTFKQASKLTPSMLRLAIEGLQDSFPARFGGIHFVNQPWYIHALYTVIRPFLKEKTRKRIFLHGNNLNSLHQLIHPEILPSEFGGMLPPYDMGTWARTLLDHEYDDDSEYNVDSYSMPVKEVEKELSPKSMKRSQSVVDPTVLKRMDKNEEENMQPLLSLD

SEQ ID NO: 1861 - DNA, 2165 bp, Homo sapiens
gcggccgccccggcggctcctggaaccccggttcgcggcgatgccagccaccccagcgaagccgccgcagttcagtgcttggataatttgaaagtacaatagttggtttccctgtccacccgccccacttcgcttgccatcacagcacgcctatcggatgtgagaggagaagtcccgctgctcgggcactgtctatatacgcctaacacctacatatattttaaaaacattaaatataattaacaatcaaaagaaagaggagaaaggaagggaagcattactgggttactatgcacttgcgactgatttcttggctttttatcattttgaactttatggaatacatcggcagccaaaacgcctcccggggaaggcgccagcgaagaatgcatcctaacgttagtcaaggctgccaaggaggctgtgcaacatgctcagattacaatggatgtttgtcatgtaagcccagactattttttgctctggaaagaattggcatgaagcagattggagtatgtctctcttcatgtccaagtggatattatggaactcgatatccagatataaataagtgtacaaaatgcaaagctgactgtgatacctgtttcaacaaaaatttctgcacaaaatgtaaaagtggattttacttacaccttggaaagtgccttgacaattgcccagaagggttggaagccaacaaccatactatggagtgtgtcagtattgtgcactgtgaggtcagtgaatggaatccttggagtccatgcacgaagaagggaaaaacatgtggcttcaaaagagggactgaaacacgggtccgagaaataatacagcatccttcagcaaagggtaacctgtgtcccccaacaaatgagacaagaaagtgtacagtgcaaaggaagaagtgtcagaagggagaacgaggaaaaaaaggaagggagaggaaaagaaaaaaacctaataaaggagaaagtaaagaagcaatacctgacagcaaaagtctggaatccagcaaagaaatcccagagcaacgagaaaacaaacagcagcagaagaagcgaaaagtccaagataaacagaaatcggtatcagtcagcactgtacactagagggttccatgagattattgtagactcatgatgctgctatctcaaccagatgcccaggacaggtgctctagccattaggaccacaaatggacatgtcagttattgctctgtctaaacaacattcccagtagttgctatattcttcatacaagcatagttaacaacaaagagccaaaagatcaaagaagggatactttcagatggttgtcttgtgtgcttctctgcatttttaaaagacaagacattcttgtacatattatcaataggctataagatgtaacaacgaaatgatgacatctggagaagaaacatcttttccttataaaaatgtgttttcaagctgttgttttaagaagcaaaagatagttctgcaaattcaaagatacagtatcccttcaaaacaaataggagttcagggaagagaaacatccttcaaaggacagtgttgttttgaccgggagatctagagagtgctcagaattagggcctggcatttggaatcacaggatttatcatcacagaaacaactgttttaagattagttccatcactctcatcctgtatttttataagaaacacaagagtgcataccagaattgaatataccatatgggattggagaaagacaaatgtggaagaaatcatagagctggagactacttttgtgctttacaaaactgtgaaggattgtggtcacctggaacaggtctccaatctatgttagcactatgtggctcagcctctgttaccccttggattatatatcaacctgtaaacatgtgcctgtaacttacttccaaaaacaaaatcatacttattagaagaaaattctgattttatagaaaaaaaatagagcaaggagaatataacatgtttgcaaagtcatgtgttttctttctcaatgagggaaaaacaattttattacctgcttaatggtccacctggaactaaaagggatactattttctaacaaggtatatctagtaggggagaaagccaccacaataaatatatttgttaatagtttttcaaaaaaaaaaaaaaaaaaaaaaaaaa

SEQ ID NO: 1862 - protein, 272 aa, Homo sapiens
MHLRLISWLFIILNFMEYIGSQNASRGRRQRRMHPNVSQGCQGGCATCSDYNGCLSCKPRLFFALERIGMKQIGVCLSSCPSGYYGTRYPDINKCTKCKADCDTCFNKNFCTKCKSGFYLHLGKCLDNCPEGLEANNHTMECVSIVHCEVSEWNPWSPCTKKGKTCGFKRGTETRVREIIQHPSAKGNLCPPTNETRKCTVQRKKCQKGERGKKGRERKRKKPNKGESKEAIPDSKSLESSKEIPEQRENKQQQKKRKVQDKQKSVSVSTVH

SEQ ID NO: 1863 - DNA, 8192 bp, Homo sapiens
cagcgactcctctggctcccgagaagtggatccggtcgcggccactacgatgccgggagccgccggggtcctcctccttctgctgctctccggaggcctcgggggcgtacaggcgcagcggccgcagcagcagcggcagtcacaggcacatcagcaaagaggtttattccctgctgtcctgaatcttgcttctaatgctcttatcacgaccaatgcaacatgtggagaaaaaggacctgaaatgtactgcaaattggtagaacatgtccctgggcagcctgtgaggaacccgcagtgtcgaatctgcaatcaaaacagcagcaatccaaaccagagacacccgattacaaatgctattgatggaaagaacacttggtggcagagtcccagtattaagaatggaatcgaataccattatgtgacaattacactggatttacagcaggtgttccagatcgcgtatgtgattgtgaaggcagctaactccccccggcctggaaactggattttggaacgctctcttgatgatgttgaatacaagccctggcagtatcatgctgtgacagacacggagtgcctaacgctttacaatatttatccccgcactgggccaccgtcatatgccaaagatgatgaggtcatctgcacttcattttactccaagatacaccccttagaaaatggagagattcacatctctttaatcaatgggagaccaagtgccgatgatccttctccagaactgctagaatttacctccgctcgctatattcgcctgagatttcagaggatccgcacactgaatgctgacttgatgatgtttgctcacaaagacccaagagaaattgaccccattgtcaccagaagatattactactcggtcaaggatatttcagttggagggatgtgcatctgctatggtcatgccagggcttgtccacttgatccagcgacaaataaatctcgctgtgagtgtgagcataacacatgtggcgatagctgtgatcagtgctgtccaggattccatcagaaaccctggagagctggaacttttctaactaaaactgaatgtgaagcatgcaattgtcatggaaaagctgaagaatgctattatgatgaaaatgttgccagaagaaatctgagtttgaatatacgtggaaagtacattggagggggtgtctgcattaattgtacccaaaacactgctggtataaactgcgagacatgtacagatggcttcttcagacccaaaggggtatctccaaattatccaaggccatgccagccatgtcattgcgatccaattggttccttaaatgaagtctgtgtcaaggatgagaaacatgctcgacgaggtttggcacctggatcctgtcattgcaaaactggttttggaggtgtgagctgtgatcggtgtgccaggggctacactggctacccggactgcaaagcctgtaactgcagtgggttagggagcaaaaatgaggatccttgttttggcccctgtatctgcaaggaaaatgttgaaggaggagactgtagtcgttgcaaatccggcttcttcaatttgcaagaggataattggaaaggctgcgatgagtgtttctgttcaggggtttcaaacagatgtcagagttcctactggacctatggcaaaatacaagatatgagtggctggtatctgactgaccttcctggccgcattcgagtggctccccagcaggacgacttggactcacctcagcagatcagcatcagtaacgcggaggcccggcaagccctgccgcacagctactactggagcgcgccggctccctatctgggaaacaaactcccagcagtaggaggacagttgacatttaccatatcatatgaccttgaagaagaggaagaagatacagaacgtgttctccagcttatgattatcttagagggtaatgacttgagcatcagcacagcccaagatgaggtgtacctgcacccatctgaagaacatactaatgtattgttacttaaagaagaatcatttaccatacatggcacacattttccagtccgtagaaaggaatttatgacagtgcttgcgaatttgaagagagtcctcctacaaatcacatacagctttgggatggatgccatcttcaggttgagctctgttaaccttgaatccgctgtctcctatcctactgatggaagcattgcagcagctgtagaagtgtgtcagtgcccaccagggtatactggctcctcttgtgaatcttgttggcctaggcacaggcgagttaacggcactatttttggtggcatctgtgagccatgtcagtgctttggtcatgcggagtcctgtgatgacgtcactggagaatgcctgaactgtaaggatcacacaggtggcccatattgtgataaatgtcttcctggtttctatggcgagcctactaaaggaacctctgaagactgtcaaccctgtgcctgtccactcaatatcccatccaataactttagcccaacgtgccatttagaccggagtcttggattgatctgtgatggatgccctgtcgggtacacaggaccacgctgtgagaggtgtgcagaaggctattttggacaaccctctgtacctggaggatcatgtcagccatgccaatgcaatgacaaccttgacttctccatccctggcagctgtgacagcttgtctggctcctgtctgatatgtaaaccaggtacaacaggccggtactgtgagctctgtgctgatggatattttggagatgcagttgatgcgaagaactgtcagccctgtcgctgtaatgccggtggctctttctctgaggtttgccacagtcaaactggacagtgtgagtgcagagccaacgttcagggtcagagatgtgacaaatgcaaggctgggacctttggcctacaatcagcaaggggctgtgttccctgcaactgcaattcttttgggtctaagtcattcgactgtgaagagagtggacaatgttggtgccaacctggagtcacagggaagaaatgtgaccgctgtgcccacggctatttcaacttccaagaaggaggctgcacagcttgtgaatgttctcatctgggtaataattgtgacccaaagactgggcgatgcatttgcccacccaataccattggagagaaatgttctaaatgtgcacccaatacctggggccacagcattaccactggttgtaaggcttgtaactgcagcacagtgggatccttggatttccaatgcaatgtaaatacaggccaatgcaactgtcatccaaaattctctggtgcaaaatgtacagagtgcagtcgaggtcactggaactaccctcgctgcaatctctgtgactgcttcctccctgggacagatgccacaacctgtgattcagagactaaaaaatgctcctgtagtgatcaaactgggcagtgcacttgtaaggtgaatgtggaaggcatccactgtgacagatgccggcctggcaaattcggactcgatgccaagaatccacttggctgcagcagctgctattgcttcggcactactacccagtgctctgaagcaaaaggactgatccggacgtgggtgactctgaaggctgagcagaccattctacccctggtagatgaggctctgcagcacacgaccaccaagggcattgtttttcaacatccagagattgttgcccacatggacctgatgagagaagatctccatttggaacctttttattggaaacttccagaacaatttgaaggaaagaagttgatggcctatgggggcaaactcaagtatgcaatctatttcgaggctcgggaagaaacaggtttctctacatataatcctcaagtgatcattcgaggtgggacacctactcatgctagaattatcgtcaggcatatggctgctcctctgattggccaattgacaaggcatgaaattgaaatgacagagaaagaatggaaatattatggggatgatcctcgagtccatagaactgtgacccgagaagacttcttggatatactatatgatattcattacattcttatcaaagctacttatggaaatttcatgcgacaaagcaggatttctgaaatctcaatggaggtagctgaacaaggacgtggaacaacaatgactcctccagctgacttgattgaaaaatgtgattgtcccctgggctattctggcctgtcctgtgaggcatgcttgccgggattttatcgactgcgttctcaaccaggtggccgcacccctggaccaaccctgggcacctgtgttccatgtcaatgtaatggacacagcagcctgtgtgaccctgaaacatcgatatgccagaattgtcaacatcacactgctggtgacttctgtgaacgatgtgctcttggatactatggaattgtcaagggattgccaaatgactgtcagcaatgtgcctgccctctgatttcttccagtaacaatttcagcccctcttgtgtcgcagaaggacttgacgactaccgctgcacggcttgtccacggggatatgaaggccagtactgtgaaaggtgtgcccctggctatactggcagtccaggcaaccctggaggctcctgccaagaatgtgagtgtgatccctatggctcactgcctgtgccctgtgaccctgtcacaggattctgcacgtgccgacctggagccacgggaaggaagtgtgacggctgcaagcactggcatgcacgcgagggctgggagtgtgttttttgtggagatgagtgcactggccttcttctcggtgacttggctcgcctggagcagatggtcatgagcatcaacctcactggtccgctgcctgcgccatataaaatgctgtatggtcttgaaaatatgactcaggagctaaagcacttgctgtcacctcagcgggccccagagaggcttattcagctggcagagggcaatctgaatacactcgtgaccgaaatgaacgagctgctgaccagggctaccaaagtgacagcagatggcgagcagaccggacaggatgctgagaggaccaacacaagagcaaagtccctgggagaattcattaaggagcttgcccgggatgcagaagctgtaaatgaaaaagctataaaactaaatgaaactctaggaactcgagacgaggcctttgagagaaatttggaagggcttcagaaagagattgaccagatgattaaagaactgaggaggaaaaatctagagacacaaaaggaaattgctgaagatgagttggtagctgcagaagcccttctgaaaaaagtgaagaagctgtttggagagtcccggggggaaaatgaagaaatggagaaggatctccgggaaaaactggctgactacaaaaacaaagttgatgatgcttgggaccttttgagagaagccacagataaaatcagagaagctaatcgcctatttgcagtaaatcagaaaaacatgactgcattggagaaaaagaaggaggctgttgagagcggcaaacgacaaattgagaacactttaaaagaaggcaatgacatactcgatgaagccaaccgtcttgcagatgaaatcaactccatcatagactatgttgaagacatccaaactaaattgccacctatgtctgaggagcttaatgataaaatagatgacctctcccaagaaataaaggacaggaagcttgctgagaaggtgtcccaggctgagagccacgcagctcagttgaatgactcatctgctgtccttgatggaatccttgatgaggctaaaaacatctccttcaatgccactgcagccttcaaagcttacagcaatattaaggactatattgatgaagctgagaaagttgccaaagaagccaaagatcttgcacatgaagctacaaaactggcaacaggtcctcggggtttattaaaggaagatgccaaaggctgtcttcagaaaagcttcaggattcttaacgaagccaagaagttagcaaatgatgtaaaagaaaatgaagaccatctaaatggcttaaaaaccaggatagaaaatgctgatgctagaaatggggatctcttgagaactttgaatgacactttgggaaagttatcagctattccaaatgatacagctgctaaactgcaagctgttaaggacaaagccagacaagccaacgacacagctaaagatgtactggcacagattacagagctccaccagaacctcgatggcctgaagaagaattacaataaactagcagacagcgtcgccaaaacgaatgctgtggttaaagatccttccaagaacaaaatcattgccgatgcagatgccactgtcaaaaatttagaacaggaagctgaccggctaatagataaactcaaacccatcaaggaacttgaggataacctaaagaaaaacatctctgagataaaggaattgataaaccaagctcggaaacaagccaattctatcaaagtatctgtgtcttcaggaggtgactgcattcgaacatacaaaccagaaatcaagaaaggaagttacaataatattgttgtcaacgtaaagacagctgttgctgataacctcctcttttatcttggaagtgccaaatttattgactttctggctatagaaatgcgtaaaggcaaagtcagcttcctctgggatgttggatctggagttggacgtgtagagtacccagatttgactattgatgactcatattggtaccgtatcgtagcatcaagaactgggagaaatggaactatttctgtgagagccctggatggacccaaagccagcattgtgcccagcacacaccattcgacgtctcctccagggtacacgattctagatgtggatgcaaatgcaatgctgtttgttggtggcctgactgggaaattaaagaaggctgatgctgtacgtgtgattacattcactggctgcatgggagaaacatactttgacaacaaacctataggtttgtggaatttccgagaaaaagaaggtgactgcaaaggatgcactgtcagtcctcaggtggaagatagtgaggggactattcaatttgatggagaaggttatgcattggtcagccgtcccattcgctggtaccccaacatctccactgtcatgttcaagttcagaacattttcttcgagtgctcttctgatgtatcttgccacacgagacctgagagatttcatgagtgtggagctcactgatgggcacataaaagtcagttacgatctgggctcaggaatggcttccgttgtcagcaatcaaaaccataatgatgggaaatggaaatcattcactctgtcaagaattcaaaaacaagccaatatatcaattgtagatatagatactaatcaggaggagaatatagcaacttcgtcttctggaaacaactttggtcttgacttgaaagcagatgacaaaatatattttggtggcctgccaacgctgagaaacttgagtatgaaagcaaggccagaagtaaatctgaagaaatattccggctgcctcaaagatattgaaatttcaagaactccgtacaatatactcagtagtcccgattatgttggtgttaccaaaggatgttccctggagaatgtttacacagttagctttcctaagcctggttttgtggagctctcccctgtgccaattgatgtaggaacagaaatcaacctgtcattcagcaccaagaatgagtccggcatcattcttttgggaagtggagggacaccagcaccacctaggagaaaacgaaggcagactggacaggcctattatgtaatactcctcaacaggggccgtctggaagtgcatctctccacaggggcacgaacaatgaggaaaattgtcatcagaccagagccgaatctgtttcatgatggaagagaacattccgttcatgtagagcgaactagaggcatctttacagttcaagtggatgaaaacagaagatacatgcaaaacctgacagttgaacagcctatcgaagttaaaaagcttttcgttgggggtgctccacctgaatttcaaccttccccactcagaaatattcctccttttgaaggctgcatatggaatcttgttattaactctgtccccatggactttgcaaggcctgtgtccttcaaaaatgctgacattggtcgctgtgcccatcagaaac

SEQ ID NO: 1864 - protein, 3122 aa, Homo sapiens
MPGAAGVLLLLLLSGGLGGVQAQRPQQQRQSQAHQQRGLFPAVLNLASNALITTNATCGEKGPEMYCKLVEHVPGQPVRNPQCRICNQNSSNPNQRHPITNAIDGKNTWWQSPSIKNGIEYHYVTITLDLQQVFQIAYVIVKAANSPRPGNWILERSLDDVEYKPWQYHAVTDTECLTLYNIYPRTGPPSYAKDDEVICTSFYSKIHPLENGEIHISLINGRPSADDPSPELLEFTSARYIRLRFQRIRTLNADLMMFAHKDPREIDPIVTRRYYYSVKDISVGGMCICYGHARACPLDPATNKSRCECEHNTCGDSCDQCCPGFHQKPWRAGTFLTKTECEACNCHGKAEECYYDENVARRNLSLNIRGKYIGGGVCINCTQNTAGINCETCTDGFFRPKGVSPNYPRPCQPCHCDPIGSLNEVCVKDEKHARRGLAPGSCHCKTGFGGVSCDRCARGYTGYPDCKACNCSGLGSKNEDPCFGPCICKENVEGGDCSRCKSGFFNLQEDNWKGCDECFCSGVSNRCQSSYWTYGKIQDMSGWYLTDLPGRIRVAPQQDDLDSPQQISISNAEARQALPHSYYWSAPAPYLGNKLPAVGGQLTFTISYDLEEEEEDTERVLQLMIILEGNDLSISTAQDEVYLHPSEEHTNVLLLKEESFTIHGTHFPVRRKEFMTVLANLKRVLLQITYSFGMDAIFRLSSVNLESAVSYPTDGSIAAAVEVCQCPPGYTGSSCESCWPRHRRVNGTIFGGICEPCQCFGHAESCDDVTGECLNCKDHTGGPYCDKCLPGFYGEPTKGTSEDCQPCACPLNIPSNNFSPTCHLDRSLGLICDGCPVGYTGPRCERCAEGYFGQPSVPGGSCQPCQCNDNLDFSIPGSCDSLSGSCLICKPGTTGRYCELCADGYFGDAVDAKNCQPCRCNAGGSFSEVCHSQTGQCECRANVQGQRCDKCKAGTFGLQSARGCVPCNCNSFGSKSFDCEESGQCWCQPGVTGKKCDRCAHGYFNFQEGGCTACECSHLGNNCDPKTGRCICPPNTIGEKCSKCAPNTWGHSITTGCKACNCSTVGSLDFQCNVNTGQCNCHPKFSGAKCTECSRGHWNYPRCNLCDCFLPGTDATTCDSETKKCSCSDQTGQCTCKVNVEGIHCDRCRPGKFGLDAKNPLGCSSCYCFGTTTQCSEAKGLIRTWVTLKAEQTILPLVDEALQHTTTKGIVFQHPEIVAHMDLMREDLHLEPFYWKLPEQFEGKKLMAYGGKLKYAIYFEAREETGFSTYNPQVIIRGGTPTHARIIVRHMAAPLIGQLTRHEIEMTEKEWKYYGDDPRVHRTVTREDFLDILYDIHYILIKATYGNFMRQSRISEISMEVAEQGRGTTMTPPADLIEKCDCPLGYSGLSCEACLPGFYRLRSQPGGRTPGPTLGTCVPCQCNGHSSLCDPETSICQNCQHHTAGDFCERCALGYYGIVKGLPNDCQQCACPLISSSNNFSPSCVAEGLDDYRCTACPRGYEGQYCERCAPGYTGSPGNPGGSCQECECDPYGSLPVPCDPVTGFCTCRPGATGRKCDGCKHWHAREGWECVFCGDECTGLLLGDLARLEQMVMSINLTGPLPAPYKMLYGLENMTQELKHLLSPQRAPERLIQLAEGNLNTLVTEMNELLTRATKVTADGEQTGQDAERTNTRAKSLGEFIKELARDAEAVNEKAIKLNETLGTRDEAFERNLEGLQKEIDQMIKELRRKNLETQKEIAEDELVAAEALLKKVKKLFGESRGENEEMEKDLREKLADYKNKVDDAWDLLREATDKIREANRLFAVNQKNMTALEKKKEAVESGKRQIENTLKEGNDILDEANRLADEINSIIDYVEDIQTKLPPMSEELNDKIDDLSQEIKDRKLAEKVSQAESHAAQLNDSSAVLDGILDEAKNISFNATAAFKAYSNIKDYIDEAEKVAKEAKDLAHEATKLATGPRGLLKEDAKGCLQKSFRILNEAKKLANDVKENEDHLNGLKTRIENADARNGDLLRTLNDTLGKLSAIPNDTAAKLQAVKDKARQANDTAKDVLAQITELHQNLDGLKKNYNKLADSVAKTNAVVKDPSKNKIIADADATVKNLEQEADRLIDKLKPIKELEDNLKKNISEIKELINQARKQANSIKVSVSSGGDCIRTYKPEIKKGSYNNIVVNVKTAVADNLLFYLGSAKFIDFLAIEMRKGKVSFLWDVGSGVGRVEYPDLTIDDSYWYRIVASRTGRNGTISVRALDGPKASIVPSTHHSTSPPGYTILDVDANAMLFVGGLTGKLKKADAVRVITFTGCMGETYFDNKPIGLWNFREKEGDCKGCTVSPQVEDSEGTIQFDGEGYALVSRPIRWYPNISTVMFKFRTFSSSALLMYLATRDLRDFMSVELTDGHIKVSYDLGSGMASVVSNQNHNDGKWKSFTLSRIQKQANISIVDIDTNQEENIATSSSGNNFGLDLKADDKIYFGGLPTLRNLSMKARPEVNLKKYSGCLKDIEISRTPYNILSSPDYVGVTKGCSLENVYTVSFPKPGFVELSPVPIDVGTEINLSFSTKNESGIILLGSGGTPAPPRRKRRQTGQAYYVILLNRGRLEVHLSTGARTMRKIVIRPEPNLFHDGREHSVHVERTRGIFTVQVDENRRYMQNLTVEQPIEVKKLFVGGAPPEFQPSPLRNIPPFEGCIWNLVINSVPMDFARPVSFKNADIGRCAHQKLREDEDGAAPAEIVIQPEPVPTPAFPTPTPVLTHGPCAAESEPALLIGSKQFGLSRNSHIAIAFDDTKVKNRLTIELEVRTEAESGLLFYMARINHADFATVQLRNGLPYFSYDLGSGDTHTMIPTKINDGQWHKIKIMRSKQEGILYVDGASNRTISPKKADILDVVGMLYVGGLPINYTTRRIGPVTYSIDGCVRNLHMAEAPADLEQPTSSFHVGTCFANAQRGTYFDGTGFAKAVGGFKVGLDLLVEFEFRTTTTTGVLLGISSQKMDGMGIEMIDEKLMFHVDNGAGRFTAVYDAGVPGHLCDGQWHKVTANKIKHRIELTVDGNQVEAQSPNPASTSADTNDPVFVGGFPDDLKQFGLTTSIPFRGCIRSLKLTKGTGKPLEVNFAKALELRGVQPVSCPAN

SEQ ID NO: 1865 - DNA, 5042 bp, Homo sapiens
gcaagcatttaggaatagcatttgccaactcccaagacttggctgtccctctcgctctggccttacttacctaactgacctcctgtagtactgagttgtgtgctggccaagttcctattcctggactgctttctttcccttgaccttccttgaaatactgctaacctgacttttgactgtgatctatgtgctatctcctgtgtgaagcctaatgaaaggtccttctctaatggaaactttcattctaggagttacctcattctgttttatgtggatctgttagctccttcattaggtttcaagctgtttgaaacagtgattgaatttgctcacctttgctttcctctcagggtctacattgggaccctgagtgataatagagccttctgtagtattgaattgctttaaacagaattaaaggacattggcaccaaatgtgattttgccaatccttgggagtcttggtgcctctgtctgggcttgaccagggtagaatggctgaagaaaatgtgattcctccacccattaaattctttatttctcaactactctggaagtttttgcctctttttgtttctatccattttcatacttttaagatacccttttttactttaagataccttttttcttcctaacgtttctttacatgctcacatgcaagcccagtcatccatctctctttttcacctttctgtcctcatatatttttcttaaaatatcttttctcatctaatctcctttcctctatcaatcagcctcctaagcgaaaatggtagtgctaatgttttaaaaagtgggggaggactagaaatctgtatggaatgtaattcacttttattgcttttaaattaaatgaaacgtttttgcccttgtttccattctactcagaaggatttcagactaaatccttaagcctgccatatggaaataactgggctagagggctgctatctaatctaagcatttaattcaaacatttgaaatggtttttgcttcaagaaaacataggttgacactaagctttattttagcaaaggtttgggaaaggttctaatctgcagtatgtacactttgataaatttcatagactagagcaacagattacaatttagtttgttcttccaacataaaactattttaatcctagttataatttcactgaaggctggatttactcactggcttgttaaaactgtagataacaaccacaagcctgttatttaaacacaattcagaaatcataaatagaaattcaaaaggagagctcaatgctgcaagatgagatttgatgccctgaagaaactctctctgaaatttgccaaagaccttgtggaacttaaaatatcttcttgtttcctaccagctagatatggcagcttgagaactatttattatgaatcaagatagatattttaccaactcagaaaatgttgctttttgtttggatattaatcttgtttgttcatatttttaactaggaaagttagtacagtaatatggtggtcatccaacagaccacaagaagagaatttgtccctcattcagcattttagcaaatatttcttgaacactagccatgtgcaaggtattacagtgagtgtttctgctaataaaaatatgaattaaatttgatgtttgatcataagtagaagaactgtgatactataatattgtaagtgccatagaaaacttgctattataaaatgctgtaaggagttaatgcttgcatagggtgcagtgggtcagctagagaaggctttataaagaaagtggaatatgagctttgatgcctagccagatgtgggtatgtgaagaacagggcagggcagtggggagtgggtggattctggacagctgaaacattgttaacaaaatctcagaaatggtacaaaatggaatatgaatgagaaatacagaacatttgttaggttttatttttatgcaaattaaagagaagagttagagacaaagttaaagtcaatgggtctagaatttcagctaaaactttggtaggtagtggagaatattttatcattattctgctctttaaacaacttcagagatgattgattaatcttgattgtaaaggaagagaaattctttggaagaccagttagggggttatcatatggtctagtaaaagttaataagatctgcacaaggctgggaagagtaggattagaacagaggggtggaattaaaggacatcgtatattggaaatttctaggatttagaacctgattggaagaggaagaagaaagggaggagttaaaaataactgtaaagagccaaatctgagaactgaccctgctaaaaaagtcagacaagtcaagtggtgcagctggtgtgtgctagaagagtaaaaggccaagctatgatagcaactggtggagtgataactggcctggccgccttgaaaaggcaagactctgccagatcacagcagcatgtcaacctcagcccgtctcctgctacccaagagaagaagcccatcaggcgccggccccgggcagatgttgtggttgttcgtggcaaaatccggctttattccccatctggtttttttcttattttaggagtgctcatctccattataggaattgctatggccgttcttggatattggccccaaaaagaacattttattgatgctgaaacaacactgtcaacaaatgaaactcaggtcattcggaatgaaggcggtgtggtggttcgcttctttgagcagcatttgcattctgataagatgaaaatgcttggcccattcaccatggggattggcattttcattttcatttgtgctaatgccattcttcatgaaaaccgtgacaaagagaccaaaatcatacacatgagggatatctattccacagtcattgacattcacacgctaagaatcaaggagcaaaggcaaatgaacggcatgtacactggtttgatgggagaaacagaagtaaaacagaatgggagctcctgtgcctcgagattggcagcaaatacgatcgcctctttctcgggttttcggagcagttttcgaatggacagctccgtggaggaggatgaacttatgttaaatgaaggtaagagttctgggcatcttatgccccctttgctctctgacagctctgtgtctgtctttggcctctatccacctccttccaagacaactgatgataagaccagcggctctaagaaatgtgaaaccaagtcaattgtgtcatcgtccatcagtgcttttacattgcctgtgatcaaacttaataactgtgttattgatgagcccagtatagataacatcactgaagatgctgacaacctcaaaagtaggtcaaggaatttgtcaatggattcccttgtggttcctttgcccaacaccagtgaatccttccagcccgtcagcacagtgctaccaaggaataattccattggggagtcgttgtcgagtcagtacaagtcatctatggctctcggacctggggctggacagctcttgtctcctggggctgccagaagacagtttgggtccaatacatccttgcatttgctctcgtcacactcaaagtccttggacttagaccggggtccctccactctaactgttcaggcagaacaacggaaacatccaagttggcctaggttggatcggaacaacagcaagggatatatgaaactagagaacaaagaagacccgatggataggttgcttgtgccccaagttgccatcaaaaaggactttaccaataaggagaagcttcttatgatttcaagatctcacaataatttgagttttgaacatgatgagtttttgagtaacaacctaaagaggggaacttctgaaacaaggttttaatgttaaaagaatatatcattttacaagggtatatattttaaaacgattttcactggtgtttccttcttaaagtattggctgtaagcctttttaatcaaatggtttgtagtgtattagaattggctgcttagttctgtaatgaagatggttgtatgtttgggttacttgtgactgcagtactctatgttaccacacatgattttatttttctcttcctttgaaagcatgatctcttttattaatatgaatgcaaaatgcttgcatccaaattaaagcttattttctttacttttaagttctttgattgccctattcataaaatgaaatgtccagtatggaaaacatagggtaccaaagtgtggaccaggagtacaaattcagtcccaatactcaatacgtattatagatgactatgagtgcaaaccttaggatgtgattttctgaataattgttctttgtaggatttggttacattatttaaaatgaaaaagatctagttttagtgtgagctcagtaatgttaattggttaagttcattgtgaatcttgagttttagataagtagttatttttttcaatatcacttctgtttttagtgatattatatcaagaaacaacgtattcaagagccatggctgacagtgccagatatacttagggataaacatcaaaatgcaattatagttgctataacgttagatactcggaatcaaaatttatttgcaagctgacttgataaactaaatgaaccaataaaatttgtagaaatgctatcctgaaataattatatacatgaagacaatgttgactaatgaattaagatacattatatactagttaatgctaactagtctcagtacctgtttttagccatctgttactgtccaatagcacctcattcccacattctattttcccccggtattctttagatcctagtatttggaaaacaatcggctaaccttgacatttctttttaccttcatatgccactatctcggtagttcaaaaaaatttagttcttgataaattgccttgaagtttaccttgtgctggagagccttatgataactccaaagactttcttacggtataatacatgttgtttaggattgtgtttcttagtcactgaagataataaatattaaaatggatgttttcatcagaaaaaaaaaaaaaaaaaaaaaaa

SEQ ID NO: 1866 - protein, 491 aa, Homo sapiens
MIATGGVITGLAALKRQDSARSQQHVNLSPSPATQEKKPIRRRPRADVVVVRGKIRLYSPSGFFLILGVLISIIGIAMAVLGYWPQKEHFIDAETTLSTNETQVIRNEGGVVVRFFEQHLHSDKMKMLGPFTMGIGIFIFICANAILHENRDKETKIIHMRDIYSTVIDIHTLRIKEQRQMNGMYTGLMGETEVKQNGSSCASRLAANTIASFSGFRSSFRMDSSVEEDELMLNEGKSSGHLMPPLLSDSSVSVFGLYPPPSKTTDDKTSGSKKCETKSIVSSSISAFTLPVIKLNNCVIDEPSIDNITEDADNLKSRSRNLSMDSLVVPLPNTSESFQPVSTVLPRNNSIGESLSSQYKSSMALGPGAGQLLSPGAARRQFGSNTSLHLLSSHSKSLDLDRGPSTLTVQAEQRKHPSWPRLDRNNSKGYMKLENKEDPMDRLLVPQVAIKKDFTNKEKLLMISRSHNNLSFEHDEFLSNNLKRGTSETRF

SEQ ID NO: 1867 - DNA, 2562 bp, Homo sapiens
atggctctaaccaccccttcagcttcccctcttccctctttctccatagttcctggtgcttcagcccaactcaccttcatccagctcctcagggatgctgcctttgcccttgacattgccatctacctaggaggctcttctacctccactgccttcttctcccagttgcctttaacccacttagctcccgcagggaagcctttccacacatataatgagtatggtgcttggaagcgccattacattgcttgtgtgtcccacttagactggctgacacctagggaggctgctgctacttatgggacgctgaatgaacccaaaacagaagatgaggaactactggagagacaaagagaaaagtgcctgaggaaaagaatttgggagaaaattgcactacgtaagaaggagttattcaaagttcgacccccttgggtgagtggaacttgctgctctagcgtgctaaagcccagatgccaaccacgcctctcccagactgtaagggagcgagtgggattacatgaagctttggagaaacagcttgttttgacatcgttagaaaccttgcccaagcgaagcaatatttctggaagccattcctaccctttattatcaaagaaaaattggcatggagttcataaaaatgatgacagatcttcatatgctctccggccacacttcatgttaatatcatcccggattcctgcgtatgagatggtgatggagagtgtgaaggctggtgttgtttctgtggtatatgaacacagcgtaaccttggaaagccttctgtatcttatagaaaaagctctggatgggcagaaggcacagagcatcggaatatttagcgatggagacagcagagaaatcaatttactccaaggctataaaattggtgttaaaaatttactgaggcctgaagtgagagatttctgggagaaattaggaagctatgtggccactgaagaagaagggggtcacgtggacttcttcgtgccccttggagcatcagaggcaggaattgaagttctttcccagctgtctcaactaactggcacgttctttacggcccccactgggattgcaactggctcttaccagcacattcttagtgattggctgggatcccaatggggaaaggccccctcttccatctacttctgcgaatcgaagctacagacgtggtccagcttcacagacttcctagaagaaaccttgaaaacagtaaggaagcagctgtatcctttcttcaaggaactgcagaagagcatcagtggcaggatgatagggcagtttatgtttgacaccatgggtatgaccaacattctaaacaaccaagatactgcgcaagctctggcagatggattgatggagttgtcaaaagaagattctgacaaacctctggaatttttgtcgtattttctgctgaagaaatgtggcaaaaagatcaaagatgttgaaggaaatgttattccaacaaaatgtgacccaaagacaacattcagtttattcatgaaggagagaatactccagaaggactcagcagaaaagcgagctagagttgtcagagaactcttacagagtgagagaaaatacgtgcagatactggaaattgtgagagatgtttatgtcgcaccactgaaagcagcattgtcatcaaacagagcgattctgagtgctgccaatatccagatcattttctgtgacattctacagattttaagtctcaacaggcagtttctagataacctgagagacagactgcaggaatggggcccagctcactgtgtgggagaaatagtcacgaagtttggaagccagttaaacacatataccaatttcttcaacaattaccctgtcattctgaaaactattgagaagtgcagagaaatgataccagcattccgaactttcctgaagaggcatgataagaccattgttaccaaaatgctgagcctgccagagctgctgctgtacccatcccgaagatttgaagaataccttaatcttctctacgctgtcaggcttcatacccctgcagagcatgttgaccgtggggacttgaccactgcaattgaccaaatcaaaaaatataaaggttatatagatcagatgaagcaaaacatcactatgaaggatcatctgtcagatatacagagaatcatctggggatgccctactctatcagaagtaaacagatatctgattagggtacaagatgtagcccaacttcattgctgtgatgaagaaataagtttctctttaaggctctatgaacacatccatgatctcagccttttcctcttcaatgatgccctgctcgtttctagtcggggcacatctcacactccatttgagaggacttcaaaaacaacctaccagttcattgcatcagtggcccttcatcggttactcatagaaaatattccagattccaagtatgtcaagaatgcatttattcttcagggtccaaaatataaatggatttgtgctacagaaatagaggatgataagttcctatggctgtcagtacttcgaaatgcaatcaaaagcagtatggagaagtga

SEQ ID NO: 1868 - protein, 853 aa, Homo sapiens
MALTTPSASPLPSFSIVPGASAQLTFIQLLRDAAFALDIAIYLGGSSTSTAFFSQLPLTHLAPAGKPFHTYNEYGAWKRHYIACVSHLDWLTPREAAATYGTLNEPKTEDEELLERQREKCLRKRIWEKIALRKKELFKVRPPWVSGTCCSSVLKPRCQPRLSQTVRERVGLHEALEKQLVLTSLETLPKRSNISGSHSYPLLSKKNWHGVHKNDDRSSYALRPHFMLISSRIPAYEMVMESVKAGVVSVVYEHSVTLESLLYLIEKALDGQKAQSIGIFSDGDSREINLLQGYKIGVKNLLRPEVRDFWEKLGSYVATEEEGGHVDFFVPLGASEAGIEVLSQLSQLTGTFFTAPTGIATGSYQHILSDWLGSQWGKAPSSIYFCESKLQTWSSFTDFLEETLKTVRKQLYPFFKELQKSISGRMIGQFMFDTMGMTNILNNQDTAQALADGLMELSKEDSDKPLEFLSYFLLKKCGKKIKDVEGNVIPTKCDPKTTFSLFMKERILQKDSAEKRARVVRELLQSERKYVQILEIVRDVYVAPLKAALSSNRAILSAANIQIIFCDILQILSLNRQFLDNLRDRLQEWGPAHCVGEIVTKFGSQLNTYTNFFNNYPVILKTIEKCREMIPAFRTFLKRHDKTIVTKMLSLPELLLYPSRRFEEYLNLLYAVRLHTPAEHVDRGDLTTAIDQIKKYKGYIDQMKQNITMKDHLSDIQRIIWGCPTLSEVNRYLIRVQDVAQLHCCDEEISFSLRLYEHIHDLSLFLFNDALLVSSRGTSHTPFERTSKTTYQFIASVALHRLLIENIPDSKYVKNAFILQGPKYKWICATEIEDDKFLWLSVLRNAIKSSMEK

SEQ ID NO: 1869 - DNA, 3565 bp, Homo sapiens
ccgccgctgtcactgttggtgcgggcgcgtcggggccgggccggggcactgtaaatggcggcggagggaggcggagcggcggccacgctcagcccagatcccccgaaactttaggttcgaagccccacaactttccgggaagcgctgccgctccggaggcgtggacggaaggggaagccgaggcgggaagtctgggggaatcggcagggagccggggagactcgaacccgcggcgggggcggagtccgccagtgcctcgcgcctccgcggcccccgcctctttctctgcaccctccccgcggccggagccggagccggagccggagccgtagtcgcagccgcagccgcagccgcgcgccgggcctcgcaggcagcggcgcggcgagcgcagccgggccccctcctcgcgacctccgggccctgttgctcgggcgcacctggcgcgtgtgaggccggggccggcgttttcgggaagctagcaggaggccgggccacgcgcagcccctgccggcccaggttcctggggccgggccccgagtagtgcatgcggggcggggcggccgtgagccggaggcgaagatggaaggcttaacgctgagcgatgcggagcagaaatactattcagatctcttctcctactgcgacattgagagcaccaagaaggtggtggtcaacgggcgggtgctggagctgttccgggccgcgcagctgccgaacgacgtggtcctacagatcatggagctttgtggtgcaacaagacttggttattttggaagaagtcagttctacattgctttgaaacttgtagctgttgcccagtctggtttccctttaagagtggaaagtataaatacagtaaaggaccttcctctgccaagatttgttgcttcaaagaatgaacaggaatctcgccatgcagcctcatattcttcagattctgaaaatcaagggtcgtattctggtgtaattcccccaccacctggcagggggcaagtgaaaaagggatccgtaagccatgatacggttcagcctcgtacatctgcagatgcacaggaacctgcatccccagtagtttcaccacagcaatccccaccaacttctccacacacatggaggaagcacagccgtcatcccagcggtgggaatagtgagaggcctctcgcgggacctgggccattttggtctccctttggtgaagcacaatcaggttcttctgctggtgatgcagtgtggtcagggcattccccacctccacctcaagaaaactgggtcagttttgcagatactccaccaaccagtactcttttaaccatgcatcctgcttctgtccaggaccagacaacagtacgaactgtagcatcagctacaactgccattgaaattcgtaggcaatccagtagttatgatgatccctggaaaataacagatgaacaaagacagtattatgtaaatcagtttaaaaccattcagcctgatctaaacggatttattccaggatctgcagctaaagagttttttacaaaatcaaaacttcctattcttgaactttctcatatttgggaactctcagactttgataaagatggtgcattgacactggatgagttttgtgctgcttttcatctggtggttgctaggaagaatggctatgatttaccagaaaaacttcctgaaagcttaatgcccaaactgattgatttggaagattcagcagatgttggggatcagccaggtgaggtaggttattcaggctctcctgctgaagctcctccaagcaagtcaccatcgatgccatcactaaaccagacatggcctgagctgaatcagagcagtgagcagtgggagacatttagtgaacgctcttcaagctcacaaactctgacccaatttgattctaacattgcaccagctgatcctgatactgctattgttcatccagttcccattcgtatgactccaagcaaaatccacatgcaggaaatggaacttaaaagaactggcagcgatcatacaaatcccactagcccattacttgtgaaaccatctgaccttttagaagaaaataagataaattcatcggtgaaattcgcttctggtaatactgtagatggttacagtagttcagactcttttacttctgacccagaacagatcgggagcaatgtaactcgtcaaaggtctcattcaggaacgtcgcctgataacactgcaccaccacctccccctccaaggccacagccctctcattctagatcatcatctttagatatgaatcggacctttacagtcaccacaggacaacaacaggctggagttgttgcccatcctcctgcagtgcctccaagaccacagccctcacaggctcctggtcctgctgtgcatcgcccagtggatgccgatggcctcataactcacactagtacctcacctcagcagataccagagcaaccaaattttgcagatttcagtcagtttgaagtatttgctgcatcaaatgtaaacgacgaacaagatgatgaagccgagaaacatccagaagtcctgccggctgaaaaagcttctgatcctgcaagttctcttcgagttgccaaaacagatagtaaaactgaagaaaagacagctgctagtgctcctgccaatgtgagcaaaggcacaacaccacttgctccaccacctaaacctgttcgaagaagattaaaatcagaagatgaattaaggccagaagttgatgaacatacacaaaagacgggtgtcttagctgctgttcttgcatcacaaccttctattcccagatctgttgggaaagataagaaagctattcaggcatcaattagacgtaataaggaaaccaacaccgttttggccagattgaatagcgaattgcagcaacaattaaaggatgttcttgaggagagaatttccctggaagttcaactggaacaacttcgaccattctctcacctataagccaattgccgttaactgtgaacatacttgtttttaagtggttttgggttcaaagccaatttggagacctagacattcagctcactgcttaactcaacattaaattttatgattctgttttgccctatatgttcaccgttgtatttaagtatcttttattttttaatttcgacaataaaaaggtcaggatggcgttttctggagggtagattgtgtttgttggcacacccaccttttctgttccctagcatctgggatatgcaatgcttctatggctaataccacacaccaatttaatttatagaatgggctcctcatttacatctcagtcacagactcagaaataaattgtcagtttgtccttttatgtttaatattttacataaagcatctattctataaaaatctttagaaagagtttcccatttaattttgattttaaagaattatattggataaggtggttttcaccataagctaatttactctctgcagccgtctacattcttcacaaatcatgtggtacattgaagcctcttttacatgtcaacttgtgacaaatacaaacatgtgagattttaaaaaaaaaaaaaaaaaa

SEQ ID NO: 1870 - protein, 743 aa, Homo sapiens
MELCGATRLGYFGRSQFYIALKLVAVAQSGFPLRVESINTVKDLPLPRFVASKNEQESRHAASYSSDSENQGSYSGVIPPPPGRGQVKKGSVSHDTVQPRTSADAQEPASPVVSPQQSPPTSPHTWRKHSRHPSGGNSERPLAGPGPFWSPFGEAQSGSSAGDAVWSGHSPPPPQENWVSFADTPPTSTLLTMHPASVQDQTTVRTVASATTAIEIRRQSSSYDDPWKITDEQRQYYVNQFKTIQPDLNGFIPGSAAKEFFTKSKLPILELSHIWELSDFDKDGALTLDEFCAAFHLVVARKNGYDLPEKLPESLMPKLIDLEDSADVGDQPGEVGYSGSPAEAPPSKSPSMPSLNQTWPELNQSSEQWETFSERSSSSQTLTQFDSNIAPADPDTAIVHPVPIRMTPSKIHMQEMELKRTGSDHTNPTSPLLVKPSDLLEENKINSSVKFASGNTVDGYSSSDSFTSDPEQIGSNVTRQRSHSGTSPDNTAPPPPPPRPQPSHSRSSSLDMNRTFTVTTGQQQAGVVAHPPAVPPRPQPSQAPGPAVHRPVDADGLITHTSTSPQQIPEQPNFADFSQFEVFAASNVNDEQDDEAEKHPEVLPAEKASDPASSLRVAKTDSKTEEKTAASAPANVSKGTTPLAPPPKPVRRRLKSEDELRPEVDEHTQKTGVLAAVLASQPSIPRSVGKDKKAIQASIRRNKETNTVLARLNSELQQQLKDVLEERISLEVQLEQLRPFSHL

SEQ ID NO: 1871 - DNA, 966 bp, Homo sapiens
atgcactactcggggcccggccccaggaacctgggccggcaggggctgcgcgtggcccggcctcctgctagcttcccgaaaacgccggccccggcctcacacgcgccaggcttgtccctgggagtgtgggcggcccctttcttgagcgcagaaacacttacttttccccctaccctgctcctcctcctccacagccgtctttctctttgcctcagccacttccttccttggcctcaccctccccagtgcactgaagaaggtaaccgggtccagacccacgcggcgccagttctccggcgggaaggaaaaccgcgcagagaggcagcaatgaatgtggatcacgaggttaacctcttagtggaggaaattcatcgtttgggttcaaaaaatgctgatggaaagttaagcgtgaaatttggggtcctcttccgtgatgataaatgtgccaacctctttgaagcattggtaggaactcttaaagctgcaaaacgaaggaagattgtaacatatccaggagagctgcttctgcaaggtgttcatgatgatgttgacattatattactgcaagattaatgtggtttacatatctttatgtactgccattttttgtttctggtaaactggaatataaagtgaaagaacaaacatttgaacatacttaatgtatttttatagaactttgtaaacgaaaggagattcatgttttagaagtctgtccttttttatatcttgaaagaaaatctatgtatgatgctataaaataaatcctattatttttctcaggaatctggttaggaattgcaggcaatgagattttttgcggggcagggatgggaatgtttgttcataaataattagacattttctatagatatttgacattctgcgaaagcaacaagcaaactgaagaccaactcctatgagaaatattatgatgtttatgtaataaagacatgtaactgtctt

SEQ ID NO: 1872 - protein, 190 aa, Homo sapiens
MHYSGPGPRNLGRQGLRVARPPASFPKTPAPASHAPGLSLGVWAAPFLSAETLTFPPTLLLLLHSRLSLCLSHFLPWPHPPQCTEEGNRVQTHAAPVLRREGKPRREAAMNVDHEVNLLVEEIHRLGSKNADGKLSVKFGVLFRDDKCANLFEALVGTLKAAKRRKIVTYPGELLLQGVHDDVDIILLQD

SEQ ID NO: 1873 - DNA, 5621 bp, Homo sapiens
gccttttccctccggctcgggagcgtctcgcttgcgccccgggcccgcggcgcccgcgcggctgcgagcctcgggtggccgcgtgccggctccaggaagccggagagggcgcggcggccaggatggcgcggcacgggccgtgcggctagacgggagccgagggaaccgccggctcgcgccctccgttctttcccggagccggcttcacgcagggccgggaacggccgtgcctctgggatccgccttcgctgacgccgggcacctacctggacgcgagcgagcgagatgcccaaccccaaaaacagcaaaggcggccgcaaaaacaagcgcgccaacagcagcggcgacgagcaggaaaatggagccggggccctggcagcggcgggcgcggcgggagcggcggccgggggggccctggcggcggcggccggttgcggggcggcggcggcgggcgcgccgggcgccggaggcgcggcgggcgccggaggcgcggggactggcgccgcgaacgctgcggccgccgcgggggctgcggccgcgggcgatgccaaaaacgaagccccatgtgccactcccctgatctgcagcttcggtaggccggtggacctggagaaggacgactaccagaaggtggtgtgcaacaacgagcactgcccctgcagcacctggatgcacctgcagtgcttctacgagtgggagagcagcatcctcgtccagttcaactgcatcggccgcgcgcgcagctggaacgagaagcaatgccgccagaacatgtggacaaagaagggctacgacctggccttccgcttctgctcttgccgctgtggccagggccacttgaagaaggacacagactggtatcaggtgaagcggatgcaggacgagaaaaagaagaagtctggctccgagaagaacacagggaggcctcctggtgaggcggcggaggaggcaaaaaagtgcaggcccccaaataagccccagaaaggcccaagccacgacctcccccgccggcattccatggaccggcagaactcccaggagaaggcagtgggtgccgcagcctacggtgcccgttcccccggtggctccccgggccagtccccacccacgggctactccatcctctctcctgcccacttcagcggcccccgctcctccagatacctcggggagttcttaaagaacgccatccatctggagcctcacaagaaggccatggctgggggccatgtgttcagaaatgcccactttgattacagccctgcggggttggcagttcacagggggggacacttcgacacccccgtgcagttccttcggcggctggacctctccgaactcctcactcacatccccaggcataagctgaacactttccacgtgcgcatggaagacgatgcccaagtgggccagggggaagacttgcggaagttcattctggccgcgctcagtgccagccacagaaacgtggtaaactgtgccctgtgccaccgggcgctcccggtgttcgaacagttcccactggtggatggaactttgttcctaagcccgtcgagacatgatgagatcgaatatgatgttccttgtcaccttcaagggagactcatgcatctgtatgccgtgtgcgtggactgcctggaaggggttcacaagatcatctgcatcaagtgtaagtcacggtgggatggcagctggcaccagctgggcactatgtacacctacgacatcctggctgcctctccatgttgtcaggcccgcctgaactgtaagcactgtgggaagccggtgatcgacgtgaggatcgggatgcagtacttctccgaatatagcaacgtccagcagtgtccacactgtgggaacctggactaccacttcgtgaagccattttcctccttcaaagttctcgaagcttattgatgaaagctttgctttagtaatagctattttattgatattattactttattacatatcttttatagggaaacattctgtgacattaatttcctttctaatttaaaggagagttactttgttgtatgtgtgccactaaaataggggctgcccttgccctgtcttgattcccgagtgttaatctgtggttttgaccagagcccagatgggtaatcctgtgcatttgggttggggttcactcttaccaagaatctttgatgcagctttaagatggtggggaggatggggtgaatttaggaaaggaatttgtggttataaactaagagcttgataggagttggaaggaaactcttactaaaatgttaactttctaaaaaccttcttttagatcttccttgggcctttggaaaaatatgtgacaagtgaatgtaagtctgtgcctggagagctaatagtgcattagtctatctcagcctagtgttctgcagcacacatgggcaggcagtttactcacactgacaggtgacctgaaagtggcacaagtgctgtttctatcactattgtaatttgccagttcatttttcatgctgaaagtaatatccaaattgtaagacatatgaaagatattagtgttgcaaatatgtttaggtaaactgacctataacagaatatgtgaaatgaatttggaaataatgcaagaaggcagaactcaatcatttaaattgtgtctttgaagttggtaatatagcttttaaggagaacccatgaataacctgatttgggcagtgatgatttattacaggttgcactgttgaagtgtcatttggtgtcaggttcttctcacaggtaaatctttcagccacagaatctaactggtgagcttcagaaccaataattgccacatttattgtcctcaaaattgcttatggccatgtataaccaattaattctgagtttccaaaatcaaagatttgaccttaagagggaagggaaaaaagtgtgaaaggatgatgaagaaaataattttactatttcttttaaaagtatgttttggaaaatcaatgattttaatgcatagcagtatgtttgaaaaatagaccattctaaaaagcccatgataccttactgttgatgaaaaaggatgatcatatatatagaacttgattagtcagagcattgggcattccaaaatacagcctttggttcagtagattttaatgctttaaatagactgacgtcgcatacccttatagaattggaatatgatttctcaaaaattaatttgataatttcatgtatgatgtgcatatatgctaaaagaatgcagaaaatcattttatgaatagccaaatttggggttgatgtgaacattttatgttactcatttggtttatacttttttttttttttttttaactgtgtggtttttcttttcagaagtatttaggcaatattgcacgtgagtttcagttctttttttcttttttttgagatggagtctcactcttgtcacccaggctggagtgcagtagtgcgatctcagctcactgcaacctctgcctcctggattcaagcgattctcctgtcccagcctcccaggtagctgggactataggcacgtgccaccacacccggctaattttttgtatttttagtagagacagcgtttcaccatgttagctaggatggtctagatctcctgaccttgtgatctgcctgcctcggcctcccaaagtgctgggattacaggcgtgagtcactgtgcctggccaagtttcagttctatatgaagtatttgatgttttgtttgaaacaatacagcattaaagaaccaatgttattcactaatatcattcatctttcagtttggatgatttggtttgctgcatctaggttggtgtttgatcatctgaaaaaacatttcagtgggaagaaatgcataaaatgcctataagaagtagaaagtcattgaactgacagtgtttgatgcaactaaaagaggattgtaagacatagctttctgcaaacttgtctttaatgcacaaagctgtagtggtgaattaactatctccttattgattctctcctgtacccagatgcaaaaagtgctaagtttctcttgtcctcgtaataccatttggattttatttctgaatttaaatagtaaaatatttatgatgctgatctttaacccacctaaaattttatagtgaaacctgctttatattgttgttctgaagcttacaattgacctatacattgcattcagcaagctcctgaatttagaactgccgtcagtgtagtgtatgctgtgttccatgttgcctttttagatggctttctaccccctgaacaataaataggatgaggttttactgtaattgggtaaagtttactcttggacattatttcgatgctaaagtaaggattctgtggatgttacttaaagagaaaagcataagagcatgaagcatatctgggaatatcttttgcctttaagacgattcattcttgtctagagggaaaatctggctgatttgggaataaaatataatcgaatattcaacaccatgaagataaatcttattttggaaatctactgaccttaataccccaagcttgccctgaatactttgattggaattggaatatatcaaaaaaggttagtatttttgttgtagttaggatactaaaaggatattagttacccaagagatccaatttgtttttctgatgaatagtgttcagtaaaatgaagcagtcttaagagtgactaataatttcaaagtgatttttcgtctattcttaatattttttaattatttatttttaagagttttataccttgagcagatacaatgatctgctttagtgagaggacaatttctgattgattgttttctcttcaggccatctcacctcttcattctcttgttacatttgaagcagttgatataatgggtttatactttaaaagatagacatggtgccatgaagttggggagttgggtgaattatcccattctagttacagaggagctttccttaaatgccctttaacttctaggttttgttcaagaagttcattttctgagtaaaaggtattttcatatatgttgggggaaaattaactcatctaaaaagaatcttattaggtatttgaactctaaaactaacagataagacagatatgtaccttattagagcaccagaactaatttgctaagtcttttgtttagtcctgcaagactgatgcttaatacacagtctgttctcctgtgtctaggtcaggaactccagtttgcttttctgttttgtgtcctggtagcagctgttgagtaactttcattggaggttgggaaggaagtgaggagaaagtgttcttgtttagtgttttatttcctataataggatgctgcctaacccagttcatctctatgtcctgttcactgaatattccgggtaattgaaagaaaatataatggatgggctccattaaaaccagctcaaaaataaattcttgtcagtaaagatttcttgtcaagatgtcttggattgcacttttgttgaggaaagacagtgtaaatagttaaagaatgttgataaaattgaaacatttggttgtggaattgtgtgtggttttagagggtttctgtttgtgaaatgtatgtattaaaaataataaaattccagaaactaacattgta

SEQ ID NO: 1874 - protein, 543 aa, Homo sapiens
MPNPKNSKGGRKNKRANSSGDEQENGAGALAAAGAAGAAAGGALAAAAGCGAAAAGAPGAGGAAGAGGAGTGAANAAAAAGAAAAGDAKNEAPCATPLICSFGRPVDLEKDDYQKVVCNNEHCPCSTWMHLQCFYEWESSILVQFNCIGRARSWNEKQCRQNMWTKKGYDLAFRFCSCRCGQGHLKKDTDWYQVKRMQDEKKKKSGSEKNTGRPPGEAAEEAKKCRPPNKPQKGPSHDLPRRHSMDRQNSQEKAVGAAAYGARSPGGSPGQSPPTGYSILSPAHFSGPRSSRYLGEFLKNAIHLEPHKKAMAGGHVFRNAHFDYSPAGLAVHRGGHFDTPVQFLRRLDLSELLTHIPRHKLNTFHVRMEDDAQVGQGEDLRKFILAALSASHRNVVNCALCHRALPVFEQFPLVDGTLFLSPSRHDEIEYDVPCHLQGRLMHLYAVCVDCLEGVHKIICIKCKSRWDGSWHQLGTMYTYDILAASPCCQARLNCKHCGKPVIDVRIGMQYFSEYSNVQQCPHCGNLDYHFVKPFSSFKVLEAY

SEQ ID NO: 1875 - DNA, 8192 bp, Homo sapiens
tatgtttagtcccatatgctcttcctgaatcttgccactgcccatcaagagatagaatacatttcccctccccttgaacatggaagcaaccaagctttaagaagcacagctttggagacactccatgagtctgcactgctttcaggggaactagcacttaagaccttgtgtaacaaaatggacactggggacacagctctaggacaaaaagctacctcaaggtctggagaaactgataaagcatcaggtagatggagacaggaacaatcagctgttattaagatgagcacttttggcagtcatgaaggacagcggcaaccacaaatagagcctgagcaaatcggaaacacagcatcagcacaactgtttggttctgggaaactggcctcccctagtgaagtggtgcagcaagtcgcagagaagcaatatccaccgcatcgtccgagtccttactcatgccaacactcactctctttccctcagcactcattgccacagggggtcatgcacagcaccaagccacatcagagcctcgaaggtcctccgtggcttttccctggccctttgccatccgttgcctctgaggacttatttccttttcctatacatggccacagtggtggttatcctagaaaaaagatttcaagtctgaaccctgcttatagccaatactcccagaaaagtattgaacaggcagaagaggctcacaagaaagagcacaaacccaaaaagcctggcaagtacatttgcccttactgcagcagagcgtgtgccaaacctagtgtactgaaaaaacacatcaggtcccatactggggagcggccatatccatgtataccttgtggtttctctttcaagacaaagagcaatttgtacaagcacaggaagtcacatgcccatgcaattaaggcaggattagtacctttcacagagtcagctgtatctaaattggacctagaggctggttttattgatgtagaagcagaaatacattcagatggtgaacagagtacagacacagatgaggagagttctttatttgccgaggcttctgacaaaatgagtcctggtccacccatcccactggacattgccagcagaggcggctatcatgggtcattggaagaatcattgggaggtccaatgaaggtgccgattttgattatccctaaaagtgggattcctctccctaatgaaagctctcagtatattggccctgatatgctaccaaatccatctttaaatactaaggctgatgattcgcacacagtcaaacagaaacttgcactaagactgtcagagaaaaaaggacaagattctgagccatcgctcaaccttctgagcccgcacagtaaaggaagcactgattctggttacttttctcgctcagaaagtgctgagcagcaaataagccctcccaacacaaatgcaaagtcttatgaagaaatcatctttggaaaatactgtcggcttagtccgagaaatgcactcagtgttacaaccacaagtcaggagcgtgccgcaatgggtaggaagggcataatggaaccattacctcacgttaacaccaggttagatgtcaagatgtttgaagatcctgtttcacagctgatcccaagcaagggagatgtcgaccccagtcaaacgagcatgctgaaatccactaagttcaacagtgagtccagacaaccccagattattccatcatctatcaggaacgaaggaaaactttatccagcaaacttccaaggcagcaacccggttctcttagaagctcctgtagactcttcaccccttattagaagcaactcagtgccaacttcttcagcaactaatctaactattcctccttctttgagaggaagtcactcatttgatgaaaggatgactggttccgacgatgtattctatccagggaccgtgggcataccccctcagcgcatgctaagaagacaagcggcatttgagctgccttcggtacaggagggccacgtggaagtcgagcaccatggcaggatgttgaagggtatcagcagttcatccctgaaggaaaagaaattgtctcctggggacagggttgggtatgactatgatgtctgtcggaaaccctataagaagtgggaggactctgaaacaccaaagcaaaactacagggacatttcctgcttgagttctttaaagcatggtggagaatatttcatggatcccgtggtgccattgcagggagtaccaagcatgtttggaactacctgtgaaaacaggaaacgccggaaagagaagagcgtaggggatgaagaggacacgcccatgatctgcagcagcattgtaagcactcctgtgggcatcatggcttccgattatgaccccaaactgcagatgcaggaaggagtcaggagtggatttgccatggctggacacgaaaacctttctcatggtcacacggaacgctttgacccatgtcggccccaactgcagcctggaagtccatctcttgtgtcagaggagtcaccttcagccattgattcagacaagatgtcagacctagggggcaggaaacctcctggaaatgtgatttctgtgattcagcacaccaactcactgagccgacccaattcatttgaaaggtctgagtcagccgaacttgtggcttgcacacaggataaagccccttccccttcagagacttgtgacagtgagatttcagaagccccagtgagtcctgagtgggctccacctggggatggtgcagaaagtggggggaaaccctctccatctcagcaggtgcagcagcagtcctatcacacacagcccaggctagttcggcaacacaacatccaggttcctgagattcgagtgaccgaggagcctgataaacctgagaaggagaaggaagcccagagcaaagagccagagaagcctgtggaagaatttcagtggccccagagaagtgagaccctttcccagctccccgcggagaagttgcctcccaaaaagaagcgtctgcgacttgcagatatggagcactcctcaggggagtccagctttgaatccacaggcacaggcctctcccgcagccccagccaagaaagcaacttgtcccacagctccagtttctccatgtcttttgaaagagaagaaaccagtaagctttctgcacttcctaagcaggatgagtttgggaagcattcagagtttctgactgtccctgctggttcatactcattgtctgtcccaggccatcaccaccagaaagagatgcgacgctgctcatcagagcagatgccttgtcctcacccagcggaagtcccagaagttcggagcaaatcatttgattatgggaatctgtcccatgctcctgtgtcgggagcagcagcctccacggtatcaccgtccagggagaggaagaaatgctttctggtgcggcaagcttccttcagtggctccccagaaatctcccagggcgaggttggcatggatcagagcgtgaagcaagagcagctggagcacctgcatgctggcctccggtccgggtggcaccatggcccgcctgctgtgctgcctcctcttcagcaagaggacccagggaagcaggtggcgggtccttgtcccccgctgagctcggggccactgcacctggcccagccacagatcatgcacatggacagtcaggaatctttgagaaatcccttgatccaaccaacatcctatatgacaagcaagcacttacctgaacagccacacttatttccacatcaagagacaattccattttctccaatccagaatgccttgtttcagtttcagtatcctacagtttgtatggttcatttaccagctcagcagcctccctggtggcaggcacatttcccacatccctttgctcagcaccctcagaagagctatggcaagccctcttttcagacagaaatccattcgagctatcccttagagcatgtggcagagcacactggaaagaaacctgctgagtatgcacacacgaaagagcagacctacccatgttattcaggagcatcagggctacacccaaagaaccttcttccaaagtttccatcagaccagagcagtaagtcaactgaaacgccctctgagcaggttcttcaagaagattttgcctcggcaaatgctgggtctttgcagtccctcccaggaacagtggttcctgttcggatccagacgcacgtaccatcctatggaagtgtcatgtacacaagcatttctcagatacttgggcagaatagccctgccattgtcatatgcaaagtcgatgagaatatgacccaaaggacactggtcaccaacgcagccatgcaagggataggattcaacattgcccaggtgctggggcagcatgcgggcttggagaagtaccccatttggaaagcacctcagactttgcccctcggcttagaatcctccatccccttgtgtttaccttccacctctgacagcgtggccaccctgggaggtagcaagcgaatgctttctccagccagtagcttggagctcttcatggaaaccaagcagcagaaaagggtcaaagaagaaaagatgtacggacagattgtggaggagcttagtgctgtggagctgaccaactcagacatcaaaaaggacctctcccgcccccagaaaccccagctggttcgacaaggatgtgcttctgagccaaaagatggcttgcagtcagggtcatcttccttctcctcgctgtcgccctcctcatctcaagactatccttctgttagcccgtcttccagggagccattcccgcccagcaaggagatgctttccggttcccgggcaccacttccggggcagaagtccagtgggccttctgaaagcaaagaatcttcagatgaattagatatcgatgagacggcatcggacatgagcatgagcccacagagttcttcattaccagcaggagatggtcagctggaagaggaagggaagggccacaagcggcctgttggcatgctggtccgcatggcctctgcccccagcgggaacgtggcagactcaactcttcttctcacggacatggcagatttccagcagattcttcagttccccagtctgcggacaacaactactgtgagttggtgcttcttgaattatacaaaacccaattatgtgcaacaggccaccttcaaatcctcggtttatgcttcatggtgcattagttcctgtaatccaaacccatcaggattgaacaccaagaccacgctggctcttctgaggtccaagcaaaaaatcactgcagaaatttatactctggctgctatgcataggcctggaaccggcaagcttacatcatcaagtgcttggaagcagtttactcagatgaaacctgatgcgtcctttttatttggcagcaaactagaaaggaaactagtgggaaatatcttaaaggaaagagggaaaggagatattcatggagataaagatattggatccaaacaaactgagccaatccgaattaaaatatttgaaggagggtacaaatcgaatgaagattatgtatatgtcagaggacgtggccggggaaagtacatttgtgaagaatgtgggattcgctgtaagaagccaagcatgctcaaaaaacacatccgtacccatactgatgttcggccttatgtatgcaagttatgtaactttgccttcaaaacgaaaggaaacctaacgaagcatatgaaatctaaagcacacatgaaaaaatgcctggaattgggagtctcaatgacatcggtggatgatacagaaactgaggaagcagaaaatttggaagatttgcacaaagcagcagagaagcatagcatgtccagcatttcaactgatcatcagttctccgatgctgaggaatcagatggtgaggatggagatgataatgatgatgatgatgaagatgaagatgactttgacgaccagggagatttaacaccaaaaacaagatcaagaagcaccagtcctcagcctcctagattctcctccttgcctgtgaatgttggcgccgtaccccacggggttccttcagatagttccctgggacattcttcgttgatcagctatttggttactttgccaagtattcgagttactcagcttatgacacccagtgattcatgtgaagatacccagatgacagaataccagaggctattccagagcaaaagtacggactcagaaccagacaaagacagattggacatacctagttgtatggatgaggagtgcatgctaccttcagagccaagctcctctcccagggacttctcaccctcaagccaccattcctctccaggatatgattcttcaccctgtcgagataattcaccaaagaggtatctgatacccaaaggagatttatctcccaggagacatttatcacctaggagagatctgtcacccatgagacatctttcaccaacaaaggaagctgcattgagaagagagatgtcccaaagagatgtttcaccaagaaggcatttgtctccaaggaggccagtgtctcctgggaaagatatcacagcaagaagagacctctcccctagaagagagagaagatacatgaccacaataagagcgccatctcccagaagggctttataccataacccaccattgtccatgggacagtatttgcaagcagagccaattgtattggggcctcctaatttaagaagaggattacctcaggttccttacttcagtctctatggagaccaagaaggtgcttatgaacatccaggctccagccttttccctgagggtcctaatgactatgtcttcagtcatcttccactccactctcagcaacaagtgcgagcccctatccccatggtgcccgttggtgggatccagatggttcactccatgccgccagccctttccagtttacatccttcacccacattgcccctgccaatggagggctttgaggagaagaaaggcgcgtcaggggagtccttctccaaggacccctatgtgctttctaagcagcatgagaagcgaggtcctcacgctttgcagtcatctggtccgcctagcactccctcctctcctcggctgttgatgaaacagagcacttcggaagacagcctaaacgcaacagagcgggaacaggaggaaaatatacagacttgtacaaaagccattgcctctctccggattgccacggaagaggcagctctgctcgggccagatcagccagcgcgggtgcaggagccccaccagaaccccctgggaagtgcacatgttagcattagacactttagtagacctgagccaggtcagccctgtacctcagccacccaccctgacttgcatgatggtgaaaaggacaattttggtacatcacagactccattagctcactccacgttttacagcaagagttgtgtggatgacaagcagttggactttcacagcagcaaggaattatcttcaagcacagaggaaagcaaagatccttcatcagaaaagagtcagctacattgatctatgatgcatggagactttcatttccacattttcccatttttttgtttttgtttttctagaaatggaggtaatccagtttatagcatgcctgtcctaagttacagtagtttgctattatatatacttttgttatatcaaaagaattaggtaaattaacaagtcatcatgagcctgaccaaaacaaaatttgaaattaacctattgggtctggtacttttaaaattgtacagatgtttgtgccttttctttactttgcttatattcttataagcattttttagcagtaatttgtacatattttagaatttgtgtatctgctttgtaataaatgtaatttctttccttttttggacacttggatctaaatgatgtaaagcaaaacagcatcaatatatatgtgaggttgcactaaaacatatttttatatgattaaaactgaacagcttttatgtacagctctgattctgtaatactaatatttatttactttgtttcataaattgtacattttttcttaatgttgtggattgcttttctatgtgaagcatgggatttactgttgcgtaactagaacaaaaatgtacattgtaaacaagatatttaaactagagtatcttattctgcacttatgcattagttaaaaaaagataaaggatgtatcagtcagttct

SEQ ID NO: 1876 - protein, 2500 aa, Homo sapiens
MLFLNLATAHQEIEYISPPLEHGSNQALRSTALETLHESALLSGELALKTLCNKMDTGDTALGQKATSRSGETDKASGRWRQEQSAVIKMSTFGSHEGQRQPQIEPEQIGNTASAQLFGSGKLASPSEVVQQVAEKQYPPHRPSPYSCQHSLSFPQHSLPQGVMHSTKPHQSLEGPPWLFPGPLPSVASEDLFPFPIHGHSGGYPRKKISSLNPAYSQYSQKSIEQAEEAHKKEHKPKKPGKYICPYCSRACAKPSVLKKHIRSHTGERPYPCIPCGFSFKTKSNLYKHRKSHAHAIKAGLVPFTESAVSKLDLEAGFIDVEAEIHSDGEQSTDTDEESSLFAEASDKMSPGPPIPLDIASRGGYHGSLEESLGGPMKVPILIIPKSGIPLPNESSQYIGPDMLPNPSLNTKADDSHTVKQKLALRLSEKKGQDSEPSLNLLSPHSKGSTDSGYFSRSESAEQQISPPNTNAKSYEEIIFGKYCRLSPRNALSVTTTSQERAAMGRKGIMEPLPHVNTRLDVKMFEDPVSQLIPSKGDVDPSQTSMLKSTKFNSESRQPQIIPSSIRNEGKLYPANFQGSNPVLLEAPVDSSPLIRSNSVPTSSATNLTIPPSLRGSHSFDERMTGSDDVFYPGTVGIPPQRMLRRQAAFELPSVQEGHVEVEHHGRMLKGISSSSLKEKKLSPGDRVGYDYDVCRKPYKKWEDSETPKQNYRDISCLSSLKHGGEYFMDPVVPLQGVPSMFGTTCENRKRRKEKSVGDEEDTPMICSSIVSTPVGIMASDYDPKLQMQEGVRSGFAMAGHENLSHGHTERFDPCRPQLQPGSPSLVSEESPSAIDSDKMSDLGGRKPPGNVISVIQHTNSLSRPNSFERSESAELVACTQDKAPSPSETCDSEISEAPVSPEWAPPGDGAESGGKPSPSQQVQQQSYHTQPRLVRQHNIQVPEIRVTEEPDKPEKEKEAQSKEPEKPVEEFQWPQRSETLSQLPAEKLPPKKKRLRLADMEHSSGESSFESTGTGLSRSPSQESNLSHSSSFSMSFEREETSKLSALPKQDEFGKHSEFLTVPAGSYSLSVPGHHHQKEMRRCSSEQMPCPHPAEVPEVRSKSFDYGNLSHAPVSGAAASTVSPSRERKKCFLVRQASFSGSPEISQGEVGMDQSVKQEQLEHLHAGLRSGWHHGPPAVLPPLQQEDPGKQVAGPCPPLSSGPLHLAQPQIMHMDSQESLRNPLIQPTSYMTSKHLPEQPHLFPHQETIPFSPIQNALFQFQYPTVCMVHLPAQQPPWWQAHFPHPFAQHPQKSYGKPSFQTEIHSSYPLEHVAEHTGKKPAEYAHTKEQTYPCYSGASGLHPKNLLPKFPSDQSSKSTETPSEQVLQEDFASANAGSLQSLPGTVVPVRIQTHVPSYGSVMYTSISQILGQNSPAIVICKVDENMTQRTLVTNAAMQGIGFNIAQVLGQHAGLEKYPIWKAPQTLPLGLESSIPLCLPSTSDSVATLGGSKRMLSPASSLELFMETKQQKRVKEEKMYGQIVEELSAVELTNSDIKKDLSRPQKPQLVRQGCASEPKDGLQSGSSSFSSLSPSSSQDYPSVSPSSREPFPPSKEMLSGSRAPLPGQKSSGPSESKESSDELDIDETASDMSMSPQSSSLPAGDGQLEEEGKGHKRPVGMLVRMASAPSGNVADSTLLLTDMADFQQILQFPSLRTTTTVSWCFLNYTKPNYVQQATFKSSVYASWCISSCNPNPSGLNTKTTLALLRSKQKITAEIYTLAAMHRPGTGKLTSSSAWKQFTQMKPDASFLFGSKLERKLVGNILKERGKGDIHGDKDIGSKQTEPIRIKIFEGGYKSNEDYVYVRGRGRGKYICEECGIRCKKPSMLKKHIRTHTDVRPYVCKLCNFAFKTKGNLTKHMKSKAHMKKCLELGVSMTSVDDTETEEAENLEDLHKAAEKHSMSSISTDHQFSDAEESDGEDGDDNDDDDEDEDDFDDQGDLTPKTRSRSTSPQPPRFSSLPVNVGAVPHGVPSDSSLGHSSLISYLVTLPSIRVTQLMTPSDSCEDTQMTEYQRLFQSKSTDSEPDKDRLDIPSCMDEECMLPSEPSSSPRDFSPSSHHSSPGYDSSPCRDNSPKRYLIPKGDLSPRRHLSPRRDLSPMRHLSPTKEAALRREMSQRDVSPRRHLSPRRPVSPGKDITARRDLSPRRERRYMTTIRAPSPRRALYHNPPLSMGQYLQAEPIVLGPPNLRRGLPQVPYFSLYGDQEGAYEHPGSSLFPEGPNDYVFSHLPLHSQQQVRAPIPMVPVGGIQMVHSMPPALSSLHPSPTLPLPMEGFEEKKGASGESFSKDPYVLSKQHEKRGPHALQSSGPPSTPSSPRLLMKQSTSEDSLNATEREQEENIQTCTKAIASLRIATEEAALLGPDQPARVQEPHQNPLGSAHVSIRHFSRPEPGQPCTSATHPDLHDGEKDNFGTSQTPLAHSTFYSKSCVDDKQLDFHSSKELSSSTEESKDPSSEKSQLH

SEQ ID NO: 1877 - DNA, 4196 bp, Homo sapiens
cggccctcccatgtgcagcccggccagccgggctctcctcctcgcggcggatgggtgaccttttcctggcacgggcaggctgtgggaggcagcggagcaggcgatgaagaagaagcagcagcatcccggcggcggcgcggatccctggccccatggggcccctatggggggcgcccctccgggcctgggcagctggaagcgtcgggtgcccctgctgcctttcctgcgcttctccctccgggactacggcttctgcatggccaccctgctggtcttctgcctgggctccctcctctatcagctcagcgggggaccccctcgcttcctgctcgacctgcggcagtacttgggaaattccacttacttggatgaccatggaccacctcctagtaaggtactacctttcccaagccaggtggtgtacaacagggtaggcaagtgtgggagccgtactgtggtcttgcttctgagaatcttgtcggagaagcacggatttaatttggtcacatcagacattcacaacaaaaccaggcttactaaaaatgaacaaatggaactgattaaaaatataagtactgccgaacaaccctatttattcactcgacatgttcatttcctcaacttctcaaggtttggaggagaccagcctgtctacatcaacatcattagagaccccgtcaaccggttcttatccaactattttttccgtcgctttggagactggagaggggaacaaaatcacatgatccgcacccccagcatgaggcaggaggagcgctacctggatatcaatgagtgtattcttgaaaactatcccgagtgctccaaccccaggttattttacatcattccgtacttttgtggacagcatcccagatgcagggagcctggtgaatgggcccttgagagagcaaagctgaacgtgaatgaaaacttcctgctcgtggggattcttgaagagttggaagatgtgctgctgttactggaaagatttttacctcattacttcaagggcgtgctcagtatctacaaagacccagagcacaggaagcttggaaacatgactgtgacggtgaagaagactgtcccctctcctgaggctgtgcagatcctctaccagcggatgagatacgagtacgagttttaccactacgtcaaagagcagttccacctgctgaagcgcaagtttggacttaagtctcacgtcagcaagccccccctgaggccacacttctttatcccaactccactggaaaccgaggagccaatcgacgatgaagaacaggatgatgaaaagtggctggaagatatttataagaggtgatgtgactgtgttgcctctatggctttatctcccttttccagaaagttctttgtttggggaagtaaaatccttaagggactaaattaatgcttgggtgcattaaaaagaacaaaacattcccacatgttggggtcattgggagatgcccggttttgcgggttttatttgtttaattttattctgtgttttctcttggctctttgggtctttcccgggtacactagatggctccatcccaaggcatcttgtcataaaacagctttcccccaccccatatcatgggaaaagggggagaaatatagcccctagcctaataacttatcatttgtaaaatgacttataaaaatattacctcaatggtaggagacatccagacttgtatatttcagtggaaatacaaaaccacttcagagaccagggtatctcctctggaaggatctaagagaaggtaagacagattaggacatcgaaaaggaggatggagccaggtgccatggcttgagcctataatccgaggctgaggtgggaggatcacttgagcccaggagtttgaggttgcagtgagctgtgatcacaccactgcactccagcctgggtgacagagtgagactctgtctcaattaattttttttttttaaaggaggaggatctccatgggtaagtggtttctacccgcatgggtagagttctgcctctggtccttctcagggggcactttcaccaagagcagtgtaattatctctgaaagagcaagtcagcttgtgccgcatccccaaccaatccacagcctggagtacctttcaaggtcaaagtgcatggccagctccattgagacattccatttcaaagcaccgtgctgacagatatcaaagtactctagcagggaaaataatttgtttgctgtgtaaggaagaatgtagacaagacagataaatctgaaggtcatgtggcatcagggaaagggcatggctgtgtcttttgcacccaatatgaaacatcttctcccaacactgctttaatggaagttctaggaaccaatttagctcaggcatttgactcctacagcagaagttctgagcctgaccacagatggtgtgtaatctatcaaacacacccctggccaagttgggtcctataggacctggtactatgtactattgtaacttctagttccctaagaggtacctgttttcagtaaaaaggggtcctgagttctgtgcaggtggaagagctacccgagaactacctgagttctgtgcaggtagagtcccatttcttatgggacctgtgtgctcctgagaactcttacttgagacatcaaaaagaagcagcaagagcttctgggacagagactgcttggccagctttgtaagtaagtggctgcctccaatgtgatgtgagtacatgttgggcagtctcactgtcctaaggtatgtcttctttccacctcccactgcccctcccctgccacctatcaatgatgccttggttcagtcattagaaatctgttgctttgagttctgaaatattttcaccttaaaaaaaatgctgaaaatacacattctcctgggaagacgataaacagctagctaagaagccgaggttcagtggtggcagcaggaaggacactgccacaaattttgtctatttcatatttgtcccctagagccagccctagcaaatgtgtgagttgggagtagttaatagtaaataagactctgactttacacaagctacacattttatacttttcataaaccacaaagtctctctagaattttttctgccttcactaaaattggactgtagccaagatataaagcaagtcatttggaacctgccgagtgagcactgaagctactttatcatgagatgtgtgttaagaaggctgcagcccacaggagtccagggaaggcggggaccacagaggcacagagtccagcacttggccgctcatgggccttctttctgcctcagaggacgggggcagagaagtgatgaagggaaatgttcttagaggaggaaatatcctttgtcctgttcagagagaccagggccctaccattaggcatactttcagaagcaacctggagaacagctatcaatcatattcaaaaccagtacaagaactgctgcctggtaccctgtgagtcatttctatgaaattccatataaagaatgatgataagtttacacactgtgcaatctcacaatctgaaaataaagttgagttggctgtgttttctctgctcttgtcagaacattgggacaattggtcgttcaaaaacattcatcctcttactgcaagtttatctgggtacttttacctgtgtgttcaaaggcatttcttttcagcagtgatcattataacttcacaaaaaaagatgctgacggatttacttacagggccttaatgttattttgtcccagccaacaccctctaggtcctaaaagtcaaggtacttcagtttatttggcaaacatgacaacatttttttggccctgggcccaacagtttgtacttcatgaaacatattgtacattttacatagtttaatttaaaaaataccttttaagctagttgatctttgactgtcttatttattataacctttcagcacattccaaggttttagttactcaggaaggagttaattaaaatgattttattttggtctgatggatgttttttaaaaggaaaattattattatgaaccttcagcctactttcttgagtgccgtaaaagtgcttgtaaatctttttttttttttaagaagaaagaaaaaaatggtgtttgacgttgatggaaattcaaaaatatatatggaactgaaacattaacttagctaaaataaaagcaatctgtgtttg

SEQ ID NO: 1878 - protein, 406 aa, Homo sapiens
MKKKQQHPGGGADPWPHGAPMGGAPPGLGSWKRRVPLLPFLRFSLRDYGFCMATLLVFCLGSLLYQLSGGPPRFLLDLRQYLGNSTYLDDHGPPPSKVLPFPSQVVYNRVGKCGSRTVVLLLRILSEKHGFNLVTSDIHNKTRLTKNEQMELIKNISTAEQPYLFTRHVHFLNFSRFGGDQPVYINIIRDPVNRFLSNYFFRRFGDWRGEQNHMIRTPSMRQEERYLDINECILENYPECSNPRLFYIIPYFCGQHPRCREPGEWALERAKLNVNENFLLVGILEELEDVLLLLERFLPHYFKGVLSIYKDPEHRKLGNMTVTVKKTVPSPEAVQILYQRMRYEYEFYHYVKEQFHLLKRKFGLKSHVSKPPLRPHFFIPTPLETEEPIDDEEQDDEKWLEDIYKR

SEQ ID NO: 1879 - DNA, 8192 bp, Homo sapiens
cggccgccgccggcacccacagcgccaagagcggcggctccgaggcggctctcaaggagggtggaagcgccgccgcgctgtcctcctcctcctcctcctccgcggcggcagcggcggcatcctcttcctcctcgtcgggcccgggctcggccatggagacggggctgctccccaaccacaaactgaaaaccgttggcgaagcccccgccgcgccgccccaccagcagcaccaccaccaccaccatgcccaccaccaccaccaccatgcccaccacctccaccaccaccacgcactacagcagcagctaaaccagttccagcagcagcagcagcagcagcaacagcagcagcagcagcagcagcaacagcaacatcccatttccaacaacaacagcttgggcggcgcgggcggcggcgcgcctcagcccggccccgacatggagcagccgcaacatggaggcgccaaggacagtgctgcgggcggccaggccgaccccccgggcccgccgctgctgagcaagccgggcgacgaggacgacgcgccgcccaagatgggggagccggcgggcggccgctacgagcacccgggcttgggcgccctgggcacgcagcagccgccggtcgccgtgcccgggggcggcggcggcccggcggccgtcccggagtttaataattactatggcagcgctgcccctgcgagcggcggccccggcggccgcgctgggccttgctttgatcaacatggcggacaacaaagccccgggatggggatgatgcactccgcctccgccgccgccgccggggcccccggcagcatggaccccctgcagaactcccacgaagggtaccccaacagccagtgcaaccattatccgggctacagccggcccggcgcgggcggcggcggcggcggcggcggcggaggaggaggaggcagcggaggaggaggaggaggaggaggagcaggagcaggaggagcaggagcgggagctgtggcggcggcggccgcggcggcggcggcagcagcaggaggcggcggcggcggcggctatgggggctcgtccgcggggtacggggtgctgagctccccccggcagcagggcggcggcatgatgatgggccccgggggcggcggggccgcgagcctcagcaaggcggccgccggctcggcggcggggggcttccagcgcttcgccggccagaaccagcacccgtcgggggccaccccgaccctcaatcagctgctcacctcgcccagccccatgatgcggagctacggcggcagctaccccgagtacagcagccccagcgcgccgccgccgccgccgtcgcagccccagtcccaggcggcggcggcgggggcggcggcgggcggccagcaggcggccgcgggcatgggcttgggcaaggacatgggcgcccagtacgccgctgccagcccggcctgggcggccgcgcaacaaaggagtcacccggcgatgagccccggcacccccggaccgaccatgggcagatcccagggcagcccaatggatccaatggtgatgaagagacctcagttgtatggcatgggcagtaaccctcattctcagcctcagcagagcagtccgtacccaggaggttcctatggccctccaggcccacagcggtatccaattggcatccagggtcggactcccggggccatggccggaatgcagtaccctcagcagcagatgccacctcagtatggacagcaaggtgtgagtggttactgccagcagggccaacagccatattacagccagcagccgcagcccccgcacctcccaccccaggcgcagtatctgccgtcccagtcccagcagaggtaccagccgcagcaggacatgtctcaggaaggctatggaactagatctcaacctcctctggcccccggaaaacctaaccatgaagacttgaacttaatacagcaagaaagaccatcaagtttaccagatctgtctggctccattgatgacctccccacgggaacggaagcaactttgagctcagcagtcagtgcatccgggtccacgagcagccaaggggatcagagcaacccggcgcagtcgcctttctccccacatgcgtcccctcatctctccagcatcccggggggcccatctccctctcctgttggctctcctgtaggaagcaaccagtctcgatctggcccaatctctcctgcaagtatcccaggtagtcagatgcctccgcagccacccgggagccagtcagaatccagttcccatcccgccttgagccagtcaccaatgccacaggaaagaggttttatggcaggcacacaaagaaaccctcagatggctcagtatggacctcaacagacaggaccatccatgtcgcctcatccttctcctgggggccagatgcatgctggaatcagtagctttcagcagagtaactcaagtgggacttacggtccacagatgagccagtatggaccacaaggtaactactccagacccccagcgtatagtggggtgcccagtgcaagctacagcggcccagggcccggtatgggtatcagtgccaacaaccagatgcatggacaagggccaagccagccatgtggtgctgtgcccctgggacgaatgccatcagctgggatgcagaacagaccatttcctggaaatatgagcagcatgacccccagttctcctggcatgtctcagcagggagggccaggaatggggccgccaatgccaactgtgaaccgtaaggcacaggaggcagccgcagcagtgatgcaggctgctgcgaactcagcacaaagcaggcaaggcagtttccccggcatgaaccagagtggacttatggcttccagctctccctacagccagcccatgaacaacagctctagcctgatgaacacgcaggcgccgccctacagcatggcgcccgccatggtgaacagctcggcagcatctgtgggtcttgcagatatgatgtctcctggtgaatccaaactgcccctgcctctcaaagcagacggcaaagaagaaggcactccacagcccgagagcaagtcaaaggatagctacagctctcagggtatttctcagcccccaaccccaggcaacctgccagtcccttccccaatgtcccccagctctgctagcatctcctcatttcatggagatgaaagtgatagcattagcagcccaggctggccaaagactccatcaagccctaagtccagctcctccaccactactggggagaagatcacgaaggtgtacgagctggggaatgagccagagagaaagctctgggtcgaccgatacctcaccttcatggaagagagaggctctcctgtctcaagtctgcctgccgtgggcaagaagcccctggacctgttccgactctacgtctgcgtcaaagagatcgggggtttggcccaggttaataaaaacaagaagtggcgtgagctggcaaccaacctaaacgttggcacctcaagcagtgcagcgagctccctgaaaaagcagtatattcagtacctgtttgcctttgagtgcaagatcgaacgtggggaggagcccccgccggaagtcttcagcaccggggacaccaaaaagcagcccaagctccagccgccatctcctgctaactcgggatccttgcaaggcccacagaccccccagtcaactggcagcaattccatggcagaggttccaggtgacctgaagccacctaccccagcctccacccctcacggccagatgactccaatgcaaggtggaagaagcagtacaatcagtgtgcacgacccattctcagatgtgagtgattcatccttcccgaaacggaactccatgactccaaacgccccctaccagcagggcatgagcatgcccgatgtgatgggcaggatgccctatgagcccaacaaggacccctttgggggaatgagaaaagtgcctggaagcagcgagccctttatgacgcaaggacagatgcccaacagcagcatgcaggacatgtacaaccaaagtccctccggagcaatgtctaacctgggcatggggcagcgccagcagtttccctatggagccagttacgaccgaaggcatgaaccttatgggcagcagtatccaggccaaggccctccctcgggacagccgccgtatggagggcaccagcccggcctgtacccacagcagccgaattacaaacgccatatggacggcatgtacgggcccccagccaagcgccacgagggcgacatgtacaacatgcagtacagcagccagcagcaggagatgtacaaccagtatggaggctcctactcgggcccggaccgcaggcccatccagggccagtacccgtatccctacagcagggagaggatgcagggcccggggcagatccagacacacggaatcccgcctcagatgatgggcggcccgctgcagtcgtcctccagtgaggggcctcagcagaatatgtgggcagcacgcaatgatatgccttatccctaccagaacaggcagggccctggcggccctacacaggcgcccccttacccaggcatgaaccgcacagacgatatgatggtacccgatcagaggataaatcatgagagccagtggccttctcacgtcagccagcgtcagccttatatgtcgtcctcagcctccatgcagcccatcacacgcccaccacagccgtcctaccagacgccaccgtcactgccaaatcacatctccagggcgcccagcccagcgtccttccagcgctccctggagaaccgcatgtctccaagcaagtctccttttctgccgtctatgaagatgcagaaggtcatgcccacggtccccacatcccaggtcaccgggccaccaccccaaccacccccaatcagaagggagatcacctttcctcctggctcagtagaagcatcacaaccagtcttgaaacaaaggcgaaagattacctccaaagatatcgttactcctgaggcgtggcgtgtgatgatgtcccttaaatcaggtcttttggctgagagtacgtgggctttggacactattaatattcttctgtatgatgacagcactgttgctactttcaatctctcccagttgtctggatttctcgaacttttagtcgagtactttagaaaatgcctgattgacatttttggaattcttatggaatatgaagtgggagaccccagccaaaaagcacttgatcacaacgcagcaaggaaggatgacagccagtccttggcagacgattctgggaaagaggaggaagatgctgaatgtattgatgacgacgaggaagacgaggaggatgaggaggaagacagcgagaagacagaaagcgatgaaaagagcagcatcgctctgactgccccggacgccgctgcagacccaaaggagaagcccaagcaagccagtaagttcgacaagctgccaataaagatagtcaaaaagaacaacctgtttgttgttgaccgatctgacaagttggggcgtgtgcaggagttcaatagtggccttctgcactggcagctcggcgggggtgacaccaccgagcacattcagactcactttgagagcaagatggaaattcctcctcgcaggcgcccacctccccccttaagctccgcaggtagaaagaaagagcaagaaggcaaaggcgactctgaagagcagcaagagaaaagcatcatagcaaccatcgatgacgtcctctctgctcggccaggggcattgcctgaagacgcaaaccctgggccccagaccgaaagcagtaagtttccctttggtatccagcaagccaaaagtcaccggaacatcaagctgctggaggacgagcccaggagccgagacgagactcctctgtgtaccatcgcgcactggcaggactcgctggctaagcgatgcatctgtgtgtccaatattgtccgtagcttgtcattcgtgcctggcaatgatgccgaaatgtccaaacatccaggcctggtgctgatcctggggaagctgattcttcttcaccacgagcatccagagagaaagcgagcaccgcagacctatgagaaagaggaggatgaggacaagggggtggcctgcagcaaagatgagtggtggtgggactgcctcgaggtcttgagggataacacgttggtcacgttggccaacatttccgggcagctagacttgtctgcttacacggaaagcatctgcttgccaattttggatggcttgctgcactggatggtgtgcccgtctgcagaggcacaagatccctttccaactgtgggacccaactcggtcctgtcgcctcagagacttgtgctggagaccctctgtaaactcagtatccaggacaataatgtggacctgatcttggccactcctccatttagtcgtcaggagaaattctatgctacattagttaggtacgttggggatcgcaaaaacccagtctgtcgagaaatgtccatggcgcttttatcgaaccttgcccaaggggacgcactagcagcaagggccatagctgtgcagaaaggaagcattggaaacttgataagcttcctagaggatggggtcacgatggcccagtaccagcagagccagcacaacctcatgcacatgcagcccccgcccctggaaccacctagcgtagacatgatgtgcagggcggccaaggctttgctagccatggccagagtggacgaaaaccgctcggaattccttttgcacgagggccggttgctggatatctcgatatcagctgtcctgaactctctggttgcatctgtcatctgtgatgtactgtttcagattgggcagttatgacataagtgagaaggcaagcatgtgtgagtgaagattagagggtcacatataactggctgttttctgttcttgtttatccagcgtaggaagaaggaaaagaaaatctttgctcctctgccccattcactatttaccaattgggaattaaagaaataattaatttgaacagttatgaaattaatatttgctgtctgtgtgtataagtacatcctttggggttttttttttctcttttttttaaccaaagttgctgtctagtgcattcaaaggtcactttttgttcttcacagatctttttaatgttctttcccatgttgtattgcatttttgggggaagcaaattgactttaaagaaaaaagttgtggcaaaagatgctaagatgcgaaaatttcaccacactgagtcaaaaaggtgaaaaattatccatttcctatgcgttttactcctcagagaatgaaaaaaactgcatcccatcacccaaagttctgtgcaatagaaatttctacagatacaggtataggggctcaaggaggtatgtcggtcagtagtcaaaactatgaaatgatactggtttctccacaggaatatggttccattaggctgggagcaaaaacaatgttttttaagattgagaatacatacctgacaacgatccggaaactgctcctcaccactcccgtcatgcctgctgtcggcgtttgaccttccacgtgacagttcttcacaattcctttcatcattttttaaatattttttttactgcctatgggctgtgatgtatatagaagttgtacattaaacataccctcatttttttcttttcttttttttttttttttttagtacaaagttttagtttctttttcatgatgtggtaactacgaagtgatggtagatttaaataattttttatttttattttatatattttttcattagggccatatctccaaaaaaagaaagaaaaaatacaaaaaacaaaaacaaaaaaaaaagagggtaatgtacaagtttctgtatgtataaagtcatgctcgatttcaggagagcagctgatcacaatttgcttcatgaatcaaggtgtggaaatggttatatatggattgatttagaaaatggttaccagtacagtcaaaaaagagaaaatgaaaaaaatacaactaaaaggaagaaacacaacttcaaagatttttcagtgatgagaatccacatttgtatttcaagataatgtagtttaaaaaaaaaaaaaagaaaaaaacttgatgtaaattcctccttttcctctggcttaatgaatatcatttattcagtataaaatctttatatgttccacatgttaagaa

SEQ ID NO: 1880 - protein, 2231 aa, Homo sapiens
METGLLPNHKLKTVGEAPAAPPHQQHHHHHHAHHHHHHAHHLHHHHALQQQLNQFQQQQQQQQQQQQQQQQQQHPISNNNSLGGAGGGAPQPGPDMEQPQHGGAKDSAAGGQADPPGPPLLSKPGDEDDAPPKMGEPAGGRYEHPGLGALGTQQPPVAVPGGGGGPAAVPEFNNYYGSAAPASGGPGGRAGPCFDQHGGQQSPGMGMMHSASAAAAGAPGSMDPLQNSHEGYPNSQCNHYPGYSRPGAGGGGGGGGGGGGGSGGGGGGGGAGAGGAGAGAVAAAAAAAAAAAGGGGGGGYGGSSAGYGVLSSPRQQGGGMMMGPGGGGAASLSKAAAGSAAGGFQRFAGQNQHPSGATPTLNQLLTSPSPMMRSYGGSYPEYSSPSAPPPPPSQPQSQAAAAGAAAGGQQAAAGMGLGKDMGAQYAAASPAWAAAQQRSHPAMSPGTPGPTMGRSQGSPMDPMVMKRPQLYGMGSNPHSQPQQSSPYPGGSYGPPGPQRYPIGIQGRTPGAMAGMQYPQQQMPPQYGQQGVSGYCQQGQQPYYSQQPQPPHLPPQAQYLPSQSQQRYQPQQDMSQEGYGTRSQPPLAPGKPNHEDLNLIQQERPSSLPDLSGSIDDLPTGTEATLSSAVSASGSTSSQGDQSNPAQSPFSPHASPHLSSIPGGPSPSPVGSPVGSNQSRSGPISPASIPGSQMPPQPPGSQSESSSHPALSQSPMPQERGFMAGTQRNPQMAQYGPQQTGPSMSPHPSPGGQMHAGISSFQQSNSSGTYGPQMSQYGPQGNYSRPPAYSGVPSASYSGPGPGMGISANNQMHGQGPSQPCGAVPLGRMPSAGMQNRPFPGNMSSMTPSSPGMSQQGGPGMGPPMPTVNRKAQEAAAAVMQAAANSAQSRQGSFPGMNQSGLMASSSPYSQPMNNSSSLMNTQAPPYSMAPAMVNSSAASVGLADMMSPGESKLPLPLKADGKEEGTPQPESKSKDSYSSQGISQPPTPGNLPVPSPMSPSSASISSFHGDESDSISSPGWPKTPSSPKSSSSTTTGEKITKVYELGNEPERKLWVDRYLTFMEERGSPVSSLPAVGKKPLDLFRLYVCVKEIGGLAQVNKNKKWRELATNLNVGTSSSAASSLKKQYIQYLFAFECKIERGEEPPPEVFSTGDTKKQPKLQPPSPANSGSLQGPQTPQSTGSNSMAEVPGDLKPPTPASTPHGQMTPMQGGRSSTISVHDPFSDVSDSSFPKRNSMTPNAPYQQGMSMPDVMGRMPYEPNKDPFGGMRKVPGSSEPFMTQGQMPNSSMQDMYNQSPSGAMSNLGMGQRQQFPYGASYDRRHEPYGQQYPGQGPPSGQPPYGGHQPGLYPQQPNYKRHMDGMYGPPAKRHEGDMYNMQYSSQQQEMYNQYGGSYSGPDRRPIQGQYPYPYSRERMQGPGQIQTHGIPPQMMGGPLQSSSSEGPQQNMWAARNDMPYPYQNRQGPGGPTQAPPYPGMNRTDDMMVPDQRINHESQWPSHVSQRQPYMSSSASMQPITRPPQPSYQTPPSLPNHISRAPSPASFQRSLENRMSPSKSPFLPSMKMQKVMPTVPTSQVTGPPPQPPPIRREITFPPGSVEASQPVLKQRRKITSKDIVTPEAWRVMMSLKSGLLAESTWALDTINILLYDDSTVATFNLSQLSGFLELLVEYFRKCLIDIFGILMEYEVGDPSQKALDHNAARKDDSQSLADDSGKEEEDAECIDDDEEDEEDEEEDSEKTESDEKSSIALTAPDAAADPKEKPKQASKFDKLPIKIVKKNNLFVVDRSDKLGRVQEFNSGLLHWQLGGGDTTEHIQTHFESKMEIPPRRRPPPPLSSAGRKKEQEGKGDSEEQQEKSIIATIDDVLSARPGALPEDANPGPQTESSKFPFGIQQAKSHRNIKLLEDEPRSRDETPLCTIAHWQDSLAKRCICVSNIVRSLSFVPGNDAEMSKHPGLVLILGKLILLHHEHPERKRAPQTYEKEEDEDKGVACSKDEWWWDCLEVLRDNTLVTLANISGQLDLSAYTESICLPILDGLLHWMVCPSAEAQDPFPTVGPNSVLSPQRLVLETLCKLSIQDNNVDLILATPPFSRQEKFYATLVRYVGDRKNPVCREMSMALLSNLAQGDALAARAIAVQKGSIGNLISFLEDGVTMAQYQQSQHNLMHMQPPPLEPPSVDMMCRAAKALLAMARVDENRSEFLLHEGRLLDISISAVLNSLVASVICDVLFQIGQL

SEQ ID NO: 1881 - DNA, 8126 bp, Homo sapiens
cggccgccgccggcacccacagcgccaagagcggcggctccgaggcggctctcaaggagggtggaagcgccgccgcgctgtcctcctcctcctcctcctccgcggcggcagcggcggcatcctcttcctcctcgtcgggcccgggctcggccatggagacggggctgctccccaaccacaaactgaaaaccgttggcgaagcccccgccgcgccgccccaccagcagcaccaccaccaccaccatgcccaccaccaccaccaccatgcccaccacctccaccaccaccacgcactacagcagcagctaaaccagttccagcagcagcagcagcagcagcaacagcagcagcagcagcagcagcaacagcaacatcccatttccaacaacaacagcttgggcggcgcgggcggcggcgcgcctcagcccggccccgacatggagcagccgcaacatggaggcgccaaggacagtgctgcgggcggccaggccgaccccccgggcccgccgctgctgagcaagccgggcgacgaggacgacgcgccgcccaagatgggggagccggcgggcggccgctacgagcacccgggcttgggcgccctgggcacgcagcagccgccggtcgccgtgcccgggggcggcggcggcccggcggccgtcccggagtttaataattactatggcagcgctgcccctgcgagcggcggccccggcggccgcgctgggccttgctttgatcaacatggcggacaacaaagccccgggatggggatgatgcactccgcctccgccgccgccgccggggcccccggcagcatggaccccctgcagaactcccacgaagggtaccccaacagccagtgcaaccattatccgggctacagccggcccggcgcgggcggcggcggcggcggcggcggcggaggaggaggaggcagcggaggaggaggaggaggaggaggagcaggagcaggaggagcaggagcgggagctgtggcggcggcggccgcggcggcggcggcagcagcaggaggcggcggcggcggcggctatgggggctcgtccgcggggtacggggtgctgagctccccccggcagcagggcggcggcatgatgatgggccccgggggcggcggggccgcgagcctcagcaaggcggccgccggctcggcggcggggggcttccagcgcttcgccggccagaaccagcacccgtcgggggccaccccgaccctcaatcagctgctcacctcgcccagccccatgatgcggagctacggcggcagctaccccgagtacagcagccccagcgcgccgccgccgccgccgtcgcagccccagtcccaggcggcggcggcgggggcggcggcgggcggccagcaggcggccgcgggcatgggcttgggcaaggacatgggcgcccagtacgccgctgccagcccggcctgggcggccgcgcaacaaaggagtcacccggcgatgagccccggcacccccggaccgaccatgggcagatcccagggcagcccaatggatccaatggtgatgaagagacctcagttgtatggcatgggcagtaaccctcattctcagcctcagcagagcagtccgtacccaggaggttcctatggccctccaggcccacagcggtatccaattggcatccagggtcggactcccggggccatggccggaatgcagtaccctcagcagcaggactctggagatgccacatggaaagaaacattctggttgatgccacctcagtatggacagcaaggtgtgagtggttactgccagcagggccaacagccatattacagccagcagccgcagcccccgcacctcccaccccaggcgcagtatctgccgtcccagtcccagcagaggtaccagccgcagcaggacatgtctcaggaaggctatggaactagatctcaacctcctctggcccccggaaaacctaaccatgaagacttgaacttaatacagcaagaaagaccatcaagtttaccagatctgtctggctccattgatgacctccccacgggaacggaagcaactttgagctcagcagtcagtgcatccgggtccacgagcagccaaggggatcagagcaacccggcgcagtcgcctttctccccacatgcgtcccctcatctctccagcatcccggggggcccatctccctctcctgttggctctcctgtaggaagcaaccagtctcgatctggcccaatctctcctgcaagtatcccaggtagtcagatgcctccgcagccacccgggagccagtcagaatccagttcccatcccgccttgagccagtcaccaatgccacaggaaagaggttttatggcaggcacacaaagaaaccctcagatggctcagtatggacctcaacagacaggaccatccatgtcgcctcatccttctcctgggggccagatgcatgctggaatcagtagctttcagcagagtaactcaagtgggacttacggtccacagatgagccagtatggaccacaaggtaactactccagacccccagcgtatagtggggtgcccagtgcaagctacagcggcccagggcccggtatgggtatcagtgccaacaaccagatgcatggacaagggccaagccagccatgtggtgctgtgcccctgggacgaatgccatcagctgggatgcagaacagaccatttcctggaaatatgagcagcatgacccccagttctcctggcatgtctcagcagggagggccaggaatggggccgccaatgccaactgtgaaccgtaaggcacaggaggcagccgcagcagtgatgcaggctgctgcgaactcagcacaaagcaggcaaggcagtttccccggcatgaaccagagtggacttatggcttccagctctccctacagccagcccatgaacaacagctctagcctgatgaacacgcaggcgccgccctacagcatggcgcccgccatggtgaacagctcggcagcatctgtgggtcttgcagatatgatgtctcctggtgaatccaaactgcccctgcctctcaaagcagacggcaaagaagaaggcactccacagcccgagagcaagtcaaagaagtccagctcctccaccactactggggagaagatcacgaaggtgtacgagctggggaatgagccagagagaaagctctgggtcgaccgatacctcaccttcatggaagagagaggctctcctgtctcaagtctgcctgccgtgggcaagaagcccctggacctgttccgactctacgtctgcgtcaaagagatcgggggtttggcccaggttaataaaaacaagaagtggcgtgagctggcaaccaacctaaacgttggcacctcaagcagtgcagcgagctccctgaaaaagcagtatattcagtacctgtttgcctttgagtgcaagatcgaacgtggggaggagcccccgccggaagtcttcagcaccggggacaccaaaaagcagcccaagctccagccgccatctcctgctaactcgggatccttgcaaggcccacagaccccccagtcaactggcagcaattccatggcagaggttccaggtgacctgaagccacctaccccagcctccacccctcacggccagatgactccaatgcaaggtggaagaagcagtacaatcagtgtgcacgacccattctcagatgtgagtgattcatccttcccgaaacggaactccatgactccaaacgccccctaccagcagggcatgagcatgcccgatgtgatgggcaggatgccctatgagcccaacaaggacccctttgggggaatgagaaaagtgcctggaagcagcgagccctttatgacgcaaggacagatgcccaacagcagcatgcaggacatgtacaaccaaagtccctccggagcaatgtctaacctgggcatggggcagcgccagcagtttccctatggagccagttacgaccgaaggcatgaaccttatgggcagcagtatccaggccaaggccctccctcgggacagccgccgtatggagggcaccagcccggcctgtacccacagcagccgaattacaaacgccatatggacggcatgtacgggcccccagccaagcgccacgagggcgacatgtacaacatgcagtacagcagccagcagcaggagatgtacaaccagtatggaggctcctactcgggcccggaccgcaggcccatccagggccagtacccgtatccctacagcagggagaggatgcagggcccggggcagatccagacacacggaatcccgcctcagatgatgggcggcccgctgcagtcgtcctccagtgaggggcctcagcagaatatgtgggcagcacgcaatgatatgccttatccctaccagaacaggcagggccctggcggccctacacaggcgcccccttacccaggcatgaaccgcacagacgatatgatggtacccgatcagaggataaatcatgagagccagtggccttctcacgtcagccagcgtcagccttatatgtcgtcctcagcctccatgcagcccatcacacgcccaccacagccgtcctaccagacgccaccgtcactgccaaatcacatctccagggcgcccagcccagcgtccttccagcgctccctggagaaccgcatgtctccaagcaagtctccttttctgccgtctatgaagatgcagaaggtcatgcccacggtccccacatcccaggtcaccgggccaccaccccaaccacccccaatcagaagggagatcacctttcctcctggctcagtagaagcatcacaaccagtcttgaaacaaaggcgaaagattacctccaaagatatcgttactcctgaggcgtggcgtgtgatgatgtcccttaaatcaggtcttttggctgagagtacgtgggctttggacactattaatattcttctgtatgatgacagcactgttgctactttcaatctctcccagttgtctggatttctcgaacttttagtcgagtactttagaaaatgcctgattgacatttttggaattcttatggaatatgaagtgggagaccccagccaaaaagcacttgatcacaacgcagcaaggaaggatgacagccagtccttggcagacgattctgggaaagaggaggaagatgctgaatgtattgatgacgacgaggaagacgaggaggatgaggaggaagacagcgagaagacagaaagcgatgaaaagagcagcatcgctctgactgccccggacgccgctgcagacccaaaggagaagcccaagcaagccagtaagttcgacaagctgccaataaagatagtcaaaaagaacaacctgtttgttgttgaccgatctgacaagttggggcgtgtgcaggagttcaatagtggccttctgcactggcagctcggcgggggtgacaccaccgagcacattcagactcactttgagagcaagatggaaattcctcctcgcaggcgcccacctccccccttaagctccgcaggtagaaagaaagagcaagaaggcaaaggcgactctgaagagcagcaagagaaaagcatcatagcaaccatcgatgacgtcctctctgctcggccaggggcattgcctgaagacgcaaaccctgggccccagaccgaaagcagtaagtttccctttggtatccagcaagccaaaagtcaccggaacatcaagctgctggaggacgagcccaggagccgagacgagactcctctgtgtaccatcgcgcactggcaggactcgctggctaagcgatgcatctgtgtgtccaatattgtccgtagcttgtcattcgtgcctggcaatgatgccgaaatgtccaaacatccaggcctggtgctgatcctggggaagctgattcttcttcaccacgagcatccagagagaaagcgagcaccgcagacctatgagaaagaggaggatgaggacaagggggtggcctgcagcaaagatgagtggtggtgggactgcctcgaggtcttgagggataacacgttggtcacgttggccaacatttccgggcagctagacttgtctgcttacacggaaagcatctgcttgccaattttggatggcttgctgcactggatggtgtgcccgtctgcagaggcacaagatccctttccaactgtgggacccaactcggtcctgtcgcctcagagacttgtgctggagaccctctgtaaactcagtatccaggacaataatgtggacctgatcttggccactcctccatttagtcgtcaggagaaattctatgctacattagttaggtacgttggggatcgcaaaaacccagtctgtcgagaaatgtccatggcgcttttatcgaaccttgcccaaggggacgcactagcagcaagggccatagctgtgcagaaaggaagcattggaaacttgataagcttcctagaggatggggtcacgatggcccagtaccagcagagccagcacaacctcatgcacatgcagcccccgcccctggaaccacctagcgtagacatgatgtgcagggcggccaaggctttgctagccatggccagagtggacgaaaaccgctcggaattccttttgcacgagggccggttgctggatatctcgatatcagctgtcctgaactctctggttgcatctgtcatctgtgatgtactgtttcagattgggcagttatgacataagtgagaaggcaagcatgtgtgagtgaagattagagggtcacatataactggctgttttctgttcttgtttatccagcgtaggaagaaggaaaagaaaatctttgctcctctgccccattcactatttaccaattgggaattaaagaaataattaatttgaacagttatgaaattaatatttgctgtctgtgtgtataagtacatcctttggggttttttttttctcttttttttaaccaaagttgctgtctagtgcattcaaaggtcactttttgttcttcacagatctttttaatgttctttcccatgttgtattgcatttttgggggaagcaaattgactttaaagaaaaaagttgtggcaaaagatgctaagatgcgaaaatttcaccacactgagtcaaaaaggtgaaaaattatccatttcctatgcgttttactcctcagagaatgaaaaaaactgcatcccatcacccaaagttctgtgcaatagaaatttctacagatacaggtataggggctcaaggaggtatgtcggtcagtagtcaaaactatgaaatgatactggtttctccacaggaatatggttccattaggctgggagcaaaaacaatgttttttaagattgagaatacatacctgacaacgatccggaaactgctcctcaccactcccgtcatgcctgctgtcggcgtttgaccttccacgtgacagttcttcacaattcctttcatcattttttaaatattttttttactgcctatgggctgtgatgtatatagaagttgtacattaaacataccctcatttttttcttttcttttttttttttttttttagtacaaagttttagtttctttttcatgatgtggtaactacgaagtgatggtagatttaaataattttttatttttattttatatattttttcattagggccatatctccaaaaaaagaaagaaaaaatacaaaaaacaaaaacaaaaaaaaaagagggtaatgtacaagtttctgtatgtataaagtcatgctcgatttcaggagagcagctgatcacaatttgcttcatgaatcaaggtgtggaaatggttatatatggattgatttagaaaatggttaccagtacagtcaaaaaagagaaaatgaaaaaaatacaactaaaaggaagaaacacaacttcaaagatttttcagtgatgagaatccacatttgtatttcaagataatgtagtttaaaaaaaaaaaaaagaaaaaaacttgatgtaaattcctccttttcctctggcttaatgaatatcatttattcagtataaaatctttatatgttccacatgttaagaataaatgtacattaaatcttgttaagcactgtgaaaaaaaaaaaaaaaaaaaaaa

SEQ ID NO: 1882 - protein, 2191 aa, Homo sapiens
METGLLPNHKLKTVGEAPAAPPHQQHHHHHHAHHHHHHAHHLHHHHALQQQLNQFQQQQQQQQQQQQQQQQQQHPISNNNSLGGAGGGAPQPGPDMEQPQHGGAKDSAAGGQADPPGPPLLSKPGDEDDAPPKMGEPAGGRYEHPGLGALGTQQPPVAVPGGGGGPAAVPEFNNYYGSAAPASGGPGGRAGPCFDQHGGQQSPGMGMMHSASAAAAGAPGSMDPLQNSHEGYPNSQCNHYPGYSRPGAGGGGGGGGGGGGGSGGGGGGGGAGAGGAGAGAVAAAAAAAAAAAGGGGGGGYGGSSAGYGVLSSPRQQGGGMMMGPGGGGAASLSKAAAGSAAGGFQRFAGQNQHPSGATPTLNQLLTSPSPMMRSYGGSYPEYSSPSAPPPPPSQPQSQAAAAGAAAGGQQAAAGMGLGKDMGAQYAAASPAWAAAQQRSHPAMSPGTPGPTMGRSQGSPMDPMVMKRPQLYGMGSNPHSQPQQSSPYPGGSYGPPGPQRYPIGIQGRTPGAMAGMQYPQQQDSGDATWKETFWLMPPQYGQQGVSGYCQQGQQPYYSQQPQPPHLPPQAQYLPSQSQQRYQPQQDMSQEGYGTRSQPPLAPGKPNHEDLNLIQQERPSSLPDLSGSIDDLPTGTEATLSSAVSASGSTSSQGDQSNPAQSPFSPHASPHLSSIPGGPSPSPVGSPVGSNQSRSGPISPASIPGSQMPPQPPGSQSESSSHPALSQSPMPQERGFMAGTQRNPQMAQYGPQQTGPSMSPHPSPGGQMHAGISSFQQSNSSGTYGPQMSQYGPQGNYSRPPAYSGVPSASYSGPGPGMGISANNQMHGQGPSQPCGAVPLGRMPSAGMQNRPFPGNMSSMTPSSPGMSQQGGPGMGPPMPTVNRKAQEAAAAVMQAAANSAQSRQGSFPGMNQSGLMASSSPYSQPMNNSSSLMNTQAPPYSMAPAMVNSSAASVGLADMMSPGESKLPLPLKADGKEEGTPQPESKSKKSSSSTTTGEKITKVYELGNEPERKLWVDRYLTFMEERGSPVSSLPAVGKKPLDLFRLYVCVKEIGGLAQVNKNKKWRELATNLNVGTSSSAASSLKKQYIQYLFAFECKIERGEEPPPEVFSTGDTKKQPKLQPPSPANSGSLQGPQTPQSTGSNSMAEVPGDLKPPTPASTPHGQMTPMQGGRSSTISVHDPFSDVSDSSFPKRNSMTPNAPYQQGMSMPDVMGRMPYEPNKDPFGGMRKVPGSSEPFMTQGQMPNSSMQDMYNQSPSGAMSNLGMGQRQQFPYGASYDRRHEPYGQQYPGQGPPSGQPPYGGHQPGLYPQQPNYKRHMDGMYGPPAKRHEGDMYNMQYSSQQQEMYNQYGGSYSGPDRRPIQGQYPYPYSRERMQGPGQIQTHGIPPQMMGGPLQSSSSEGPQQNMWAARNDMPYPYQNRQGPGGPTQAPPYPGMNRTDDMMVPDQRINHESQWPSHVSQRQPYMSSSASMQPITRPPQPSYQTPPSLPNHISRAPSPASFQRSLENRMSPSKSPFLPSMKMQKVMPTVPTSQVTGPPPQPPPIRREITFPPGSVEASQPVLKQRRKITSKDIVTPEAWRVMMSLKSGLLAESTWALDTINILLYDDSTVATFNLSQLSGFLELLVEYFRKCLIDIFGILMEYEVGDPSQKALDHNAARKDDSQSLADDSGKEEEDAECIDDDEEDEEDEEEDSEKTESDEKSSIALTAPDAAADPKEKPKQASKFDKLPIKIVKKNNLFVVDRSDKLGRVQEFNSGLLHWQLGGGDTTEHIQTHFESKMEIPPRRRPPPPLSSAGRKKEQEGKGDSEEQQEKSIIATIDDVLSARPGALPEDANPGPQTESSKFPFGIQQAKSHRNIKLLEDEPRSRDETPLCTIAHWQDSLAKRCICVSNIVRSLSFVPGNDAEMSKHPGLVLILGKLILLHHEHPERKRAPQTYEKEEDEDKGVACSKDEWWWDCLEVLRDNTLVTLANISGQLDLSAYTESICLPILDGLLHWMVCPSAEAQDPFPTVGPNSVLSPQRLVLETLCKLSIQDNNVDLILATPPFSRQEKFYATLVRYVGDRKNPVCREMSMALLSNLAQGDALAARAIAVQKGSIGNLISFLEDGVTMAQYQQSQHNLMHMQPPPLEPPSVDMMCRAAKALLAMARVDENRSEFLLHEGRLLDISISAVLNSLVASVICDVLFQIGQL

SEQ ID NO: 1883 - DNA, 8087 bp, Homo sapiens
cggccgccgccggcacccacagcgccaagagcggcggctccgaggcggctctcaaggagggtggaagcgccgccgcgctgtcctcctcctcctcctcctccgcggcggcagcggcggcatcctcttcctcctcgtcgggcccgggctcggccatggagacggggctgctccccaaccacaaactgaaaaccgttggcgaagcccccgccgcgccgccccaccagcagcaccaccaccaccaccatgcccaccaccaccaccaccatgcccaccacctccaccaccaccacgcactacagcagcagctaaaccagttccagcagcagcagcagcagcagcaacagcagcagcagcagcagcagcaacagcaacatcccatttccaacaacaacagcttgggcggcgcgggcggcggcgcgcctcagcccggccccgacatggagcagccgcaacatggaggcgccaaggacagtgctgcgggcggccaggccgaccccccgggcccgccgctgctgagcaagccgggcgacgaggacgacgcgccgcccaagatgggggagccggcgggcggccgctacgagcacccgggcttgggcgccctgggcacgcagcagccgccggtcgccgtgcccgggggcggcggcggcccggcggccgtcccggagtttaataattactatggcagcgctgcccctgcgagcggcggccccggcggccgcgctgggccttgctttgatcaacatggcggacaacaaagccccgggatggggatgatgcactccgcctccgccgccgccgccggggcccccggcagcatggaccccctgcagaactcccacgaagggtaccccaacagccagtgcaaccattatccgggctacagccggcccggcgcgggcggcggcggcggcggcggcggcggaggaggaggaggcagcggaggaggaggaggaggaggaggagcaggagcaggaggagcaggagcgggagctgtggcggcggcggccgcggcggcggcggcagcagcaggaggcggcggcggcggcggctatgggggctcgtccgcggggtacggggtgctgagctccccccggcagcagggcggcggcatgatgatgggccccgggggcggcggggccgcgagcctcagcaaggcggccgccggctcggcggcggggggcttccagcgcttcgccggccagaaccagcacccgtcgggggccaccccgaccctcaatcagctgctcacctcgcccagccccatgatgcggagctacggcggcagctaccccgagtacagcagccccagcgcgccgccgccgccgccgtcgcagccccagtcccaggcggcggcggcgggggcggcggcgggcggccagcaggcggccgcgggcatgggcttgggcaaggacatgggcgcccagtacgccgctgccagcccggcctgggcggccgcgcaacaaaggagtcacccggcgatgagccccggcacccccggaccgaccatgggcagatcccagggcagcccaatggatccaatggtgatgaagagacctcagttgtatggcatgggcagtaaccctcattctcagcctcagcagagcagtccgtacccaggaggttcctatggccctccaggcccacagcggtatccaattggcatccagggtcggactcccggggccatggccggaatgcagtaccctcagcagcagatgccacctcagtatggacagcaaggtgtgagtggttactgccagcagggccaacagccatattacagccagcagccgcagcccccgcacctcccaccccaggcgcagtatctgccgtcccagtcccagcagaggtaccagccgcagcaggacatgtctcaggaaggctatggaactagatctcaacctcctctggcccccggaaaacctaaccatgaagacttgaacttaatacagcaagaaagaccatcaagtttaccagatctgtctggctccattgatgacctccccacgggaacggaagcaactttgagctcagcagtcagtgcatccgggtccacgagcagccaaggggatcagagcaacccggcgcagtcgcctttctccccacatgcgtcccctcatctctccagcatcccggggggcccatctccctctcctgttggctctcctgtaggaagcaaccagtctcgatctggcccaatctctcctgcaagtatcccaggtagtcagatgcctccgcagccacccgggagccagtcagaatccagttcccatcccgccttgagccagtcaccaatgccacaggaaagaggttttatggcaggcacacaaagaaaccctcagatggctcagtatggacctcaacagacaggaccatccatgtcgcctcatccttctcctgggggccagatgcatgctggaatcagtagctttcagcagagtaactcaagtgggacttacggtccacagatgagccagtatggaccacaaggtaactactccagacccccagcgtatagtggggtgcccagtgcaagctacagcggcccagggcccggtatgggtatcagtgccaacaaccagatgcatggacaagggccaagccagccatgtggtgctgtgcccctgggacgaatgccatcagctgggatgcagaacagaccatttcctggaaatatgagcagcatgacccccagttctcctggcatgtctcagcagggagggccaggaatggggccgccaatgccaactgtgaaccgtaaggcacaggaggcagccgcagcagtgatgcaggctgctgcgaactcagcacaaagcaggcaaggcagtttccccggcatgaaccagagtggacttatggcttccagctctccctacagccagcccatgaacaacagctctagcctgatgaacacgcaggcgccgccctacagcatggcgcccgccatggtgaacagctcggcagcatctgtgggtcttgcagatatgatgtctcctggtgaatccaaactgcccctgcctctcaaagcagacggcaaagaagaaggcactccacagcccgagagcaagtcaaagaagtccagctcctccaccactactggggagaagatcacgaaggtgtacgagctggggaatgagccagagagaaagctctgggtcgaccgatacctcaccttcatggaagagagaggctctcctgtctcaagtctgcctgccgtgggcaagaagcccctggacctgttccgactctacgtctgcgtcaaagagatcgggggtttggcccaggttaataaaaacaagaagtggcgtgagctggcaaccaacctaaacgttggcacctcaagcagtgcagcgagctccctgaaaaagcagtatattcagtacctgtttgcctttgagtgcaagatcgaacgtggggaggagcccccgccggaagtcttcagcaccggggacaccaaaaagcagcccaagctccagccgccatctcctgctaactcgggatccttgcaaggcccacagaccccccagtcaactggcagcaattccatggcagaggttccaggtgacctgaagccacctaccccagcctccacccctcacggccagatgactccaatgcaaggtggaagaagcagtacaatcagtgtgcacgacccattctcagatgtgagtgattcatccttcccgaaacggaactccatgactccaaacgccccctaccagcagggcatgagcatgcccgatgtgatgggcaggatgccctatgagcccaacaaggacccctttgggggaatgagaaaagtgcctggaagcagcgagccctttatgacgcaaggacagatgcccaacagcagcatgcaggacatgtacaaccaaagtccctccggagcaatgtctaacctgggcatggggcagcgccagcagtttccctatggagccagttacgaccgaaggcatgaaccttatgggcagcagtatccaggccaaggccctccctcgggacagccgccgtatggagggcaccagcccggcctgtacccacagcagccgaattacaaacgccatatggacggcatgtacgggcccccagccaagcgccacgagggcgacatgtacaacatgcagtacagcagccagcagcaggagatgtacaaccagtatggaggctcctactcgggcccggaccgcaggcccatccagggccagtacccgtatccctacagcagggagaggatgcagggcccggggcagatccagacacacggaatcccgcctcagatgatgggcggcccgctgcagtcgtcctccagtgaggggcctcagcagaatatgtgggcagcacgcaatgatatgccttatccctaccagaacaggcagggccctggcggccctacacaggcgcccccttacccaggcatgaaccgcacagacgatatgatggtacccgatcagaggataaatcatgagagccagtggccttctcacgtcagccagcgtcagccttatatgtcgtcctcagcctccatgcagcccatcacacgcccaccacagccgtcctaccagacgccaccgtcactgccaaatcacatctccagggcgcccagcccagcgtccttccagcgctccctggagaaccgcatgtctccaagcaagtctccttttctgccgtctatgaagatgcagaaggtcatgcccacggtccccacatcccaggtcaccgggccaccaccccaaccacccccaatcagaagggagatcacctttcctcctggctcagtagaagcatcacaaccagtcttgaaacaaaggcgaaagattacctccaaagatatcgttactcctgaggcgtggcgtgtgatgatgtcccttaaatcaggtcttttggctgagagtacgtgggctttggacactattaatattcttctgtatgatgacagcactgttgctactttcaatctctcccagttgtctggatttctcgaacttttagtcgagtactttagaaaatgcctgattgacatttttggaattcttatggaatatgaagtgggagaccccagccaaaaagcacttgatcacaacgcagcaaggaaggatgacagccagtccttggcagacgattctgggaaagaggaggaagatgctgaatgtattgatgacgacgaggaagacgaggaggatgaggaggaagacagcgagaagacagaaagcgatgaaaagagcagcatcgctctgactgccccggacgccgctgcagacccaaaggagaagcccaagcaagccagtaagttcgacaagctgccaataaagatagtcaaaaagaacaacctgtttgttgttgaccgatctgacaagttggggcgtgtgcaggagttcaatagtggccttctgcactggcagctcggcgggggtgacaccaccgagcacattcagactcactttgagagcaagatggaaattcctcctcgcaggcgcccacctccccccttaagctccgcaggtagaaagaaagagcaagaaggcaaaggcgactctgaagagcagcaagagaaaagcatcatagcaaccatcgatgacgtcctctctgctcggccaggggcattgcctgaagacgcaaaccctgggccccagaccgaaagcagtaagtttccctttggtatccagcaagccaaaagtcaccggaacatcaagctgctggaggacgagcccaggagccgagacgagactcctctgtgtaccatcgcgcactggcaggactcgctggctaagcgatgcatctgtgtgtccaatattgtccgtagcttgtcattcgtgcctggcaatgatgccgaaatgtccaaacatccaggcctggtgctgatcctggggaagctgattcttcttcaccacgagcatccagagagaaagcgagcaccgcagacctatgagaaagaggaggatgaggacaagggggtggcctgcagcaaagatgagtggtggtgggactgcctcgaggtcttgagggataacacgttggtcacgttggccaacatttccgggcagctagacttgtctgcttacacggaaagcatctgcttgccaattttggatggcttgctgcactggatggtgtgcccgtctgcagaggcacaagatccctttccaactgtgggacccaactcggtcctgtcgcctcagagacttgtgctggagaccctctgtaaactcagtatccaggacaataatgtggacctgatcttggccactcctccatttagtcgtcaggagaaattctatgctacattagttaggtacgttggggatcgcaaaaacccagtctgtcgagaaatgtccatggcgcttttatcgaaccttgcccaaggggacgcactagcagcaagggccatagctgtgcagaaaggaagcattggaaacttgataagcttcctagaggatggggtcacgatggcccagtaccagcagagccagcacaacctcatgcacatgcagcccccgcccctggaaccacctagcgtagacatgatgtgcagggcggccaaggctttgctagccatggccagagtggacgaaaaccgctcggaattccttttgcacgagggccggttgctggatatctcgatatcagctgtcctgaactctctggttgcatctgtcatctgtgatgtactgtttcagattgggcagttatgacataagtgagaaggcaagcatgtgtgagtgaagattagagggtcacatataactggctgttttctgttcttgtttatccagcgtaggaagaaggaaaagaaaatctttgctcctctgccccattcactatttaccaattgggaattaaagaaataattaatttgaacagttatgaaattaatatttgctgtctgtgtgtataagtacatcctttggggttttttttttctcttttttttaaccaaagttgctgtctagtgcattcaaaggtcactttttgttcttcacagatctttttaatgttctttcccatgttgtattgcatttttgggggaagcaaattgactttaaagaaaaaagttgtggcaaaagatgctaagatgcgaaaatttcaccacactgagtcaaaaaggtgaaaaattatccatttcctatgcgttttactcctcagagaatgaaaaaaactgcatcccatcacccaaagttctgtgcaatagaaatttctacagatacaggtataggggctcaaggaggtatgtcggtcagtagtcaaaactatgaaatgatactggtttctccacaggaatatggttccattaggctgggagcaaaaacaatgttttttaagattgagaatacatacctgacaacgatccggaaactgctcctcaccactcccgtcatgcctgctgtcggcgtttgaccttccacgtgacagttcttcacaattcctttcatcattttttaaatattttttttactgcctatgggctgtgatgtatatagaagttgtacattaaacataccctcatttttttcttttcttttttttttttttttttagtacaaagttttagtttctttttcatgatgtggtaactacgaagtgatggtagatttaaataattttttatttttattttatatattttttcattagggccatatctccaaaaaaagaaagaaaaaatacaaaaaacaaaaacaaaaaaaaaagagggtaatgtacaagtttctgtatgtataaagtcatgctcgatttcaggagagcagctgatcacaatttgcttcatgaatcaaggtgtggaaatggttatatatggattgatttagaaaatggttaccagtacagtcaaaaaagagaaaatgaaaaaaatacaactaaaaggaagaaacacaacttcaaagatttttcagtgatgagaatccacatttgtatttcaagataatgtagtttaaaaaaaaaaaaaagaaaaaaacttgatgtaaattcctccttttcctctggcttaatgaatatcatttattcagtataaaatctttatatgttccacatgttaagaataaatgtacattaaatcttgttaagcactgtgaaaaaaaaaaaaaaaaaaaaaa

SEQ ID NO: 1884 - protein, 2178 aa, Homo sapiens
METGLLPNHKLKTVGEAPAAPPHQQHHHHHHAHHHHHHAHHLHHHHALQQQLNQFQQQQQQQQQQQQQQQQQQHPISNNNSLGGAGGGAPQPGPDMEQPQHGGAKDSAAGGQADPPGPPLLSKPGDEDDAPPKMGEPAGGRYEHPGLGALGTQQPPVAVPGGGGGPAAVPEFNNYYGSAAPASGGPGGRAGPCFDQHGGQQSPGMGMMHSASAAAAGAPGSMDPLQNSHEGYPNSQCNHYPGYSRPGAGGGGGGGGGGGGGSGGGGGGGGAGAGGAGAGAVAAAAAAAAAAAGGGGGGGYGGSSAGYGVLSSPRQQGGGMMMGPGGGGAASLSKAAAGSAAGGFQRFAGQNQHPSGATPTLNQLLTSPSPMMRSYGGSYPEYSSPSAPPPPPSQPQSQAAAAGAAAGGQQAAAGMGLGKDMGAQYAAASPAWAAAQQRSHPAMSPGTPGPTMGRSQGSPMDPMVMKRPQLYGMGSNPHSQPQQSSPYPGGSYGPPGPQRYPIGIQGRTPGAMAGMQYPQQQMPPQYGQQGVSGYCQQGQQPYYSQQPQPPHLPPQAQYLPSQSQQRYQPQQDMSQEGYGTRSQPPLAPGKPNHEDLNLIQQERPSSLPDLSGSIDDLPTGTEATLSSAVSASGSTSSQGDQSNPAQSPFSPHASPHLSSIPGGPSPSPVGSPVGSNQSRSGPISPASIPGSQMPPQPPGSQSESSSHPALSQSPMPQERGFMAGTQRNPQMAQYGPQQTGPSMSPHPSPGGQMHAGISSFQQSNSSGTYGPQMSQYGPQGNYSRPPAYSGVPSASYSGPGPGMGISANNQMHGQGPSQPCGAVPLGRMPSAGMQNRPFPGNMSSMTPSSPGMSQQGGPGMGPPMPTVNRKAQEAAAAVMQAAANSAQSRQGSFPGMNQSGLMASSSPYSQPMNNSSSLMNTQAPPYSMAPAMVNSSAASVGLADMMSPGESKLPLPLKADGKEEGTPQPESKSKKSSSSTTTGEKITKVYELGNEPERKLWVDRYLTFMEERGSPVSSLPAVGKKPLDLFRLYVCVKEIGGLAQVNKNKKWRELATNLNVGTSSSAASSLKKQYIQYLFAFECKIERGEEPPPEVFSTGDTKKQPKLQPPSPANSGSLQGPQTPQSTGSNSMAEVPGDLKPPTPASTPHGQMTPMQGGRSSTISVHDPFSDVSDSSFPKRNSMTPNAPYQQGMSMPDVMGRMPYEPNKDPFGGMRKVPGSSEPFMTQGQMPNSSMQDMYNQSPSGAMSNLGMGQRQQFPYGASYDRRHEPYGQQYPGQGPPSGQPPYGGHQPGLYPQQPNYKRHMDGMYGPPAKRHEGDMYNMQYSSQQQEMYNQYGGSYSGPDRRPIQGQYPYPYSRERMQGPGQIQTHGIPPQMMGGPLQSSSSEGPQQNMWAARNDMPYPYQNRQGPGGPTQAPPYPGMNRTDDMMVPDQRINHESQWPSHVSQRQPYMSSSASMQPITRPPQPSYQTPPSLPNHISRAPSPASFQRSLENRMSPSKSPFLPSMKMQKVMPTVPTSQVTGPPPQPPPIRREITFPPGSVEASQPVLKQRRKITSKDIVTPEAWRVMMSLKSGLLAESTWALDTINILLYDDSTVATFNLSQLSGFLELLVEYFRKCLIDIFGILMEYEVGDPSQKALDHNAARKDDSQSLADDSGKEEEDAECIDDDEEDEEDEEEDSEKTESDEKSSIALTAPDAAADPKEKPKQASKFDKLPIKIVKKNNLFVVDRSDKLGRVQEFNSGLLHWQLGGGDTTEHIQTHFESKMEIPPRRRPPPPLSSAGRKKEQEGKGDSEEQQEKSIIATIDDVLSARPGALPEDANPGPQTESSKFPFGIQQAKSHRNIKLLEDEPRSRDETPLCTIAHWQDSLAKRCICVSNIVRSLSFVPGNDAEMSKHPGLVLILGKLILLHHEHPERKRAPQTYEKEEDEDKGVACSKDEWWWDCLEVLRDNTLVTLANISGQLDLSAYTESICLPILDGLLHWMVCPSAEAQDPFPTVGPNSVLSPQRLVLETLCKLSIQDNNVDLILATPPFSRQEKFYATLVRYVGDRKNPVCREMSMALLSNLAQGDALAARAIAVQKGSIGNLISFLEDGVTMAQYQQSQHNLMHMQPPPLEPPSVDMMCRAAKALLAMARVDENRSEFLLHEGRLLDISISAVLNSLVASVICDVLFQIGQL

SEQ ID NO: 1885 - DNA, 2821 bp, Homo sapiens
gaaggagtggacccaacctggccgcgccgcagaagtggctcccgaggaagccggcgccggggccgccgcctcgtgtcccctcggggcgcagtgctcgggggtcggcgggccagagccgaggcgcggccggggagccgggggctgcggggccgagcgggcagccgcgcgagggggcgggcgctcggcgacccgggggccggccgggctgagccccgcgccccgggacgcgggctggaagcgacggaggagtgctgccgcgggctgcggaccagcgccgtcccctcacggagcggggattctgctatgacagttgggctccccggagggttaacctgggtgtcctcggcaaagttgtcgccgagccgggagcccgtgtaggggccgcggcgccgcggctcggggggcggccgggcggccggcggcggtcgtggctcggcggggcccgcgcggccggggggctcctgggggtgtgcgcccccagccggctgccctcgtggatgcctcccggcggcggcgggcccatgaaagactgcgagtacagccagatcagcacccacagctcctcccccatggagtcgccccacaagaagaagaaaatcgcggcccggaggaaatgggaggtgttcccgggaagaaacaagttcttctgtaacgggaggatcatgatggcccggcagacgggcgtcttctacctgacgctcgtcctcatcctggtcactagcggactcttcttcgccttcgactgtccgtacctggcggtgaaaatcacccctgccatccctgcagtcgctggcatcctgttcttctttgtgatggggaccctgctccgcaccagcttcagcgaccccggagtcctcccacgagccacgcctgatgaagccgccgatctggaaaggcaaatagatatcgcaaacggcaccagttcaggggggtaccgcccgcctcccagaaccaaagaagtcatcatcaatggccagaccgtgaaacttaaatactgtttcacctgcaagattttccggccccctcgcgcctcccattgcagcctttgtgataactgcgtagaacggtttgatcaccactgtccctgggtaggcaactgtgtggggaaaagaaactacagatttttttatatgtttattttatctctgtcttttctgacagtctttatatttgcattcgttatcacccacgtcattcttcgttcacagcaaacaggattcctaaatgcccttaaggacagtcctgcaagcgtcctggaggctgtggtgtgcttcttctctgtctggtccatcgttggcctctcaggattccacacctacttgatcagctccaaccagacaacaaatgaggacattaaaggatcctggtcaaataaaagaggtaaagaaaattacaatccctacagctacggaaatatctttaccaactgctgtgttgccctgtgtgggcccatctcaccaagcctgatcgacagaagagggtacatccagcccgacacgccgcagccagcagcaccctccaatggcatcaccatgtacggggccacgcagtcacagagtgacatgtgcgaccaagaccagtgcattcagagcaccaaattcgttttgcaggctgcagccacgcccctgctgcagagcgagcccagcctcaccagcgacgagctgcacctgcccgggaagcctggcctgggcacgccctgcgccagcctcacactgggcccgcccacaccgcccgcctccatgcccaacctcgccgaggccacgctcgcggacgtgatgccccggaaagatgagcacatgggccaccagttcctgacgcccgatgaggcgccctcgccccccaggctactggcggcgggcagccccctggcgcacagccgcaccatgcacgtgctgggcctggccagccaggactccctgcatgaggactctgtgcgcggcctggtgaagctcagctccgtgtgacccacatggccccaggccgggggacaccagaggctcctccatgggcagcaggagtgagcggaggggtgtgtcccacagcgactttcccagccaatgccacggtggagatgacagccccaggtctggggtacagagaccacttaggatggcacagggtggctggccccggatgctgagagcttggtttcatttgaattttcttccccaacctgagtgctttgacaacaatggaaatagagaagtggctgctttcttttggtgaccctccaggggtggaatcggagtgtgtctgcccgcccttgtgacagacacacggaaggcttctgacgcttgtggccagactgcaattgcacttatgtgttatgctactaatatttgaaacagacctgccattccatttgttaattaaaaaaaaaaaaaatcctaaagggaaaaaaccgaccaggtgtggatctgcatgccacgctgccgtctgtgttacagtggtgttgctatttccaaggaagtgctgctttctttttctttttttaattttgtgaattttcaagtgctgttttgttggaagacagtgcaacgaactgagactaatggacagtgtcatcactcagcttactgggctgaggcgtctgtggagaggtggcaccggggctgcagagggcggctggggttccgtcgtgtcgggtgtcacttcaccttctgtttggccgctcgatgaggtctcgtgttgagatattgtgtgccacaacccccacagtcttcacctccgtgtgtgatgaaacttcccgtggacagccaataaaatgacgtcctctgttattttggaaaaaaaaaaaaaaaaaaaaaaaaaaaaaaaaaaa

SEQ ID NO: 1886 - protein, 488 aa, Homo sapiens
MPPGGGGPMKDCEYSQISTHSSSPMESPHKKKKIAARRKWEVFPGRNKFFCNGRIMMARQTGVFYLTLVLILVTSGLFFAFDCPYLAVKITPAIPAVAGILFFFVMGTLLRTSFSDPGVLPRATPDEAADLERQIDIANGTSSGGYRPPPRTKEVIINGQTVKLKYCFTCKIFRPPRASHCSLCDNCVERFDHHCPWVGNCVGKRNYRFFYMFILSLSFLTVFIFAFVITHVILRSQQTGFLNALKDSPASVLEAVVCFFSVWSIVGLSGFHTYLISSNQTTNEDIKGSWSNKRGKENYNPYSYGNIFTNCCVALCGPISPSLIDRRGYIQPDTPQPAAPSNGITMYGATQSQSDMCDQDQCIQSTKFVLQAAATPLLQSEPSLTSDELHLPGKPGLGTPCASLTLGPPTPPASMPNLAEATLADVMPRKDEHMGHQFLTPDEAPSPPRLLAAGSPLAHSRTMHVLGLASQDSLHEDSVRGLVKLSSV

SEQ ID NO: 1887 - DNA, 2774 bp, Homo sapiens
gaaggagtggacccaacctggccgcgccgcagaagtggctcccgaggaagccggcgccggggccgccgcctcgtgtcccctcggggcgcagtgctcgggggtcggcgggccagagccgaggcgcggccggggagccgggggctgcggggccgagcgggcagccgcgcgagggggcgggcgctcggcgacccgggggccggccgggctgagccccgcgccccgggacgcgggctggaagcgacggaggagtgctgccgcgggctgcggaccagcgccgtcccctcacggagcggggattctgctatgacagttgggctccccggagggttaacctgggtgtcctcggcaaagttgtcgccgagccgggagcccgtgtaggggccgcggcgccgcggctcggggggcggccgggcggccggcggcggtcgtggctcggcggggcccgcgcggccggggggctcctgggggtgtgcgcccccagccggctgccctcgtggatgcctcccggcggcggcgggcccatgaaagactgcgagtacagccagatcagcacccacagctcctcccccatggagtcgccccacaagaagaagaaaatcgcggcccggaggaaatgggaggtgttcccgggaagaaacaagttcttctgtaacgggaggatcatgatggcccggcagacgggcgtcttctacctgacgctcgtcctcatcctggtcactagcggactcttcttcgccttcgactgtccgtacctggcggtgaaaatcacccctgccatccctgcagtcgctggcatcctgttcttctttgtgatggggaccctgctccgcaccagcttcagcgaccccggagtcctcccacgagccacgcctgatgaagccgccgatctggaaaggcaaatagatatcgcaaacggcaccagttcaggggggtaccgcccgcctcccagaaccaaagaagtcatcatcaatggccagaccgtgaaacttaaatactgtttcacctgcaagattttccggccccctcgcgcctcccattgcagcctttgtgataactgcgtagaacggtttgatcaccactgtccctgggtaggcaactgtgtggggaaaagaaactacagatttttttatatgtttattttatctctgtcttttctgacagtctttatatttgcattcgttatcacccacgtcattcttcgttcacagcaaacaggattcctaaatgcccttaaggacagtcctgcaagcgtcctggaggctgtggtgtgcttcttctctgtctggtccatcgttggcctctcaggattccacacctacttgatcagctccaaccagacaacaaatgaggacattaaaggatcctggtcaaataaaagaggtaaagaaaattacaatccctacagctacggaaatatctttaccaactgctgtgttgccctgtgtgggcccatctcaccaagcctgatcgacagaagagggtacatccagcccgacacgccgcagccagcagcaccctccaatggcatcaccatgtacggggccacgcagtcacagagtgacatggctgcagccacgcccctgctgcagagcgagcccagcctcaccagcgacgagctgcacctgcccgggaagcctggcctgggcacgccctgcgccagcctcacactgggcccgcccacaccgcccgcctccatgcccaacctcgccgaggccacgctcgcggacgtgatgccccggaaagatgagcacatgggccaccagttcctgacgcccgatgaggcgccctcgccccccaggctactggcggcgggcagccccctggcgcacagccgcaccatgcacgtgctgggcctggccagccaggactccctgcatgaggactctgtgcgcggcctggtgaagctcagctccgtgtgacccacatggccccaggccgggggacaccagaggctcctccatgggcagcaggagtgagcggaggggtgtgtcccacagcgactttcccagccaatgccacggtggagatgacagccccaggtctggggtacagagaccacttaggatggcacagggtggctggccccggatgctgagagcttggtttcatttgaattttcttccccaacctgagtgctttgacaacaatggaaatagagaagtggctgctttcttttggtgaccctccaggggtggaatcggagtgtgtctgcccgcccttgtgacagacacacggaaggcttctgacgcttgtggccagactgcaattgcacttatgtgttatgctactaatatttgaaacagacctgccattccatttgttaattaaaaaaaaaaaaaatcctaaagggaaaaaaccgaccaggtgtggatctgcatgccacgctgccgtctgtgttacagtggtgttgctatttccaaggaagtgctgctttctttttctttttttaattttgtgaattttcaagtgctgttttgttggaagacagtgcaacgaactgagactaatggacagtgtcatcactcagcttactgggctgaggcgtctgtggagaggtggcaccggggctgcagagggcggctggggttccgtcgtgtcgggtgtcacttcaccttctgtttggccgctcgatgaggtctcgtgttgagatattgtgtgccacaacccccacagtcttcacctccgtgtgtgatgaaacttcccgtggacagccaataaaatgacgtcctctgttattttggaaaaaaaaaaaaaaaaaaaaaaaaaaaaaaaaa

SEQ ID NO: 1888 - protein, 473 aa, Homo sapiens
MPPGGGGPMKDCEYSQISTHSSSPMESPHKKKKIAARRKWEVFPGRNKFFCNGRIMMARQTGVFYLTLVLILVTSGLFFAFDCPYLAVKITPAIPAVAGILFFFVMGTLLRTSFSDPGVLPRATPDEAADLERQIDIANGTSSGGYRPPPRTKEVIINGQTVKLKYCFTCKIFRPPRASHCSLCDNCVERFDHHCPWVGNCVGKRNYRFFYMFILSLSFLTVFIFAFVITHVILRSQQTGFLNALKDSPASVLEAVVCFFSVWSIVGLSGFHTYLISSNQTTNEDIKGSWSNKRGKENYNPYSYGNIFTNCCVALCGPISPSLIDRRGYIQPDTPQPAAPSNGITMYGATQSQSDMAAATPLLQSEPSLTSDELHLPGKPGLGTPCASLTLGPPTPPASMPNLAEATLADVMPRKDEHMGHQFLTPDEAPSPPRLLAAGSPLAHSRTMHVLGLASQDSLHEDSVRGLVKLSSV

SEQ ID NO: 1889 - DNA, 2704 bp, Homo sapiens
gcgggaggcggttcctgcagggtccagtcccgggagcacccccaggaggaggggagggtgggagcgcctctctttgagtccccgggtttggtcgctgggatgtgaggaagccggagaggccgcggctggacgcaggtgggtgtggaggggccgcccggactgcggggacccgctccgcgcacagtggctgagcgcccgcctctctttccaggggctgaggatccggcggctcggctgcactatgcccttcccgcccatgccgccgccgcccgcccccgccccgggggcccaagccgcgcgccagttaccccggaggccctgcgccgcgggggacaagaagaagaggcccccacagcggcccgaggggctcctctccagctcctggccctccgccacgctcaagaggccgccggcccggcgcggccccggcctggacaggacgcagccgccggcccctccgggcgtctccccccaggccttgcccagccgcgcgcgggccccagccacgtgcgccccgccccggccggcaggctccggccacagcccagcgaggaccacctatgcggcgacctcggcggggacggggaccaccgccgcgggcacctcctcgggggcggggccttgtccagactccgctgcgcgcttctgcctgaatctcacccccgaggccgtcctggtcatccagaagcgtcatctggagaagcagctgctggcgcggccccgcaggcccttcccctcaccctcggccgaacccaggcgcctactcgccccgtgtctcccggctagggccgcgggcccgcggaggggcggccccgccagcgaccccgacgcaccccccaccgccggccagggccgccgcgcgcctccgcccggcgcccagctgctgcacggcggcctgcaggttccccagctcagcccgcggcccggggccctgcggccgatgctcaaggtgtcgctgctcaacgagcggcacaggtacgacgacgtggagtacgaggaggagccagaggcggtggacgagggcctggtacgcaagtgcacggagtggctgcgcggcgtggagtccgcggctgccgcgcggggccgggcgggggccctggactcacggcggcacctgagcacgctgtgagcccagcgggcctgcggggacaggccaggcctgatcccacctcacttcctgcacgcgccactccgcctaggggccctcgggggagaccgcaggctcctctggccgccagcgcccactttcgggacaccagtgcgcaagctggcccacgtggggcgcagccagactcgcccgacggccacggcccccctcctgccctcgccagccggcagcccgggcctttctcgttcacaccggtggtatctaccccagatgcctgcctctgcccccactctggcctcctcttggcatcgccgagcatccatgcagttcgtggggaattaagcaactgagaaaatgcctcttggtgccccgacccccagggttcgtctaggtcccagagaccctctgcctggaggcgggccttccccagggctacatctgcacgccccgtggtgtcaccctcagccggcgccgggcaccctggacagtgcggtgggcgatggcccaggtgggtggccgcgacggtggcctcctgcagagctgggacccggtcctacattcgtgattttgttttctcccaagtcagaaaaatgttgagggtattagacatccctgaaactcagttaaccgaatttccagtctccaaagcggaagggtaggcatcgccaggcgctggtgagccctggtcaatgagcgcttccatggaaaccgctcggctgattacattttttctgtgtattatttgaatagagagtaaagctcctccgctgtttcgtaaccatatcctttcccccgctaactggaggctgatttctacatatttcttccatgtatctgagaatatctaactagaaggatgagaaggaaataaaatgttataatcagataaggctggttataaaagagtaatgtattacctcaatttttgactgactttgtaaaagccaataactggtttaatgtttatcttgatagactttaaatgtatcaagtcttaattgtattttaaattgaagccttacatttttaaaacagattttgtatttttcttgtggaggtctttgctctaataacacacacacactgtctctctctctctctctctctaattctaggcacacatttagttagatgtgaagcatttaattcattgggagctaggtcagctgccagatgagttgcaaaaacagaaaaaaacctacccattgaataacttctttgaatttggagataagttttcttttacttaaaatgaatatattaattctagaggggcaaaactagcaatgcttatgcaagtgacggtgctgctcttgttccacccccacccagatggtctctgagtgcgccgtcctgggcagggcacacggtctggagctgagagggtggagcaagagtgcactgactccgagccgagggcaggagtggctcaacttggtctcgtcttgcacttagtgcaaataccaataattaagatgcctagacttctgcccttggtcacagtaacaacaacattttgaagacttttccctggtggcatcctagagggaccgactttctgcagcctctgtcttccaagctgagcttctgctgcag

SEQ ID NO: 1890 - protein, 295 aa, Homo sapiens
MPFPPMPPPPAPAPGAQAARQLPRRPCAAGDKKKRPPQRPEGLLSSSWPSATLKRPPARRGPGLDRTQPPAPPGVSPQALPSRARAPATCAPPRPAGSGHSPARTTYAATSAGTGTTAAGTSSGAGPCPDSAARFCLNLTPEAVLVIQKRHLEKQLLARPRRPFPSPSAEPRRLLAPCLPARAAGPRRGGPASDPDAPPTAGQGRRAPPPGAQLLHGGLQVPQLSPRPGALRPMLKVSLLNERHRYDDVEYEEEPEAVDEGLVRKCTEWLRGVESAAAARGRAGALDSRRHLSTL

SEQ ID NO: 1891 - DNA, 717 bp, Homo sapiens
gcacgagggctacggccctggaacggggccatggagaagctgcggcgagtcctgagcggccaggacgacgaggagcagggcctgactgcgcaggtcctggatgcctcatcccttagtttcaacaccagattgaaatggtttgccatctgcttcgtatgtggcgttttcttttctattcttggaactggattgctgtggcttccgggcggcataaagctttttgcagtgttttataccctcggcaatcttgctgcgttagccagtacatgctttttaatgggacctgtgaagcaactgaagaaaatgtttgaagcaacaagattgcttgcaacaattgttatgcttttgtgtttcatatttaccctgtgtgctgctctttggtggcataagaagggactggctgtgttattctgcatattgcagttcttgtcaatgacctggtatagcctgtcatacatcccatatgcaagggatgcagttattaaatgctgttcttctctcctaagttgaaaatcagaaacttgtggaaaagagcacttgaatgttggtactctatgtttggtgaagtttgcttttccccataaaacactccaggaacaactgacgtgacagttgaagaccgttttgtactaagtctcattttgtatactggtaaaaactacatgcttgattaaaccattaaatgcttgtaactttaaaaaaaaaaaaaaaaaaaaa

SEQ ID NO: 1892 - protein, 159 aa, Homo sapiens
MEKLRRVLSGQDDEEQGLTAQVLDASSLSFNTRLKWFAICFVCGVFFSILGTGLLWLPGGIKLFAVFYTLGNLAALASTCFLMGPVKQLKKMFEATRLLATIVMLLCFIFTLCAALWWHKKGLAVLFCILQFLSMTWYSLSYIPYARDAVIKCCSSLLS

SEQ ID NO: 1893 - DNA, 3883 bp, Homo sapiens
ctcggacccggtagtggtccgtgaagtccgcggagtgggcgctgatggtggggctatcccttcccactgtccgcgaggtgcgccgtggtaacgcgcggggacacagcgcgggtgtggaccccctgcccacagctggcgcacagccattgagtgtagacccgactggggcacgaccactgaaccctgcacttggcgtcctccgggccccgcgaggggccttgctgggcgggtccgcggcaccccgggttcccagaagtcgaggccccgaatgcgcctcccctcgcctggaatcggagagcggagggctcctgcgggcaggtggccgtgctccgaagagcgccctgccacccatgaggtggccctgggggcgtcgctagccttcccagctgggtgtcctcatccggagacacaaacacctgcctcaggattaaagcgaggagctgtatttcagaccgtctcaggagaaatagcaagaggctgcctcactcctttgcccttgttcaagtttgaggcattaagaaggataagacatcaatttgaaaagagcccctgtcagagcaacatgacttgaaagcaagaagaaaaaacaaaaaatgaagcaagaacaaacatcaaatttatgctgagtttggctgcaagaatggtgaaatcattgatactttacaagacactaatcaggacagtgccccaaaggaatcagcagtttacaaatggatataacctgttttcagaagagacaagattaatttgaagatgaagcagtggcggaccatccatgtcaatttatgagaaaaaaattcattctgttcatgccctaactgaagaggactgacaacagcacaaacaatagccaacatcatagacatctcaactggttcagcttactcaattctgactgaaagttaaagttgagcaaactttccactcaatgagtgtcgaaaccctcatgcccagatcagctgcagacaagagcagaggtttcaatggaaattttaaacaagtgagattaagatcctgaagcatttcttgaaagaattgtaacaggagataaaccatggcttcaccagtacaatactgaagactaagcacaatcaaagcaatggctaccaagaggccgaagtggtcccattaaggcgaaagtggaccagtcaagagcaaaggtcatggcaacagtgttttgggatgccaagacattttgctcgttgactttctggagggccaaagtgcagtaatgtctgtttattatgttttgagaaagttggccaaacctttagtagaaaaatgcccaggagaacttcactagagtgaccttcgttcaatttcagatcaccacaataaagcaaaaaattgcaattataaattttttggtttcccagtacatgtaaaagttataattacactatactatagtctattaagggtgcaatagcattatgtctgaaaaaaacaatggtcatgccttaatttaaaaatactttattactaaaaaatgctagcaatcatctgaaccttcagtgagtcataatatttttgctagtggagggccttgcctggatgttgatggctgctgactgatcaggatggtggttgctgaaggttagggtggctgcagcaatttcttaacataagacaacagtgaagtttcctgcattgattgactcttcctttcatgaaatatttctctatagcatgtaatgctgtttgatagcattttacccacagtagaatttatttcagaattgaagtcagtcctcttaaaccctgtcacttctttattaactaagttcacgcaatattctaaatcctttgttgtcatttcaacaatgttcacaacatcttcaccagggatagattctgtctcaagaaaccactttctttgttcattcgtaagaagcaacccctcatctgttcaagttttctcatgagattggagcaattcagtcacattttcaggctgcatttttaattctagttctcttgctatttctaccacatctgcagttacttccttcactgaaggcttgaacccctcaaagtcacccatgagggttggaatcaacttcttccaaattcctgttaatgttgatgttttgacctcctctcatgaatgatgaatgtttttaatgacatctaaaatggtcagtcctttccagaaggttttcaatttactttgccccaatccatcagaggaatcactgtctatggcaactgtaggcttataaaaggtatttcttaaataatatgtcttgaaagtctaaatgactccttgatccataagctgcagaatgggtgttgtgttagcaagcatgaaaacaacattcatcttgtgcctctccatctgagctcttctatgaccaggtgccttgttgatgagcagtaatattttgaaagaaatcttttttcctgagcagtgggtctcaacaatgggcttaaaatgttcattaagccatgctgtaaacagatgtgctatcatccaggctttgatgttccttatacagagtacaggcacaggcagagtagatttagtataattcttaagggcccttggattttcagaatggtaagtgaacattggtgtgaacttaaggtcaccagctgcattagcccctaacaagagagtcagcctgtcctttgaagctttgaagctaggcattgacttctctctagctatgaaagtcctagatgacatcttctgatttaaggctgttttgtctacattgaaagtctattatttagtgtagccaccttcatcaattatcttagtaaggtcttctggataacttgctgcagcttctacatcagcatttactgcttcacctcgcacttttatgttatggagatggcttcattccttaaacctcatgaaccaacgagcttcaaacctttcttctgcagcttcctcacctccctcaggcttcatagaatttaatagagttagggctttgctatggattaggtttttgcttatgggaggattgtggctggtttaatcttctatccagactactacaactttccccatatcaaaaataaggcactttcattttttgatcatttgttcactggagtgacacttacttttaatttcctgaaaattttcctttgcatttacaatgtagctaactattcagtggaagagggctagtttttgacatgccttcctcaatatgcttaataatttctagtttttgatttaaagtgagacacatgtgactcttcctttcacttgaatgccgagaggccatgcagggttattaattagcctaatttcaatattgttatttaagttatggggaggcttgaggagagggagagagagacaggagaatggccggtcagtggagcagtcagaatacacacaacatatattgattaactttcctatcttatatgagcacagttcttggcactccaaaacaattacagtactaacatcaaagatcactgatcacagatcaccataactgatattataataatggaaagtcttgaaatattgtgaaaattaccaaaatgtgacagatacaacatgaacaaatgctgttggaagaatggcactgatagatttgcccaatgcagggttgccacaaactttcaacttgtaaaaagagcagtatctgtgaaagacggtaaagcagaaagcaataaaatgaagtgtgcccatgtatactaataagacatagttcattttattaataaagcacctgtcaatttcagttgagtaatttttatcaggaatgggttttgaattttgttcaaggcttttacagcatctgtgggataactatgtattgtttccctggatctataaatacatacaggatactaatgacttttcaaatattgaaccaactttgcattcttggaataaatctcacttgat

SEQ ID NO: 1894 - protein, 110 aa, Homo sapiens
MVGLSLPTVREVRRGNARGHSAGVDPLPTAGAQPLSVDPTGARPLNPALGVLRAPRGALLGGSAAPRVPRSRGPECASPRLESESGGLLRAGGRAPKSALPPMRWPWGRR

SEQ ID NO: 1895 - DNA, 988 bp, Homo sapiens
gtcgtgaggcgggccttcgggctggctcgccgtcggctgccggggggttggcctgggtgtcattggctctgggaagcggcagcagaggcagggaccactcggggtctggtgtcggcacagccatggcgggcgcgttggtgcggaaagcggcggactatgtccgaagcaaggatttccgggactacctcatgagtacgcacttctggggcccagtagccaactggggtcttcccattgctgccatcaatgatatgaaaaagtctccagagattatcagtgggcggatgacatttgccctctgttgctattctttgacattcatgagatttgcctacaaggtacagcctcggaactggcttctgtttgcatgccacgcaacaaatgaagtagcccagctcatccagggagggcggcttatcaaacacgagatgactaaaacggcatctgcataacaatgggaaaaggaagaacaaggtcttgaagggacagcattgccagctgctgctgagtcacagatttcattataaatagcctccctaaggaaaatacactgaatgctatttttactaaccattctatttttatagaaatagctgagagtttctaaaccaactctctgctgccttacaagtattaaatattttacttctttccataaagagtagctcaaaatatgcaattaatttaataatttctgatgatgttttatctgcagtaatatgtatatcatctattagaatttacttaatgaaaaactgaagagaacaaaatttgtaaccactagcacttaagtactcctgattcttaacattgtctttaatgaccacaagacaaccaacagctggccacgtacttaaaattttgtccccactgtttaaaaatgttacctgtgtatttccatgcagtgtatatattgagatgctgtaacttaatggcaataaatgatttaaatatttgttaaaaaaaaaaaaaaaaaaaaaaaaaaaaa

SEQ ID NO: 1896 - protein, 109 aa, Homo sapiens
MAGALVRKAADYVRSKDFRDYLMSTHFWGPVANWGLPIAAINDMKKSPEIISGRMTFALCCYSLTFMRFAYKVQPRNWLLFACHATNEVAQLIQGGRLIKHEMTKTASA

SEQ ID NO: 1897 - DNA, 5735 bp, Homo sapiens
gcgtcccttggcttccgacatcccgtctggccgtccccctgtgccggtccgagcctctgtttatttcctttcctactatcaatactcgaccagcagaaaaggaaagtttaaaaatgccaatcgcacagttgctggaactatggaaaaagatcgaggtggagcctatggaaatagagaccacagaggaggatctcaacctggatgtggagcccaccacagaagacactgcagaagaagaagaaggcgtcgtgaaggagatagacatcagccatcatgtgaaggagggctttgagaaggcagatccttcccagtttgagctgctgaaggttttaggacaaggatcctatggaaaggtgttcctggtgaggaaggtgaaggggtccgacgctgggcagctctacgccatgaaggtccttaagaaagccaccctaaaagttcgggaccgagtgagatcgaagatggagagagacatcttggcagaagtgaatcaccccttcattgtgaagcttcattatgcctttcagacggaaggaaagctctacctgatcctggacttcctgcggggaggggacctcttcacccggctctccaaagaggtcatgttcacggaggaggatgtcaagttctacctggctgagctggccttggctttagaccatctccacagcctggggatcatctacagagatctgaagcctgagaacatcctcctggatgaagaggggcacattaagatcacagatttcggcctgagtaaggaggccattgaccacgacaagagagcgtactccttctgcgggacgatcgagtacatggcgcccgaggtggtgaaccggcgaggacacacgcagagtgccgactggtggtccttcggcgtgctcatgtttgagatgctcacggggtccctgccgttccaggggaaggacaggaaggagaccatggctctcatcctcaaagccaagctggggatgccgcagttcctcagtggggaggcacagagtttgctgcgagctctcttcaaacggaacccctgcaaccggctgggtgctggcattgacggagtggaggaaattaagcgccatcccttctttgtgaccatagactggaacacgctgtaccggaaggagatcaagccaccgttcaaaccagcagtgggcaggcctgaggacaccttccactttgaccccgagttcacagcgcggacgcccacagactctcctggcgtccccccgagtgcaaacgctcatcacctgtttagaggattcagctttgtggcctcaagcctgatccaggagccctcacagcaagatctgcacaaagtcccagttcacccaatcgtgcagcagttacacgggaacaacatccacttcaccgatggctacgagatcaaggaggacatcggggtgggctcctactcagtgtgcaagcgatgtgtgcataaagccacagacaccgagtatgccgtgaagatcattgataagagcaagagagacccctcggaagagattgagatcctcctgcggtacggccagcacccgaacatcatcaccctcaaggatgtctatgatgatggcaagtttgtgtacctggtaatggagctgatgcgtggtggggagctcctggaccgcatcctccggcagagatacttctcggagcgcgaagccagtgacgtcctgtgcaccatcaccaagaccatggactacctccattcccagggggttgttcatcgagacctgaagccgagtaacatcctgtacagggatgagtcggggagcccagaatccatccgagtctgcgacttcggctttgccaagcagctgcgcgcggggaacgggctgctcatgacaccctgctacacggccaatttcgtggccccggaggtcctgaagcgtcaaggctatgatgcggcgtgtgacatctggagtttggggatcctgttgtacaccatgctggcaggatttaccccttttgcaaatgggccagacgatacccctgaggagattctggcgcggatcggcagtgggaagtatgccctttctgggggaaactgggactcgatatctgacgcagctaaagacgtcgtgtccaagatgctccacgtggaccctcatcagcgcctgacggcgatgcaagtgctcaaacacccgtgggtggtcaacagagagtacctgtccccaaaccagctcagccgacaggacgtgcacctggtgaagggcgcgatggccgccacctactttgctctaaacagaacacctcaggccccgcggctggagcccgtgctgtcatccaacctggctcagcgcagaggcatgaagagactcacgtccacgcggctgtagcgggtgggaccctggccccagcgtcccctgccagcatcctcgtgggctcacagaccccggcctcggagcccgtctggcacccagagtgaccacaagtccagcagggaggcggcgcccgccctcgccgtgtccgtgttttctttttcagccccggagagggtcctgacctgggggcttctccaagcctcactgcgccagcctccccgcccgctctcttttctcccaagcgaaaccaaatgcgccccttcacctcgcgtgcccgtgcgaggccgggggcttctttcagagcccgcgggtcctctcatacatggcttctgtttctgccgagagatctgttttccaattatgaagccggtcggtttggtcagactcccgacacccacgtcccaggtacccggtgggaaagtggcagtgcgagggcgcagccattggtggttgcagggccccagagggctggggtgacctggcatcccggggctccccacgggctggatgacggggttggcactgtggcgtccaggaggagatgcctggttctgcccaaaataatccaaagagccgtttcctcctcgcccttcagtttttgcctgaggtgctgggtagcccatcctttcctctgtcccagattcaaatgaggagtaagagcccagacgagaggaaggcaggctggatctttgccttgagagctccgtgtcaccaggatggaagggggtgcctctcggaggagcctgtgtccacctccagtctcggctttccccggggggccaagcgcactgggctgccgtctgtccccagctcccgtggccacacagctatctggaggctttgcagggagtcgtgggttctcgcacctgctcagccctgtgtcggcttcctgtgtgctcacctaaagctgtggttttgctgtgttcacttcgatttttctggtctgtggagaaactgtgaattggagaaatggagctctgtggcttcccacccaaaccttctcagtccagctggaggctggagggagacacaggccccacccagcagactgaggggcagaggcacaggtgggagggcagcggagatcagcgtggacaggagcgatgcactttgtagatgctgtggctttgtgttgcgttttgtgtctctgttgcacagatctgttttttcacactgatccgtattcccctgggtgtgcacacagggcgggtgtggggcatttaggccatgctgtgctctacttcattgagtaaaatcgagtgagaggttccgggcagcaggatcgacgcccagtccagccggcagagggaacacacgggtccttcattgtcctgtaagggtgttgaagatgctccctggcggcccccaagcagactagatgggaggaggcgccgctcagcccctcaccctgcatcactgaagagcggcgcctctgcagcaagcagggcttcaggaggtgcccgctggccacagccaggttttccctaagaagatgttattttgttgggttttgttccccctccatctcgattctcgtacccaactaaaaaaaaaaaaataaagaaaaaatgtgctgcgttctgaaaaataactccttagcttggtctgattgttttcagaccttaaaatataaacttgtttcacaagctttaatccatgtggattttttttttcttagagaaccacaaaacataaaaggagcaagtcggactgaatacctgtttccatagtgcccacagggtattcctcacattttctccatagaagatgctttttcccaaggctagaacgacttccaccatgatgaatttgctttttaggtcttaattatttcacttctttttagaaacttaggaagaagtggataatcctgaggtcacacaatctgtcctcccagaaatgaacaaaagtcatcaccttttctgcttgctacacaggcaacgattcccccatcagctgcccggaccctttggcctggcttggtgtgcaggcctgtctgtttgcttaaagtcagtgggttctggtgcagggagtgagaagtgggggaagtgaaagggaaagcatccgtgagaaagcggccacggttttccctccttgtgtgcccatggggcaccagctcatggtctttttcagtcatcccagtttgtacagacttagcttctgaactctaagaatgccaaagggaccgacgagactccccatcacagcgagctctgtccttacatgtatttgatgtgcatcagcggaggagaacactggcttggccctgctccgctgagtgtctgtgaaatacctctactttccctcccatatccagaacaaaatgatacttgacatccttccacaaaagtcagcctaaagaagttatggtatcatatgttaaactaagctttcaaaaaccttagtgaaatagcaagtgactgctttcaagcagcagtcgacatgtaaatgaaggtgttcttagaattcgcattttgccagctcagcgcacctccacaacgaatgaaatgctccgtatgatttgcacaaatgacatagacctccccaaaagttaactggctctccttcctcacacagttcatcataacccaaccccccacccccgggtcatgaaaatcacagaacttataaacacattgaaccctagatctcaggcttcctgacctaccgccagtggccccttgctggccaccctatagggtcctccttccctggcagccccccatgtgggagaaatacctgattctcccaatctgcagtgggagagctttgctgaattccatcccaaagtcaaacatgggcaagaggtgaggatttcacttttaccctcaagtccgatttgtctgtgattttaaactaactgtgtatgtattgatgtttggaagattgtttgaattttaaagtgataatagtacttaatgttatccagtattgttcattaaatggtgttatcctaaagctgcacttgggatttttacctaacgctttactgattctctcaagcacatggcaaagtttgatttgcactccgttcatttctgacacgttttgctgcctcctacctttctaagcgtcatgcaaattcgagaatggagaaggacgctgccggtccctgagcggtgtggagagggcggaaggtggactccagcgcagcttgaggggctgaggacggaggctgcagcatctgtgtcgttctactgagcacgcttctctgcctcgctcctgactcagcactttgttcactggctcagcagttatgtttacacatcatttttatgttcctgctttgtaattcatgtttgagatgggtggccactgtacagatatttattacgctttccagactttctgaatagatttttttgaataaacatggttttatgaagtgtaatctttttctagcctaacaat

SEQ ID NO: 1898 - protein, 741 aa, Homo sapiens
MPIAQLLELWKKIEVEPMEIETTEEDLNLDVEPTTEDTAEEEEGVVKEIDISHHVKEGFEKADPSQFELLKVLGQGSYGKVFLVRKVKGSDAGQLYAMKVLKKATLKVRDRVRSKMERDILAEVNHPFIVKLHYAFQTEGKLYLILDFLRGGDLFTRLSKEVMFTEEDVKFYLAELALALDHLHSLGIIYRDLKPENILLDEEGHIKITDFGLSKEAIDHDKRAYSFCGTIEYMAPEVVNRRGHTQSADWWSFGVLMFEMLTGSLPFQGKDRKETMALILKAKLGMPQFLSGEAQSLLRALFKRNPCNRLGAGIDGVEEIKRHPFFVTIDWNTLYRKEIKPPFKPAVGRPEDTFHFDPEFTARTPTDSPGVPPSANAHHLFRGFSFVASSLIQEPSQQDLHKVPVHPIVQQLHGNNIHFTDGYEIKEDIGVGSYSVCKRCVHKATDTEYAVKIIDKSKRDPSEEIEILLRYGQHPNIITLKDVYDDGKFVYLVMELMRGGELLDRILRQRYFSEREASDVLCTITKTMDYLHSQGVVHRDLKPSNILYRDESGSPESIRVCDFGFAKQLRAGNGLLMTPCYTANFVAPEVLKRQGYDAACDIWSLGILLYTMLAGFTPFANGPDDTPEEILARIGSGKYALSGGNWDSISDAAKDVVSKMLHVDPHQRLTAMQVLKHPWVVNREYLSPNQLSRQDVHLVKGAMAATYFALNRTPQAPRLEPVLSSNLAQRRGMKRLTSTRL

SEQ ID NO: 1899 - DNA, 5817 bp, Homo sapiens
gcggagaaggaggcggagggagcgattgtggccccggccgcggtggccggcgcggcctgccctttgtgaccgcagctcgcgccccacgccccgcgcccatggccgccgtgccgggctccctggccacgcgtgcccgcccgcggacctgagccccgcgcctgggatgccggggatgcgcgtcccccggccctgcggctgctccgggctgggcgcggggcgatggacctgagcatgaagaagttcgccgtgcgcaggttcttctctgtgtacctgcgcaggaagtcgcgctccaagagctccagcctgagccggctcgaggaagaaggcgtcgtgaaggagatagacatcagccatcatgtgaaggagggctttgagaaggcagatccttcccagtttgagctgctgaaggttttaggacaaggatcctatggaaaggtgttcctggtgaggaaggtgaaggggtccgacgctgggcagctctacgccatgaaggtccttaagaaagccaccctaaaagttcgggaccgagtgagatcgaagatggagagagacatcttggcagaagtgaatcaccccttcattgtgaagcttcattatgcctttcagacggaaggaaagctctacctgatcctggacttcctgcggggaggggacctcttcacccggctctccaaagaggtcatgttcacggaggaggatgtcaagttctacctggctgagctggccttggctttagaccatctccacagcctggggatcatctacagagatctgaagcctgagaacatcctcctggatgaagaggggcacattaagatcacagatttcggcctgagtaaggaggccattgaccacgacaagagagcgtactccttctgcgggacgatcgagtacatggcgcccgaggtggtgaaccggcgaggacacacgcagagtgccgactggtggtccttcggcgtgctcatgtttgagatgctcacggggtccctgccgttccaggggaaggacaggaaggagaccatggctctcatcctcaaagccaagctggggatgccgcagttcctcagtggggaggcacagagtttgctgcgagctctcttcaaacggaacccctgcaaccggctgggtgctggcattgacggagtggaggaaattaagcgccatcccttctttgtgaccatagactggaacacgctgtaccggaaggagatcaagccaccgttcaaaccagcagtgggcaggcctgaggacaccttccactttgaccccgagttcacagcgcggacgcccacagactctcctggcgtccccccgagtgcaaacgctcatcacctgtttagaggattcagctttgtggcctcaagcctgatccaggagccctcacagcaagatctgcacaaagtcccagttcacccaatcgtgcagcagttacacgggaacaacatccacttcaccgatggctacgagatcaaggaggacatcggggtgggctcctactcagtgtgcaagcgatgtgtgcataaagccacagacaccgagtatgccgtgaagatcattgataagagcaagagagacccctcggaagagattgagatcctcctgcggtacggccagcacccgaacatcatcaccctcaaggatgtctatgatgatggcaagtttgtgtacctggtaatggagctgatgcgtggtggggagctcctggaccgcatcctccggcagagatacttctcggagcgcgaagccagtgacgtcctgtgcaccatcaccaagaccatggactacctccattcccagggggttgttcatcgagacctgaagccgagtaacatcctgtacagggatgagtcggggagcccagaatccatccgagtctgcgacttcggctttgccaagcagctgcgcgcggggaacgggctgctcatgacaccctgctacacggccaatttcgtggccccggaggtcctgaagcgtcaaggctatgatgcggcgtgtgacatctggagtttggggatcctgttgtacaccatgctggcaggatttaccccttttgcaaatgggccagacgatacccctgaggagattctggcgcggatcggcagtgggaagtatgccctttctgggggaaactgggactcgatatctgacgcagctaaagacgtcgtgtccaagatgctccacgtggaccctcatcagcgcctgacggcgatgcaagtgctcaaacacccgtgggtggtcaacagagagtacctgtccccaaaccagctcagccgacaggacgtgcacctggtgaagggcgcgatggccgccacctactttgctctaaacagaacacctcaggccccgcggctggagcccgtgctgtcatccaacctggctcagcgcagaggcatgaagagactcacgtccacgcggctgtagcgggtgggaccctggccccagcgtcccctgccagcatcctcgtgggctcacagaccccggcctcggagcccgtctggcacccagagtgaccacaagtccagcagggaggcggcgcccgccctcgccgtgtccgtgttttctttttcagccccggagagggtcctgacctgggggcttctccaagcctcactgcgccagcctccccgcccgctctcttttctcccaagcgaaaccaaatgcgccccttcacctcgcgtgcccgtgcgaggccgggggcttctttcagagcccgcgggtcctctcatacatggcttctgtttctgccgagagatctgttttccaattatgaagccggtcggtttggtcagactcccgacacccacgtcccaggtacccggtgggaaagtggcagtgcgagggcgcagccattggtggttgcagggccccagagggctggggtgacctggcatcccggggctccccacgggctggatgacggggttggcactgtggcgtccaggaggagatgcctggttctgcccaaaataatccaaagagccgtttcctcctcgcccttcagtttttgcctgaggtgctgggtagcccatcctttcctctgtcccagattcaaatgaggagtaagagcccagacgagaggaaggcaggctggatctttgccttgagagctccgtgtcaccaggatggaagggggtgcctctcggaggagcctgtgtccacctccagtctcggctttccccggggggccaagcgcactgggctgccgtctgtccccagctcccgtggccacacagctatctggaggctttgcagggagtcgtgggttctcgcacctgctcagccctgtgtcggcttcctgtgtgctcacctaaagctgtggttttgctgtgttcacttcgatttttctggtctgtggagaaactgtgaattggagaaatggagctctgtggcttcccacccaaaccttctcagtccagctggaggctggagggagacacaggccccacccagcagactgaggggcagaggcacaggtgggagggcagcggagatcagcgtggacaggagcgatgcactttgtagatgctgtggctttgtgttgcgttttgtgtctctgttgcacagatctgttttttcacactgatccgtattcccctgggtgtgcacacagggcgggtgtggggcatttaggccatgctgtgctctacttcattgagtaaaatcgagtgagaggttccgggcagcaggatcgacgcccagtccagccggcagagggaacacacgggtccttcattgtcctgtaagggtgttgaagatgctccctggcggcccccaagcagactagatgggaggaggcgccgctcagcccctcaccctgcatcactgaagagcggcgcctctgcagcaagcagggcttcaggaggtgcccgctggccacagccaggttttccctaagaagatgttattttgttgggttttgttccccctccatctcgattctcgtacccaactaaaaaaaaaaaaataaagaaaaaatgtgctgcgttctgaaaaataactccttagcttggtctgattgttttcagaccttaaaatataaacttgtttcacaagctttaatccatgtggattttttttttcttagagaaccacaaaacataaaaggagcaagtcggactgaatacctgtttccatagtgcccacagggtattcctcacattttctccatagaagatgctttttcccaaggctagaacgacttccaccatgatgaatttgctttttaggtcttaattatttcacttctttttagaaacttaggaagaagtggataatcctgaggtcacacaatctgtcctcccagaaatgaacaaaagtcatcaccttttctgcttgctacacaggcaacgattcccccatcagctgcccggaccctttggcctggcttggtgtgcaggcctgtctgtttgcttaaagtcagtgggttctggtgcagggagtgagaagtgggggaagtgaaagggaaagcatccgtgagaaagcggccacggttttccctccttgtgtgcccatggggcaccagctcatggtctttttcagtcatcccagtttgtacagacttagcttctgaactctaagaatgccaaagggaccgacgagactccccatcacagcgagctctgtccttacatgtatttgatgtgcatcagcggaggagaacactggcttggccctgctccgctgagtgtctgtgaaatacctctactttccctcccatatccagaacaaaatgatacttgacatccttccacaaaagtcagcctaaagaagttatggtatcatatgttaaactaagctttcaaaaaccttagtgaaatagcaagtgactgctttcaagcagcagtcgacatgtaaatgaaggtgttcttagaattcgcattttgccagctcagcgcacctccacaacgaatgaaatgctccgtatgatttgcacaaatgacatagacctccccaaaagttaactggctctccttcctcacacagttcatcataacccaaccccccacccccgggtcatgaaaatcacagaacttataaacacattgaaccctagatctcaggcttcctgacctaccgccagtggccccttgctggccaccctatagggtcctccttccctggcagccccccatgtgggagaaatacctgattctcccaatctgcagtgggagagctttgctgaattccatcccaaagtcaaacatgggcaagaggtgaggatttcacttttaccctcaagtccgatttgtctgtgattttaaactaactgtgtatgtattgatgtttggaagattgtttgaattttaaagtgataatagtacttaatgttatccagtattgttcattaaatggtgttatcctaaagctgcacttgggatttttacctaacgctttactgattctctcaagcacatggcaaagtttgatttgcactccgttcatttctgacacgttttgctgcctcctacctttctaagcgtcatgcaaattcgagaatggagaaggacgctgccggtccctgagcggtgtggagagggcggaaggtggactccagcgcagcttgaggggctgaggacggaggctgcagcatctgtgtcgttctactgagcacgcttctctgcctcgctcctgactcagcactttgttcactggctcagcagttatgtttacacatcatttttatgttcctgctttgtaattcatgtttgagatgggtggccactgtacagatatttattacgctttccagactttctgaatagatttttttgaataaacatggttttatgaagtgtaatctttttctagcctaacaat

SEQ ID NO: 1900 - protein, 733 aa, Homo sapiens
MDLSMKKFAVRRFFSVYLRRKSRSKSSSLSRLEEEGVVKEIDISHHVKEGFEKADPSQFELLKVLGQGSYGKVFLVRKVKGSDAGQLYAMKVLKKATLKVRDRVRSKMERDILAEVNHPFIVKLHYAFQTEGKLYLILDFLRGGDLFTRLSKEVMFTEEDVKFYLAELALALDHLHSLGIIYRDLKPENILLDEEGHIKITDFGLSKEAIDHDKRAYSFCGTIEYMAPEVVNRRGHTQSADWWSFGVLMFEMLTGSLPFQGKDRKETMALILKAKLGMPQFLSGEAQSLLRALFKRNPCNRLGAGIDGVEEIKRHPFFVTIDWNTLYRKEIKPPFKPAVGRPEDTFHFDPEFTARTPTDSPGVPPSANAHHLFRGFSFVASSLIQEPSQQDLHKVPVHPIVQQLHGNNIHFTDGYEIKEDIGVGSYSVCKRCVHKATDTEYAVKIIDKSKRDPSEEIEILLRYGQHPNIITLKDVYDDGKFVYLVMELMRGGELLDRILRQRYFSEREASDVLCTITKTMDYLHSQGVVHRDLKPSNILYRDESGSPESIRVCDFGFAKQLRAGNGLLMTPCYTANFVAPEVLKRQGYDAACDIWSLGILLYTMLAGFTPFANGPDDTPEEILARIGSGKYALSGGNWDSISDAAKDVVSKMLHVDPHQRLTAMQVLKHPWVVNREYLSPNQLSRQDVHLVKGAMAATYFALNRTPQAPRLEPVLSSNLAQRRGMKRLTSTRL

SEQ ID NO: 1901 - DNA, 1932 bp, Homo sapiens
gacccgctcgctcgctcgccagccgtccccgcgccccgcgtccccgcgccagccgcctcctggcctcgggcgccgcgcatccaggaaggaagcagccaccctcgccatggcctccccgcccgcctgcccctcggaggaggacgagagcctgaagggctgtgagctgtacgtgcagctgcacgggatccagcaggtcctcaaagactgtatcgtccacctctgcatctccaagcccgaacgccccatgaagttcctccgggagcacttcgagaagctggagaaggaagaaaacaggcagattttggcgcggcaaaagtcaaactcacagtcggactcccatgatgaggaggtgtcgcccacccccccgaaccctgtggtgaaggcccgccgccggcgaggaggcgtgagtgccgaggtgtacaccgaggaggacgccgtgtcctacgtcaggaaggtgattcccaaggactacaaaaccatgactgcgctggccaaggccatctccaagaacgtgctcttcgctcacctggatgacaacgagaggagtgacatattcgatgccatgttccctgtcactcacatcgctggggagactgttatacagcaagggaatgaaggagacaacttctatgtcgttgatcaaggggaagtggatgtgtacgtgaacggagagtgggtgaccaacatcagcgagggaggcagcttcggggagctggcgctcatctacggcacccccagggctgcgaccgtgaaagccaagacggacctcaagctctgggggatcgaccgggacagctaccggcgcatccttatgggcagcacgctgaggaaacgcaagatgtacgaggagttcctcagcaaggtctccatcctagagtccctggagaagtgggagcgtctgaccgtggcggatgcgctggagcccgtccagtttgaagatggagagaaaattgtggtccagggagagcctggggacgacttttacatcatcacggagggcaccgcgtccgtgctgcagcgccggtcccccaatgaggagtacgtggaggtggggcgcctgggaccctctgactacttcggggagattgcactgctgctgaaccggccccgggcggccactgtcgtggcccgggggcccctcaagtgtgtgaagctggaccggccccgcttcgagcgtgtgctggggccctgctctgagatcctcaagaggaacattcagcgttacaacagcttcatctccctcaccgtctgagcacagctcccgccctgcagccccagctccccagtgtggtggccgtgccctgctcgtctgtgtcgggggcccgggagccgctgtgtgaggtgtgggccgggtggggctgggtcccggcagcgtgaggactgccccttccccggactcactttttggaataaatgatcaccttgtgcatttccaaatcaaaggacaagcggacaaaatgcatcccaagatcaaggaagggacaggccagcttcctccccacacgcctccccggctgcctctgtgggcttctcctggggggcccaccccacccctgccagtctcctggagatgcttgaggatcggtcctccccagaaccaggccaggacgttgcccctggggcctggtgaccctgtgaggtcaggtcccccagattgaggtctgagtgtgggcaagtgtgtcaaaaggggctgccccccaggggagatgaggctgagagcagggagttgaggccgaagaagtcaaggcccctcccgcaaatgtgtacccctgcccgcgccactgcaccccgccgcacccccacctcccccgggggccctgctgcggatgccggagtgggagagtctctgagctgtgagattgatcttgcccctaattggagaggaagccgggcgccaagacacacggggctcctgccttgggagccagggcc

SEQ ID NO: 1902 - protein, 381 aa, Homo sapiens
MASPPACPSEEDESLKGCELYVQLHGIQQVLKDCIVHLCISKPERPMKFLREHFEKLEKEENRQILARQKSNSQSDSHDEEVSPTPPNPVVKARRRRGGVSAEVYTEEDAVSYVRKVIPKDYKTMTALAKAISKNVLFAHLDDNERSDIFDAMFPVTHIAGETVIQQGNEGDNFYVVDQGEVDVYVNGEWVTNISEGGSFGELALIYGTPRAATVKAKTDLKLWGIDRDSYRRILMGSTLRKRKMYEEFLSKVSILESLEKWERLTVADALEPVQFEDGEKIVVQGEPGDDFYIITEGTASVLQRRSPNEEYVEVGRLGPSDYFGEIALLLNRPRAATVVARGPLKCVKLDRPRFERVLGPCSEILKRNIQRYNSFISLTV

SEQ ID NO: 1903 - DNA, 3507 bp, Homo sapiens
tggccggcgacgcgggcaagatggcggcgctgggggtggcggaggccgtggcggccccacacccggctgagggggccgagacggctgaggcggtggagctgagccgcgccctgagccgcctgctgccggggctggaggccgacagcaagccgggccggcggcgcgccttggaggccctgcggcgcgcgctggaggagccaggccctgccgccgaccccaccgctttccagggcccctgggcgcgcctactgctgccgcgcttgctgcgctgcctgagcgaccccgccgagggctgccgcgcgctggcagtgcacctgctggatctgggcctgcgccgcgccgcgcggccacgcgatgccctgccgcgcctgctgcccgcgctcgccgcgcgcttggccggccacgtgcccgcgcgccgcccgcccgaggcctgtgaggagctgcgcctggcgcttgtgcagctgctgggcctggccgtggacctgtgcggcgccgcgctcgcgccccacctggacgacgctctgcgcgcgctgcgctgctccctgctcgaccccttcgccgccgtgcgccgcgagagctgcagctgcgccgccgccctggcgcaggccacgccagaccacttccacatgcagtcggagtctctgatcgggcccctgatgcagaccatctcccaccagcactggaaggtccgtgtggccgccattgaagccacaggcgcagtgatccattttggcaacgggaagtccgtggacgacgtgctttcccattttgctcagcgactgtttgatgacgtcccgcaggtccggcgggcggtggcctccgtggtgggcggctggctgctgtgtctgcgtgaccgttactccttcttccacaagctcatccctctgctgctcagtagcctcaacgacgaggtgcctgaggtcaggcagctggctgccagcctctgggaggacgttggcctgcagtggcagaaggagaatgaggaggacctgaaggacaagctggactttgcccctcccaccccaccccattaccctccacatgagcgccgccctgtgctgggctgccgggagctcgtcttcaggaacctctccaagatcctccctgccctgtgccacgacatcaccgactgggtggtggggacccgagtgaagtcggcacagctgctcccagtgctgctgctgcatgccgaggaccacgccacgcagcacctggaggtcgtcctccggaccctgttccaggcctgcaccgacgaggaggcagccgtggtccaaagttgtaccagatctgcagagctcgtcgggacgtttgtcagccctgaggtgtttctgaagctgatcttatcgacgctgaagaagacgccctctgcctccggcctcatggtgctggcctccgccatgcggggttgcccccgagaagccctccagccgcacctggcagccatcgccacagagctggcacaggcccacatctgccaggcatctgaaaacgacctctacctggagcgcctgctgctgtgtgtgcaggctctggtgtctgtgtgtcatgaggactgtggcgtggccagcctgcagctcttggacgtgctgctgacaatagtggccctcgcaggtgctaccggcctgagggacaaggcacaggagacgatggactcactggccatggtggagggtgtcagcagctgccaggacctctaccgcaagcacattggtcccctcctggagcgggtgaccgcgtcgcaccttgactggaccgcacactcgccggagctcctgcagttcagtgtcatcgtcgcacagtcaggccctgccctgggagaagccctgccacacgtcgtgcccacgctgagggcctgtctgcagccctcccaagacccgcagatgcgcctgaagctgttctccatcctgtccaccgtgctgctcagagccacggacaccatcaactcccaggggcagtttcccagctacctcgagacggtgacaaaggacatcctggcccccaatctgcagtggcatgcggggaggacagccgcggccatccgcacggctgccgtgtcctgcctctgggcgctcaccagcagcgaggtcctgtcggcagagcagatacgggacgtgcaggaaacactgatgccccaggtcctgaccaccctggaggaggattcgaagatgacgcgactgatctcatgccgtattatcaacacgttcttaaaaacctcgggcggcatgacggatccagagaaactcatcaggatttatcctgaactcttaaaacgcctagatgacgtgtccaacgatgtgaggatggcagccgcctccaccttggtcacctggctgcagtgtgtcaagggtgccaacgcaaaatcctactatcagagcagtgtccagtacctgtaccgagagttgctggttcaccttgacgatccagagagggccatccaggatgcaattttagaggtcctcaaagagggcagcgggctgttcccagatctcctggtgagggagacggaggccgtcatccacaagcaccgctcggccacctactgcgagcagctcctgcagcatgtgcaggccgtgccagccacacagtgaccacgctggtttcagccacggcacacccttgtccccacctgagccagagtttgtggcatttaaatctcataaacaaggcacctctgtgccagcagtgagactgtgacagcaagaatgtactcctcaggacacctgcccgctctttccctggaataacagcctctgagtggattctgcatgttatgtgatttgttctgttcatcgagagggctcccaaacatctgcagctgatttgaaattaaaagtaagtcgcagccgctcctcccgcagccacttcagcagcatcttagattttaagcctcacgtgcgcagctggttcatgaactattggctgcatcctgcttaggtgcccaccaagaaggtttttacctacttaacaaaaaagaaagaagccaaagtgattagaaagaaatgaaatctctttttgggttctgtctactgaaatttaatatctcagtgaacagactaaaaggaatttagaatcctaacaacttaccagatttctcctgttttaaatatactgggactttaaaggttatatgtccggtcaccgtatgttttaagtcggtgttaatgctaacagtgttgaaaacaatatttcatgagatctaattgtggttgcccctataggtagcaggaaagtaaagttgcatttccctctcgcacattctacacccaagtgcctaaaagatctcattgtaagtgggtagtgttaccggaagccattgtgttcacacgggggaaatgccgtatatatttttcaacaaatattaacgtttatactttcatgtttgaaaatttaattaaaaatatttgttttaaaaaaaaaaaaaaaaaaaaaaaaaaaaaaaaaaaaaaaaaaaaaaaaaaaaaaaaaaaaaaaaaaaaaaaaaaaaaaaaaaaaaaaaaaaaaaaaaaa

SEQ ID NO: 1904 - protein, 855 aa, Homo sapiens
MAALGVAEAVAAPHPAEGAETAEAVELSRALSRLLPGLEADSKPGRRRALEALRRALEEPGPAADPTAFQGPWARLLLPRLLRCLSDPAEGCRALAVHLLDLGLRRAARPRDALPRLLPALAARLAGHVPARRPPEACEELRLALVQLLGLAVDLCGAALAPHLDDALRALRCSLLDPFAAVRRESCSCAAALAQATPDHFHMQSESLIGPLMQTISHQHWKVRVAAIEATGAVIHFGNGKSVDDVLSHFAQRLFDDVPQVRRAVASVVGGWLLCLRDRYSFFHKLIPLLLSSLNDEVPEVRQLAASLWEDVGLQWQKENEEDLKDKLDFAPPTPPHYPPHERRPVLGCRELVFRNLSKILPALCHDITDWVVGTRVKSAQLLPVLLLHAEDHATQHLEVVLRTLFQACTDEEAAVVQSCTRSAELVGTFVSPEVFLKLILSTLKKTPSASGLMVLASAMRGCPREALQPHLAAIATELAQAHICQASENDLYLERLLLCVQALVSVCHEDCGVASLQLLDVLLTIVALAGATGLRDKAQETMDSLAMVEGVSSCQDLYRKHIGPLLERVTASHLDWTAHSPELLQFSVIVAQSGPALGEALPHVVPTLRACLQPSQDPQMRLKLFSILSTVLLRATDTINSQGQFPSYLETVTKDILAPNLQWHAGRTAAAIRTAAVSCLWALTSSEVLSAEQIRDVQETLMPQVLTTLEEDSKMTRLISCRIINTFLKTSGGMTDPEKLIRIYPELLKRLDDVSNDVRMAAASTLVTWLQCVKGANAKSYYQSSVQYLYRELLVHLDDPERAIQDAILEVLKEGSGLFPDLLVRETEAVIHKHRSATYCEQLLQHVQAVPATQ

SEQ ID NO: 1905 - DNA, 3840 bp, Homo sapiens
agagcgtcttctcgggcctgggcggcgcagacgaggcctgaggcggcggcgcgaggcagttccagctattcttcagatgctctggattttgagacggagcacaaattggaccctgtatttgattctccacggatgtcccgccgtagtttgcgcctggccacgacagcatgcaccctgggggatggtgaggctgtgggtgccgacagcggcaccagcagcgctgtctccctgaagaaccgagcggccagaacaacaaaacagcgcagaagcacaaacaaatcagcttttagtatcaaccacgtgtcaaggcaggtcacgtcctctggcgtcagccacggcggcactgtcagcctgcaggatgctgtgactcgacggcctcctgtattggacgagtcttggattcgtgaacagaccacagtggaccacttctggggtcttgatgatgatggtgatcttaaaggtggaaataaagctgccattcagggaaacggggatgtgggagccgccgccgccaccgcgcacaacggcttctcctgcagcaactgcagcatgctgtccgagcgcaaggacgtgctcacggcgcaccccgcggcccccgggcccgtgtcgagagtttattctagggacaggaatcaaaaatggaaggcagcctctggagtgttctggtggctggggattggatggtaccagtttgttactttgatttcttggctgaatgtgtttcttcttaccaggtgccttcgaaacatctgcaagtttttagtcttgctcatcccactcttccttttactagcaggtctctccttacggggccagggcaatttcttttcgttcttgcccgtgttgaactgggcaagcatgcatagaacacagcgggtggatgacccccaggacgtgtttaaacccacgacttctcgcctgaagcagcctctgcagggtgacagtgaggcttttccgtggcattggatgagtggcgtggagcagcaggtggcctctctgtctggacagtgccaccaccatggtgagaatctccgagagctgaccactttgctacagaagctgcaggctcgggtggaccagatggaaggcggcgctgccgggccgtcagcttcggtcagagacgctgtgggacagcccccgagggagactgactttatggcctttcaccaagaacatgaagtgcgtatgtcacacttggaagatattctgggaaaactgagagaaaaatctgaggccatccagaaggaactagaacagaccaagcaaaaaacaatcagtgcggttggtgagcagctcctgcccacagtcgagcacctccagctggagctggatcagctaaagtcagagctgtccagctggcgacacgtgaagaccggctgtgagacagtggatgccgtacaagaaagagtggacgtgcaagtcagagaaatggtgaaactcctgttttccgaagatcagcaaggcggttctctggaacagctgctgcagaggttctcatcacagtttgtgagcaaaggcgacttgcagacgatgctgcgagacctgcagctgcagatcctgcggaacgtcacccaccacgtttccgtgaccaagcagctcccaacctcagaagccgtggtgtctgctgtgagcgaggcgggggcgtctggaataacagaggcgcaagcacgtgccatcgtgaacagcgccttgaagctgtattcccaagataagaccgggatggtggactttgctctggaatctggtggtggcagcatcttgagtactcgctgttctgaaacttacgaaaccaaaacggcgctgatgagtctgtttgggatcccgctgtggtacttctcgcagtccccgcgcgtggtcatccagcctgacatttaccccggtaactgctgggcatttaaaggctcccaggggtacctggtggtgaggctctccatgatgatccacccagccgccttcactctggagcacatccctaagacgctgtcgccaacaggcaacatcagcagcgcccccaaggacttcgccgtctatggattagaaaatgagtatcaggaagaagggcagcttctgggacagttcacgtatgatcaggatggggagtcgctccagatgttccaggccctgaaaagacccgacgacacagctttccaaatagtggaacttcggattttttctaactggggccatcctgagtatacctgtctgtatcggttcagagttcatggcgaacctgtcaagtgaagacactactcattatttttgtacatttttgtatatactgggacagcgtgaaacactggaatccttcatggacgagggcatatacaatgatgggacagtgccacactccttcaataaacgtggctgctggccagaggacgtgagcgtgtgacgggcgccttggcgccacctgttgggtgctcactgcctctgcaggtgcagaggggtcagcagcaggagaagcgtgttgaacacgtggctctcagacactccttgtttttaacgggaagctctttgcatttgcatttcctcaacaaaggagcaaagcagaggaagctgagagtctggcgtgttcttgacgctttggtcttcagccttgcactggctcttctaaaggacttttggagggcagataatttcatctgttaaatccaacacacatttctttcagggaaaaacaatgtcaccaaattttcagagttctaaactcctttccttcaagccggaattttccttttttcagcaccagtaggtactaagtctccagatggggaaataactaaaatgtgtttttctgctttgttcgctcttacttctgaggaaggtttccagtcaggactcgctgtaccaatatccatggaggaatatgggagcgtttcgctctccttgtaggctgaagtcagtctgacttgaaggggcctggtttggatctaagcaaacacccagatggggttctctggtctcagcaaggcttttcctgttgggagtcacagtaaacagaaacccaaaaatctcatcttgggtgttttcagggcttgttttgagttttgctgaatagggagcgcaagacgccctgagcctccctctcactggtggtgataagaggagccgtctggtgtgtcagggtcacgaacccgttacatttcaggacgatcctttttccttcagcagcatttcttactggctgtggctggaatctgccttttatcacagctgtcaccattctcacgtgattcttgtgagactctttttggttataattactatttaatatttagactattttactgagcagactttataaatgagatatctacaaggcacttaaagtgttacagatgttttaccttaagaattatttaagttgtgttgggttaagacagttttcagtgtaccgtaaatgttgtgttttcagaaaaagacaaaacgatggtgctgactggttttctgtatattgcacaacagtcctcaaatacactgatgtatgaaactattcatacatcaagcagcatttttttcactctccttagaattggaactatgcagttaaggcagataaaatgtacagatgtttcatatattacaggttacatatataaatcaaaatttcctatataaaactgatttgggatttggggtggaaatattttgaatattaatttatttttaaagatgcaagataggactttgtgcaatgtatttttgtaaatgcttttcaaaatatctgtctttggtagtgcttctgctgctgccaccaaattgataagatgctattaagaggtttaaataaagagttttaatttttaaaagggcatgggatataaacagtcaaaaaaaaaa

SEQ ID NO: 1906 - protein, 702 aa, Homo sapiens
MSRRSLRLATTACTLGDGEAVGADSGTSSAVSLKNRAARTTKQRRSTNKSAFSINHVSRQVTSSGVSHGGTVSLQDAVTRRPPVLDESWIREQTTVDHFWGLDDDGDLKGGNKAAIQGNGDVGAAAATAHNGFSCSNCSMLSERKDVLTAHPAAPGPVSRVYSRDRNQKWKAASGVFWWLGIGWYQFVTLISWLNVFLLTRCLRNICKFLVLLIPLFLLLAGLSLRGQGNFFSFLPVLNWASMHRTQRVDDPQDVFKPTTSRLKQPLQGDSEAFPWHWMSGVEQQVASLSGQCHHHGENLRELTTLLQKLQARVDQMEGGAAGPSASVRDAVGQPPRETDFMAFHQEHEVRMSHLEDILGKLREKSEAIQKELEQTKQKTISAVGEQLLPTVEHLQLELDQLKSELSSWRHVKTGCETVDAVQERVDVQVREMVKLLFSEDQQGGSLEQLLQRFSSQFVSKGDLQTMLRDLQLQILRNVTHHVSVTKQLPTSEAVVSAVSEAGASGITEAQARAIVNSALKLYSQDKTGMVDFALESGGGSILSTRCSETYETKTALMSLFGIPLWYFSQSPRVVIQPDIYPGNCWAFKGSQGYLVVRLSMMIHPAAFTLEHIPKTLSPTGNISSAPKDFAVYGLENEYQEEGQLLGQFTYDQDGESLQMFQALKRPDDTAFQIVELRIFSNWGHPEYTCLYRFRVHGEPVK

SEQ ID NO: 1907 - DNA, 2106 bp, Homo sapiens
agaagggcgtcgggcggccgtcgggacggaagccgggaggcgctgccgaccgcgcctgcgacagcgtcagccctgcgcggagcgccggcccgatggcggcggcggcggcgatggccgagcaggagagcgcccggaacggcggccgcaaccgcggcggcgtccagcgtgtggagggcaagctgcgcgccagcgtcgagaagggcgactactacgaggcgcaccagatgtaccggaccctgttcttcaggtacatgtcccagagcaagcacacggaggcccgggagctcatgtactcgggagccctgctcttcttcagccatggccagcaaaacagtgcagcagacttgtccatgctggtcctggagtccctggagaaggcggaagtggaggtggctgacgagctgctggaaaatctggctaaagtgttcagcctgatggaccccaactctcctgagcgcgtgacctttgtgtccagagccctgaagtggtccagtgggggctccgggaagctgggccacccccggctgcaccagctgctggccctcaccctgtggaaagaacaaaactattgtgagtcgaggtatcattttctgcactcagcggacggggagggctgtgccaacatgctggtggagtattccacgtcccgcggcttccgcagcgaggtggacatgttcgtggcccaggccgtgctacagtttctctgtttaaaaaacaaaagtagcgcatcggtggtcttcacgacgtacacccagaagcacccgtccatcgaggacgggcctccgtttgtggagccgctgcttaacttcatctggttcctgctgctggctgtggacggtgggaagctgacggtgttcactgtgctgtgtgagcagtaccagccatccctccggcgggaccccatgtacaacgagtacctcgaccgcataggacagctgttcttcggcgtcccgcccaagcagacgtcttcctacgggggcctgctcgggaaccttctgaccagcctcatgggctcctcagagcaggaggatggggaggagagccccagcgacggcagccccatcgagctggactgaactggccaggccacgtggagacaccacggtcgacgacggctggagggacgtttcagaggcgagtcctgggtggctcctcgccttgggggctcctggccctgaggctggcggtggccgcatgccggcgcgtgtctgtttctgtgcggcggctcagggtggcgcggctgctgctcactgtgctgctgggacccaagagtggggcgtcgcccctgctggccgccgcgtcccccgagattgacccacaataaagcacaggccttaccgcggcgtcaccctctcccactcctttgttctgggtcctttcgggagggctgatgggcagcacaggaggcccgtcctcggggggctgcgcacatcacgctccttgccgggcgtccggcacagctgcggtcaccaaagcaggtgctggccctcggacctgagagcccagccagggcccatgtggtctgcaaatgggagcggctgtttttgaacacggggtcattctgcagtcaggacgaaccggtccccgtcgcagacggagtgcacgtgccctgcgccacatcctcacgctcggtggagggacgcgtgcggcgggacggtgcctacgggtacttgcagctgtgtcccatgtggcatcccagagctgcgccctgctggtctctgtgagcgccacgctgctgtgctggaaatgccgctttaaaaagggataccgtgggactctgcccgtctctttcataacgcaatatttatttgtattgggtgatgattgattctttcgacctaacattttgggttttaaccaaataaccggtccaggagtgagcagctccgttctgtcagatgctactccaaatgttaccagaacgatgacaaaaggggagacgctctattttttcacagttaaatgacagttgtagattgatacgcagttgtgcatgggaaggggaaacgcacagctttatttactgtaaagtggaatttcaggaaggcttgtgtgaaccgttgcgcataaataaaccctttctaccggaaaaaaaaaaaaaaaaaa

SEQ ID NO: 1908 - protein, 327 aa, Homo sapiens
MAAAAAMAEQESARNGGRNRGGVQRVEGKLRASVEKGDYYEAHQMYRTLFFRYMSQSKHTEARELMYSGALLFFSHGQQNSAADLSMLVLESLEKAEVEVADELLENLAKVFSLMDPNSPERVTFVSRALKWSSGGSGKLGHPRLHQLLALTLWKEQNYCESRYHFLHSADGEGCANMLVEYSTSRGFRSEVDMFVAQAVLQFLCLKNKSSASVVFTTYTQKHPSIEDGPPFVEPLLNFIWFLLLAVDGGKLTVFTVLCEQYQPSLRRDPMYNEYLDRIGQLFFGVPPKQTSSYGGLLGNLLTSLMGSSEQEDGEESPSDGSPIELD

SEQ ID NO: 1909 - DNA, 2378 bp, Homo sapiens
aattccctccgccgcggtcgctgagcgagtgcggcgggaatgcggaaccggcgcgcgggctgaggccgcccgggatggcgcaggggcggcggcggcgggcggcctgcgcggggccctagcgagccgggctgacgctcccggccccggccccggcatcggcatcgcgggcgcatcgcggccatggccaaggagcggcgcagggcggtcctggagctgctgcagcggccggggaacgcgcgctgcgcggactgcggcgccccggatcccgactgggcctcctacactctgggcgtcttcatctgcctgagctgctcgggaatccaccggaatatcccccaggtcagcaaggtgaagtccgtccgcctggacgcctgggaggaggcccaagtggagttcatggcctcccacgggaacgacgccgcgagagccaggtttgagtccaaagtaccctccttctactaccggcccacgccctccgactgccagctccttcgagagcagtggatccgggccaagtacgagcgacaggagttcatctacccggagaagcaggagccctactcggcagggtaccgtgagggttttctctggaagcgtggccgggacaacgggcagtttttgagccggaagtttgtgctgacagaacgagagggtgctctgaagtatttcaacagaaatgatgccaaggagcccaaggccgtgatgaagatcgagcacctgaatgccaccttccagccggccaagatcggccacccccacggcctgcaggtcacctacctgaaggacaacagcacccgtaacatcttcatctaccatgaggacgggaaggagattgtggactggttcaatgcactccgagctgctcgcttccactacctgcaggtggcattcccaggggccagcgacgcagatctggtgccaaagctctccaggaactacctgaaggaaggctacatggagaagacggggcccaagcaaacggaaggcttccggaagcgctggttcaccatggatgaccgcaggctcatgtacttcaaagaccccctggacgccttcgcccgaggggaagtcttcattggcagcaaggagagtggctacacggtgctgcatgggttcccgccgtccacccagggccaccactggccacatggcatcaccatcgtcacgcccgaccgcaagtttctgtttgcctgcgagacggagtccgaccagagggagtgggtggcggccttccagaaggcggtggacaggcccatgctgccccaggagtacgcagtggaggcgcacttcaagcataaaccttagcgagtgcggctggaggaccacggacattggactcactgtggctggacggaggggacccgtggatgggggggctctggcgtcctgaggccacctggccccacctgctcctcagggcagcccggcgcggccaggtagggcccgagcttcagcttccaggatgcttctctggaacctcaaggcaggcagcccaggccctgggcctgatctctaaccccgtcatgctgctgctgaccacacccagccaacctgcccctccctgacccggggccccctttcctccagggcccagtctggctcccgagctcagacacagcccccaggagccgcccaccacggctgtgggaacttccaggcctcagcgcagagccctgcttggggccagcacggtgggcagctgccggccgctggggactgggccctgctcgcatgccgccccgccctccccccacctccacgactatttattgagcgcctgttgtgtgtcacggggctatgagggccgtggggtgtttgggtggattatccacacaggtcccggcccctgcccgggctggagttgccacagcctgtgctcctggtcctcacctggaggggccagcaggctgccgtcccaccacacgtggcctctgcgcccagcacggtgctcgccgacagtggtgtctgaacccttggggacgagggcctgggccgcggtgaggccaccagaggcaggagtggccctgggggtcccgggcactgtcgcgcttgctgcaggcggcccagccgtgtatttatttttcacctatctccttcctgtcaaggcaggccgggctccagggctccccttgcgtggggcatgtaggtgggggaggcgtctgcaggtcacctggggggcccagccctctcccagccttgcctggctgagctgtgttccaggggagccctggacaagccctcataggcagggagggggtttccgaggccaggcatccgccgccccgtgtcgcatcctggaataaaatgtggctctggcatggttaaaaaaaaaaaaaaaaaaaaaaaaaaaaaaaaaaaaaaaaaaaaaaaaaaaaaaa

SEQ ID NO: 1910 - protein, 374 aa, Homo sapiens
MAKERRRAVLELLQRPGNARCADCGAPDPDWASYTLGVFICLSCSGIHRNIPQVSKVKSVRLDAWEEAQVEFMASHGNDAARARFESKVPSFYYRPTPSDCQLLREQWIRAKYERQEFIYPEKQEPYSAGYREGFLWKRGRDNGQFLSRKFVLTEREGALKYFNRNDAKEPKAVMKIEHLNATFQPAKIGHPHGLQVTYLKDNSTRNIFIYHEDGKEIVDWFNALRAARFHYLQVAFPGASDADLVPKLSRNYLKEGYMEKTGPKQTEGFRKRWFTMDDRRLMYFKDPLDAFARGEVFIGSKESGYTVLHGFPPSTQGHHWPHGITIVTPDRKFLFACETESDQREWVAAFQKAVDRPMLPQEYAVEAHFKHKP

SEQ ID NO: 1911 - DNA, 823 bp, Homo sapiens
gggtccttcaggtaggaggtcctgggtgactttggaagtccgtagtgtctcattgcagataatttttagcttagggcctggtggctaggtcggttctctcctttccagtcggagacctctgccgcaaacatgctccgccagatcatcggtcaggccaagaagcatccgagcttgatccccctctttgtatttattggaactggagctactggagcaacactgtatctcttgcgtctggcattgttcaatccagatgtttgttgggacagaaataacccagagccctggaacaaactgggtcccaatgatcaatacaagttctactcagtgaatgtggattacagcaagctgaagaaggaacgtccagatttctaaatgaaatgtttcactataacgctgctttagaatgaaggtcttccagaagccacatccgcacaattttccacttaaccaggaaatatttctcctctaaatgcatgaaatcatgttggagatctctattgtaatctctattggagattacaatgattaaatcaataaataactgaaacttgatatgtgtcacttttttatgctgaaagtatgctctgaactttagagtataggaaattaactattagaatttaaagaatttcttgaatttctgtagtttgaaaatacgactttaagctgctttagtaaaacacttccattttgtgtatagactgttggtaacttcactagagcatacataacaactggaactggaaattatacaaaagtaaattgggaaggatactccagcatctgacactggcaaaatggaaacctttgagtttctctt

SEQ ID NO: 1912 - protein, 81 aa, Homo sapiens
MLRQIIGQAKKHPSLIPLFVFIGTGATGATLYLLRLALFNPDVCWDRNNPEPWNKLGPNDQYKFYSVNVDYSKLKKERPDF

SEQ ID NO: 1913 - DNA, 3421 bp, Homo sapiens
gtatccgggtcgctgctttccctattgtctgaggcagccgccctcgcgctgtgcaatttctggtctttcgttgcttctggtccaggctaataaagtttttctttctttaattttttttcttctagttttaacgggagaaattaactccccggggccgccgggttgactgcgctgcctgggccggaggtcttctccggccagggagcgctgtgggaaggggctcgagcggccagggccaggcgaggccgggggggcggggggttaggggaccgcggggctactcttgggagcgcccctgtccggctggctgcgcgccggttttaaatagcatctttcggacttgtcttcgcggccccagtccccgacctcggcgctgcctgggctcctgcagcctctccctaagtcttctccaaacgaccacctcacggattccttatggatcgcagctccaagaggaggcaggtgaagcctttggcagcttctctgctggaagctcttgattatgatagttcagatgacagtgattttaaagttggagatgcctcagattctgaagggagtggtaatggaagtgaagatgcttcaaaggacagtggagaaggttcctgtagtgattctgaagaaaatattttagaagaagaactgaatgaagatattaaagtaaaagaagaacaacttaaaaattctgcagaggaagaagtactatcatcagaaaaacaattaattaaaatggaaaagaaggaagaagaagaaaatggagaaagacctagaaagaaaaaggagaaagagaaggaaaaagaaaaggaaaaggagaaagagaaggaaagagagaaggaaaaagaaaaagcaacagtatctgagaatgtggctgcttctgctgctgccaccacaccagccacaagtcctcctgctgttaacacatccccttctgttcccactacgacaaccgctacagaggaacaagtcagcgagccaaaaaaatggaaccttcgacgaaaccgaccacttctggattttgtgtccatggaagagctgaatgacatggatgactatgacagtgaggatgacaatgattggcgacctactgtagtaaagagaaaagggagatctgcgtctcagaaagagggaagtgatggagacaatgaggatgatgaagatgagggaagcgggagtgatgaagacgagaatgatgaaggcaatgatgaagatcatagtagccctgccagtgaagggggttgcaagaagaagaagagtaaagttcttagcagaaacagtgctgatgatgaggaactgaccaatgatagcctgaccctatctcaaagcaagagtaatgaggactcgctgattcttgagaagagtcaaaactggagctctcaaaaaatggaccatattctgatttgctgtgtttgtctgggagataatagtgaggacgctgatgaaataattcagtgtgacaattgtggcattacagtccatgaaggttgttatggagttgatggagagagtgactctattatgagttcagcttctgaaaactccactgaaccttggttttgtgatgcctgtaaatgtggtgtttctcctagctgtgaactgtgtcctaatcaggatggaattttcaaggagacagatgctggaagatgggttcatattgtttgtgccctgtatgttcctggagtagcctttggagatattgacaaattacgaccagtaacactaacggaaatgaactattccaaatatggtgccaaggagtgtagcttttgtgaagaccctcgctttgctagaactggggtttgcattagctgtgatgcagggatgtgcagagcctatttccatgtgacctgtgctcaaaaggaaggtctgctttcagaggcagcggcggaagaggatatagcagatccattctttgcttattgtaagcaacatgcagataggttagacagaaagtggaagagaaaaaactacttggctctacagtcctattgtaaaatgtctttgcaagagagagagaagcaactatcaccagaagcacaggcaaggatcaatgcccggcttcagcagtatcgtgccaaagcagaactagctcgatctaccagaccccaggcctgggttccaagggaaaaattgcccagaccactcaccagcagtgcttcagctattcgtaaacttatgcggaaagcagaactcatggggatcagtacagatatctttccagtggacaattcagatactagttctagtgtggatggaaggagaaaacataagcaaccagctctcactgcagattttgtgaattattattttgagagaaatatgcgcatgattcaaattcaggaaaatatggctgaacaaaagaatataaaagataaattagagaatgaacaagaaaagcttcatgtagaatataataagctatgtgaatctttagaagaactacaaaacctgaatggaaaacttcgaagtgaaggacaaggaatatgggctttactaggcagaatcacagggcagaagttgaatataccggcaattttgcgagcacccaaggagagaaaaccaagtaaaaaagaaggaggcacacaaaagacatctactcttcctgcagtactttatagttgtgggatttgtaagaagaaccatgatcagcatcttcttttattgtgtgatacctgtaaactacattaccatcttggatgtctggatcctcctcttacaaggatgccaagaaagaccaaaaacagttattggcagtgctcggaatgtgaccaggcagggagcagtgacatggaagcagatatggccatggaaaccctaccagatggaaccaaacgatcaaggaggcagattaaggaaccagtgaaatttgttccacaggatgtgccaccagaacccaagaagattccgataagaaacacgagaaccagaggacgaaaacgaagcttcgttcctgaggaagaaaaacatgaggaaagagttcctagagagagaagacaaagacagtctgtgttgcaaaagaagcccaaggctgaagatttaagaactgaatgtgcaacttgcaagggaactggagacaatgaaaatcttgtcaggtgtgatgaatgcagactctgctaccattttggctgtttggatcctcctttgaaaaagtctcctaaacagacaggctacggatggatatgtcaggaatgtgattcttcatcttccaaggaagatgaaaatgaagctgaaagaaaaaatatatctcaggagctcaacatggaacagaaaaatccaaagaaataaaagattttctgtagtgtttttgaaaagtttgcagcttatgtaatagcagataaaatttctaattgtaaaatgttaaattgtaaaatctaatttgcaaaatgttctcaataaagtcattcaaaatgaaaaaaaaaaaaaa

SEQ ID NO: 1914 - protein, 948 aa, Homo sapiens
MDRSSKRRQVKPLAASLLEALDYDSSDDSDFKVGDASDSEGSGNGSEDASKDSGEGSCSDSEENILEEELNEDIKVKEEQLKNSAEEEVLSSEKQLIKMEKKEEEENGERPRKKKEKEKEKEKEKEKEKEREKEKEKATVSENVAASAAATTPATSPPAVNTSPSVPTTTTATEEQVSEPKKWNLRRNRPLLDFVSMEELNDMDDYDSEDDNDWRPTVVKRKGRSASQKEGSDGDNEDDEDEGSGSDEDENDEGNDEDHSSPASEGGCKKKKSKVLSRNSADDEELTNDSLTLSQSKSNEDSLILEKSQNWSSQKMDHILICCVCLGDNSEDADEIIQCDNCGITVHEGCYGVDGESDSIMSSASENSTEPWFCDACKCGVSPSCELCPNQDGIFKETDAGRWVHIVCALYVPGVAFGDIDKLRPVTLTEMNYSKYGAKECSFCEDPRFARTGVCISCDAGMCRAYFHVTCAQKEGLLSEAAAEEDIADPFFAYCKQHADRLDRKWKRKNYLALQSYCKMSLQEREKQLSPEAQARINARLQQYRAKAELARSTRPQAWVPREKLPRPLTSSASAIRKLMRKAELMGISTDIFPVDNSDTSSSVDGRRKHKQPALTADFVNYYFERNMRMIQIQENMAEQKNIKDKLENEQEKLHVEYNKLCESLEELQNLNGKLRSEGQGIWALLGRITGQKLNIPAILRAPKERKPSKKEGGTQKTSTLPAVLYSCGICKKNHDQHLLLLCDTCKLHYHLGCLDPPLTRMPRKTKNSYWQCSECDQAGSSDMEADMAMETLPDGTKRSRRQIKEPVKFVPQDVPPEPKKIPIRNTRTRGRKRSFVPEEEKHEERVPRERRQRQSVLQKKPKAEDLRTECATCKGTGDNENLVRCDECRLCYHFGCLDPPLKKSPKQTGYGWICQECDSSSSKEDENEAERKNISQELNMEQKNPKK

SEQ ID NO: 1915 - DNA, 4259 bp, Homo sapiens
gtatccgggtcgctgctttccctattgtctgaggcagccgccctcgcgctgtgcaatttctggtctttcgttgcttctggtccaggctaataaagtttttctttctttaattttttttcttctagttttaacgggagaaattaactccccggggccgccgggttgactgcgctgcctgggccggaggtcttctccggccagggagcgctgtgggaaggggctcgagcggccagggccaggcgaggccgggggggcggggggttaggggaccgcggggctactcttgggagcgcccctgtccggctggctgcgcgccggttttaaatagcatctttcggacttgtcttcgcggccccagtccccgacctcggcgctgcctgggctcctgcagcctctccctaagtcttctccaaacgaccacctcacggattccttatggatcgcagctccaagaggaggcaggtgaagcctttggcagcttctctgctggaagctcttgattatgatagttcagatgacagtgattttaaagttggagatgcctcagattctgaagggagtggtaatggaagtgaagatgcttcaaaggacagtggagaaggttcctgtagtgattctgaagaaaatattttagaagaagaactgaatgaagatattaaagtaaaagaagaacaacttaaaaattctgcagaggaagaagtactatcatcagaaaaacaattaattaaaatggaaaagaaggaagaagaagaaaatggagaaagacctagaaagaaaaaggagaaagagaaggaaaaagaaaaggaaaaggagaaagagaaggaaagagagaaggaaaaagaaaaagcaacagtatctgagaatgtggctgcttctgctgctgccaccacaccagccacaagtcctcctgctgttaacacatccccttctgttcccactacgacaaccgctacagaggaacaagtcagcgagccaaaaaaatggaaccttcgacgaaaccgaccacttctggattttgtgtccatggaagagctgaatgacatggatgactatgacagtgaggatgacaatgattggcgacctactgtagtaaagagaaaagggagatctgcgtctcagaaagagggaagtgatggagacaatgaggatgatgaagatgagggaagcgggagtgatgaagacgagaatgatgaaggcaatgatgaagatcatagtagccctgccagtgaagggggttgcaagaagaagaagagtaaagttcttagcagaaacagtgctgatgatgaggaactgaccaatgatagcctgaccctatctcaaagcaagagtaatgaggactcgctgattcttgagaagagtcaaaactggagctctcaaaaaatggaccatattctgatttgctgtgtttgtctgggagataatagtgaggacgctgatgaaataattcagtgtgacaattgtggcattacagtccatgaaggttgttatggagttgatggagagagtgactctattatgagttcagcttctgaaaactccactgaaccttggttttgtgatgcctgtaaatgtggtgtttctcctagctgtgaactgtgtcctaatcaggatggaattttcaaggagacagatgctggaagatgggttcatattgtttgtgccctgtatgttcctggagtagcctttggagatattgacaaattacgaccagtaacactaacggaaatgaactattccaaatatggtgccaaggagtgtagcttttgtgaagaccctcgctttgctagaactggggtttgcattagctgtgatgcagggatgtgcagagcctatttccatgtgacctgtgctcaaaaggaaggtctgctttcagaggcagcggcggaagaggatatagcagatccattctttgcttattgtaagcaacatgcagataggttagacagaaagtggaagagaaaaaactacttggctctacagtcctattgtaaaatgtctttgcaagagagagagaagcaactatcaccagaagcacaggcaaggatcaatgcccggcttcagcagtatcgtgccaaagcagaactagctcgatctaccagaccccaggcctgggttccaagggaaaaattgcccagaccactcaccagcagtgcttcagctattcgtaaacttatgcggaaagcagaactcatggggatcagtacagatatctttccagtggacaattcagatactagttctagtgtggatggaaggagaaaacataagcaaccagctctcactgcagattttgtgaattattattttgagagaaatatgcgcatgattcaaattcaggaaaatatggctgaacaaaagaatataaaagataaattagagaatgaacaagaaaagcttcatgtagaatataataagctatgtgaatctttagaagaactacaaaacctgaatggaaaacttcgaagtgaaggacaaggaatatgggctttactaggcagaatcacagggcagaagttgaatataccggcaattttgcgagcacccaaggagagaaaaccaagtaaaaaagaaggaggcacacaaaagacatctactcttcctgcagtactttatagttgtgggatttgtaagaagaaccatgatcagcatcttcttttattgtgtgatacctgtaaactacattaccatcttggatgtctggatcctcctcttacaaggatgccaagaaagaccaaaaacagttattggcagtgctcggaatgtgaccaggcagggagcagtgacatggaagcagatatggccatggaaaccctaccagatggaaccaaacgatcaaggaggcagattaaggaaccagtgaaatttgttccacaggatgtgccaccagaacccaagaagattccgataagaaacacgagaaccagaggacgaaaacgaagcttcgttcctgaggaagaaaaacatgaggaaagagttcctagagagagaagacaaagacagtctgtgttgcaaaagaagcccaaggctgaagatttaagaactgaatgtgcaacttgcaagggaactggagacaatgaaaatcttgtcagatacccttcatgagacccaactctgccacagctcatcctcggaggcaatcccggaaacctcttttataagtgtgattttaaaaatgtggattaaactctcgatagagtacataaagtaaaggagaacagctatattgtcctttctataagcttgtcactgcaaaaagttgccttttgcttgtcaggtttggatagaatataattgattggtttgttacttggactaacaaggcagtagatttgcctgtgtggaattttttttcctatttttcttctttttgctttttttgcacttatcagaaatatttgatgtgtgcattgttgaaaaatactggatacatgtcttgtcagaattgtcgtattaagtaatgtctttccctcttgcttctttggcaaatgttgatacacagtgtttggacttactgaagagttactgaagcctgtgggacttaataaatacaatatgctactccctgttgtgattgaacaatacaaataacaaacaagaaagacaatgcattccattagtctgctattctgtttccttcaacttcatacatagattcatatatgaagtactgcattgtaaaacaactatagactcatattaaatgttatttctatttataatattcagcaaaagtgaaagacttgtgaagcatatgacattctatttttgacttattagtcctagtgtgaaagcattaatattattagcatgaaatttttacttcagattttaagctcatgaataaagatatatctgtgttgatctctagatatttttagtaatacccaaatatattcagtccttattgttttaatataagctttctgtgttcagtataattttatttttctcaaccttaaatatgaacttaggaaataaggagggaagtacaaagattattgactatacaacctaccagctgaaagaaagatcttcatcaacatctgtatctttccagaggtatacagaattaaaatttgatcttcaagctttaatgatccagttttaagtcaacggcagaagtatgttgaatatttcatcactcaatcttgaactgatttagaagagactctttgctgaaattgaattgcacttatacatgtaaattgtcaacatgtaatttggaattttctgattaataaatgtggttttggacatct

SEQ ID NO: 1916 - protein, 888 aa, Homo sapiens
MDRSSKRRQVKPLAASLLEALDYDSSDDSDFKVGDASDSEGSGNGSEDASKDSGEGSCSDSEENILEEELNEDIKVKEEQLKNSAEEEVLSSEKQLIKMEKKEEEENGERPRKKKEKEKEKEKEKEKEKEREKEKEKATVSENVAASAAATTPATSPPAVNTSPSVPTTTTATEEQVSEPKKWNLRRNRPLLDFVSMEELNDMDDYDSEDDNDWRPTVVKRKGRSASQKEGSDGDNEDDEDEGSGSDEDENDEGNDEDHSSPASEGGCKKKKSKVLSRNSADDEELTNDSLTLSQSKSNEDSLILEKSQNWSSQKMDHILICCVCLGDNSEDADEIIQCDNCGITVHEGCYGVDGESDSIMSSASENSTEPWFCDACKCGVSPSCELCPNQDGIFKETDAGRWVHIVCALYVPGVAFGDIDKLRPVTLTEMNYSKYGAKECSFCEDPRFARTGVCISCDAGMCRAYFHVTCAQKEGLLSEAAAEEDIADPFFAYCKQHADRLDRKWKRKNYLALQSYCKMSLQEREKQLSPEAQARINARLQQYRAKAELARSTRPQAWVPREKLPRPLTSSASAIRKLMRKAELMGISTDIFPVDNSDTSSSVDGRRKHKQPALTADFVNYYFERNMRMIQIQENMAEQKNIKDKLENEQEKLHVEYNKLCESLEELQNLNGKLRSEGQGIWALLGRITGQKLNIPAILRAPKERKPSKKEGGTQKTSTLPAVLYSCGICKKNHDQHLLLLCDTCKLHYHLGCLDPPLTRMPRKTKNSYWQCSECDQAGSSDMEADMAMETLPDGTKRSRRQIKEPVKFVPQDVPPEPKKIPIRNTRTRGRKRSFVPEEEKHEERVPRERRQRQSVLQKKPKAEDLRTECATCKGTGDNENLVRYPS

SEQ ID NO: 1917 - DNA, 1125 bp, Homo sapiens
ttctgccctcgagcccaccgggaacgaaagagaagctctatctcgcctccaggagcccagctatgaactccttctccacaagcgccttcggtccagttgccttctccctggggctgctcctggtgttgcctgctgccttccctgccccagtacccccaggagaagattccaaagatgtagccgccccacacagacagccactcacctcttcagaacgaattgacaaacaaattcggtacatcctcgacggcatctcagccctgagaaaggagacatgtaacaagagtaacatgtgtgaaagcagcaaagaggcactggcagaaaacaacctgaaccttccaaagatggctgaaaaagatggatgcttccaatctggattcaatgaggagacttgcctggtgaaaatcatcactggtcttttggagtttgaggtatacctagagtacctccagaacagatttgagagtagtgaggaacaagccagagctgtgcagatgagtacaaaagtcctgatccagttcctgcagaaaaaggcaaagaatctagatgcaataaccacccctgacccaaccacaaatgccagcctgctgacgaagctgcaggcacagaaccagtggctgcaggacatgacaactcatctcattctgcgcagctttaaggagttcctgcagtccagcctgagggctcttcggcaaatgtagcatgggcacctcagattgttgttgttaatgggcattccttcttctggtcagaaacctgtccactgggcacagaacttatgttgttctctatggagaactaaaagtatgagcgttaggacactattttaattatttttaatttattaatatttaaatatgtgaagctgagttaatttatgtaagtcatatttatatttttaagaagtaccacttgaaacattttatgtattagttttgaaataataatggaaagtggctatgcagtttgaatatcctttgtttcagagccagatcatttcttggaaagtgtaggcttacctcaaataaatggctaacttatacatatttttaaagaaatatttatattgtatttatataatgtataaatggtttttataccaataaatggcattttaaaaaattc

SEQ ID NO: 1918 - protein, 212 aa, Homo sapiens
MNSFSTSAFGPVAFSLGLLLVLPAAFPAPVPPGEDSKDVAAPHRQPLTSSERIDKQIRYILDGISALRKETCNKSNMCESSKEALAENNLNLPKMAEKDGCFQSGFNEETCLVKIITGLLEFEVYLEYLQNRFESSEEQARAVQMSTKVLIQFLQKKAKNLDAITTPDPTTNASLLTKLQAQNQWLQDMTTHLILRSFKEFLQSSLRALRQM

SEQ ID NO: 1919 - DNA, 746 bp, Homo sapiens
ccctgcgccacacggccgtcgccatggtgaagctgagcaaagaggccaagcagagactacagcagctcttcaaggggagccagtttgccattcgctggggctttatccctcttgtgatttacctgggatttaagaggggtgcagatcccggaatgcctgaaccaactgttttgagcctactttggggataaaggattatttggtcttctggatttggaggcaatcagcggacagcatggaagatgtgtgctctggctcggataagagatgggacatcattcagtcactagttggatggcacaaggctcttcacagacgcatctgtagcagagtggatcttgtactaacttatgatagaatgtatcagaataaatgtttttaacagtgttatgcttgagtcttttttgaattgaacatgctaggattatcaggtaaaaattaagccttttggtactttctcaaaacagggaatttatgtgtatacctaggtgctatttaagcctgtaaatcccagcactttgggaggccagggcgggtggatcacgatataaaaaaatttttccaagttattcctgcccattgacctaacatatggattacagtttccctttgcagtgaattaataactccttctaggatattccgaggtagtaagaatacagatagttctgtttgtgacaaaccaagctgttacttcctcctctgcattaaagttctgactgcaagaaaaaaaaaaaaaaaaaaaa

SEQ ID NO: 1920 - protein, 55 aa, Homo sapiens
MVKLSKEAKQRLQQLFKGSQFAIRWGFIPLVIYLGFKRGADPGMPEPTVLSLLWG

SEQ ID NO: 1921 - DNA, 3768 bp, Homo sapiens
gagaggctggcggcagtggtggctctcccggctgggttgtcagtcagtgagaggagggggaagatggctcaccgggacccgttctgctaggaagaaggggagcaggtggtgctgctactcgggaggaagcagagcagcctccgtcgctgtcgctgagagcctcacgagtcgaggtcctgcaggtggagctccggcagccgccctggttgaaggtttagaacagatgtggaaaaatgtttacttcagagaaaggggttgtggaggaatggttgtcagagtttaagacattaccagaaacatctttaccaaattatgccacaaatttgaaagacaagagttctttagtttcatctctctataaagttatccaggagccacaaagtgagttgctagaacctgtctgtcaccagctctttgaattctatcgcagtggagaggagcagttgcttcaatttacgctgcaatttctcccagaactaatttggtgctaccttgcagtctcagccagcagaaatgtgcatagcagtggatgcattgaagctcttcttctaggggtttacaatttggaaatagttgacaaacagggacataccaaagtattgagttttacgattccatctttatccaaaccatctgtataccatgaaccttccagcattgggtccatggctctgactgagagtgcactatcccagcatggtttgtcaaaagtggtatacagtggacctcatcctcaaagggagatgctgacagcacagaatcggtttgaagtgttgacattccttttgttgtgttacaatgctgccttaacttacatgcccagtgtttctcttcagtcactgtgtcaaatttgttcaagaatctgtgtttgtggatatcctcgacaacatgtaagaaaatataaaggtataagtagcaggataccagtttcttcaggattcatggtgcaaatgttaacagggatttattttgccttttataatggagaatgggatctagctcaaaaagcactggatgatattatatacagagcccagctagaattatatccagagccattgctggttgctaatgcaataaaggcttcattgcctcatggtcccatgaaatctaataaggaaggtacaaggtgtattcaagttgaaatcacaccaacttcctctcgaatatcaagaaatgcagtaaccagcatgtcaataaggggtcataggtggaaaagacatggaaatacagaattaacaggtcaagaagaactgatggagatatctgaagttgacgagggattttattccagggctgcgtctagtaccagccagtcgggtttatcaaacagtagtcacaattgtagtaacaagccaagtataggaaagaaccacagacggtcaggaggaagcaaaactggaggaaaagaaaaagaaactacaggggaatcttgcaaagatcactttgctcgaaaacaaactcagagagcccaaagtgagaatcttgagcttctctctttgaagagacttactttaacaaccagccaatccctacctaagcctagtagccatggtttggctaagaccgcagcgactgtatttagtaaatcctttgaacaagtcagtggtgtcacagtcccacataacccgtcatctgctgttggttgtggggctgggacagatgccaataggttttccgcttgtagtctccaagaagaaaagcttatttacgtttcagaaagaactgaacttccaatgaagcatcaatcaggtcagcagagacctcctagtattagcattactctgtccacagattaattagtaacatatttttctcccataacctagtgaacctggaaatacaactttgcttctttatgaaagtaccctgggtctttcatccgtattcctgacaggagccctgatgtcttaaattctgaaggctcccctgactttatgaagggaagattgtctaggttgcagtaagttgaaatatggttttgttatttcttgattaagattttttccccttggtttgagtcttttttttccctcctcttatttgttattgttgccctaagattgtcagtgacaataaattttgacaggttgtctaatcaagttggttatgtctcatgtgaggttgtaaggtggtttttcttgttttggtttggtttggttttttaatagctcctattttgatggctgtgtgtttggccttcagagtcaaagggagtctgcatgtatgggaactgttttatagagaatggggcagaggcacaactccaggaattctctagctcctggtcaggaagccaatctgaaaacaggcatgtggaaacacaaaaatgatgtgtatgaaaagcacctgatgaaaatatttgtaagcagatcatctttatgattagaacaatttgctcaaagccctggaaaatgcctggtaacccagtgcctagaatattatatgattccaggggatggctagaggcatttctgttgttatctctgaaacatttttatatcaaaaatcagattgctggtaggtgtgttgttttgaagtgttttatctggatttagcatgtgaagatccctttcaattattaaggtataataggctgtaaagctgatttaccctactgctggactttggaaatcctagttagtttggactcctataattcagagcatacgtcattggaagacttcctggaaatcagtgtaaatcttgcaacatagctctcaagataccactgtataatatgtaattgtttgtctgcaaatgcatttttcatctataaaatgtcatgaaagaaaataaaggtagtgaaatatggacaaaggacatttatatattaactaaagttgtttatgtttgtgttcttaaatttaaaacacgaagaaaaagaaatgtctttcttgttagtgaacaggcctgttttaaatatcttagtatgatatcaaaagaataatcaatttagttacctcccaactaaaaagtaaaaatgaaaaagacgacatggcagaagttgaaacaaacttgtatgtatctgtatgtgacctctagatggaaataaaagtttgatgtttgctagccgtggtccttttggctatggttgcggttcccctgtaaagcaaatgtacttaagtcatcattcagagtgagagagagaaagcacggctgaggctgagtcagttgaccgttgaggaagacctaaggagctgtccagttcttggctctttttcactgtgactgcacagcggtttccttcttcatagtcccttgctgtagtcaccaagagagcatgctagtgttttcctcttgttcctgcttatgcagagctcagatatatgaaaaatttgtatgctttgaaggctgccaaagcatttatactctggacatagttttaactgcaactgctttggctaccagtttaaaccgagttcttcaaaaagcatgaactcgttttcattcattagccctgtttacaatgtggattttgacataaatgaatttgattttcttttagctccagtaacagaatggaataagatctattgccataaattgtagttaagaactgtaaggcaatcgggcagtgaaacttgatattgtattaacttaataggaaccctgtgtacaatttaaaatatttgtaaaatatcactgtgaatttacagatgtctttttgtcattctttaacaatgaatttcccctgtgcatagttattaatagtattggtattattaaaaactaatttggcattttaaaaaaaaaaaaaaaaaaaaa

SEQ ID NO: 1922 - protein, 521 aa, Homo sapiens
MFTSEKGVVEEWLSEFKTLPETSLPNYATNLKDKSSLVSSLYKVIQEPQSELLEPVCHQLFEFYRSGEEQLLQFTLQFLPELIWCYLAVSASRNVHSSGCIEALLLGVYNLEIVDKQGHTKVLSFTIPSLSKPSVYHEPSSIGSMALTESALSQHGLSKVVYSGPHPQREMLTAQNRFEVLTFLLLCYNAALTYMPSVSLQSLCQICSRICVCGYPRQHVRKYKGISSRIPVSSGFMVQMLTGIYFAFYNGEWDLAQKALDDIIYRAQLELYPEPLLVANAIKASLPHGPMKSNKEGTRCIQVEITPTSSRISRNAVTSMSIRGHRWKRHGNTELTGQEELMEISEVDEGFYSRAASSTSQSGLSNSSHNCSNKPSIGKNHRRSGGSKTGGKEKETTGESCKDHFARKQTQRAQSENLELLSLKRLTLTTSQSLPKPSSHGLAKTAATVFSKSFEQVSGVTVPHNPSSAVGCGAGTDANRFSACSLQEEKLIYVSERTELPMKHQSGQQRPPSISITLSTD

SEQ ID NO: 1923 - DNA, 2742 bp, Homo sapiens
gtcactcgtataaaaacctatgctttgaaggttctcgtgtgtctcggcctgcaggtctcgctcagagctgtgtccctgaacatccaccctgctggggtggcttgacgcacttctgtgcaaatctgttcgctcgcaaccctacctacctctctcccgaaccggagaaaaccttcggcggggtccttccgggttttgtgtcgaatctgcggcggcgacccggcgccgcgtcacgcggtggtgaatgtgcggcagtacgcgcgccgcgtcgtttacgcggcgatttcatcatgctccgagccggcggcgcgcgccgcttccgtcgccaccctctctggacagcccagggccgcaggctcatgccctctccgcgtccagtgctgcttagaggtgctcgcgccgctctgctgctgctgctgccgccccggctcttagcccgaccctcgctcctcctccgccggtccctcagcgcggcctcctgcgccccgatctccttgcccgccgccgcctcccggagcagcatggacggcgcgggggctgaggaggtgctggcacctctgaggctagcagtgcgccagcagggagatcttgtgcgaaaactcaaagaagataaagcaccccaagtagacgtagacaaagcagtggctgagctcaaagcccgcaagagggttctggaagcaaaggagctggcgttacagcccaaagatgatattgtagaccgagcaaaaatggaagataccctgaagaggaggtttttctatgatcaagcttttgctatttatggaggtgttagtggtctgtatgactttgggccagttggctgtgctttgaagaacaatattattcagacctggaggcagcactttatccaagaggaacagatcctggagatcgattgcaccatgctcacccctgagccagttttaaagacctctggccatgtagacaaatttgctgacttcatggtgaaagacgtaaaaaatggagaatgttttcgtgctgaccatctattaaaagctcatttacagaaattgatgtctgataagaagtgttctgtcgaaaagaaatcagaaatggaaagtgttttggcccagcttgataactatggacagcaagaacttgcggatctttttgtgaactataatgtaaaatctcccattactggaaatgatctatcccctccagtgtcttttaacttaatgttcaagactttcattgggcctggaggaaacatgcctgggtacttgagaccagaaactgcacaggggattttcttgaatttcaaacgacttttggagttcaaccaaggaaagttgccttttgctgctgcccagattggaaattcttttagaaatgagatctcccctcgatctggactgatcagagtcagagaattcacaatggcagaaattgagcactttgtagatcccagtgagaaagaccaccccaagttccagaatgtggcagaccttcacctttatttgtattcagcaaaagcccaggtcagcggacagtccgctcggaaaatgcgcctgggagatgctgttgaacagggtgtgattaataacacagtattaggctatttcattggccgcatctacctctacctcacgaaggttggaatatctccagataaactccgcttccggcagcacatggagaatgagatggcccattatgcctgtgactgttgggatgcagaatccaaaacatcctacggttggattgagattgttggatgtgctgatcgttcctgttatgacctctcctgtcatgcacgagccaccaaagtcccacttgtagctgagaaacctctgaaagaacccaaaacagtcaatgttgttcagtttgaacccagtaagggagcaattggtaaggcatataagaaggatgcaaaactggtgatggagtatcttgccatttgtgatgagtgctacattacagaaatggagatgctgctgaatgagaaaggggaattcacaattgaaactgaagggaaaacatttcagttaacaaaagacatgatcaatgtgaagagattccagaaaacactatatgtggaagaagttgttccgaatgtaattgaaccttccttcggcctgggtaggatcatgtatacggtatttgaacatacattccatgtacgagaaggagatgaacagagaacattcttcagtttccctgctgtagttgctccattcaaatgttccgtcctcccactgagccaaaaccaggagttcatgccatttgtcaaggaattatcggaagccctgaccaggcatggagtatctcacaaagtagacgattcctctgggtcaatcggaaggcgctatgccaggactgatgagattggcgtggcttttggtgtcaccattgactttgacacagtgaacaagaccccccacactgcaactctgagggaccgtgactcaatgcggcagataagagcagagatctctgagctgcccagcatagtccaagacctagccaatggcaacatcacatgggctgatgtggaggccaggtatcctctgtttgaagggcaagagactggtaaaaaagagacaatcgaggaatgaggacaattttgacaacttttgaccacttgcgctaataaaaaaaaaaaaactactcttatgtccactttacaaaagaaaacagcattgtgattactcccagggaccgtattttatcttcagtggctgcctgattttacccccacaattaaagttgaaggaatcctga

SEQ ID NO: 1924 - protein, 685 aa, Homo sapiens
MDGAGAEEVLAPLRLAVRQQGDLVRKLKEDKAPQVDVDKAVAELKARKRVLEAKELALQPKDDIVDRAKMEDTLKRRFFYDQAFAIYGGVSGLYDFGPVGCALKNNIIQTWRQHFIQEEQILEIDCTMLTPEPVLKTSGHVDKFADFMVKDVKNGECFRADHLLKAHLQKLMSDKKCSVEKKSEMESVLAQLDNYGQQELADLFVNYNVKSPITGNDLSPPVSFNLMFKTFIGPGGNMPGYLRPETAQGIFLNFKRLLEFNQGKLPFAAAQIGNSFRNEISPRSGLIRVREFTMAEIEHFVDPSEKDHPKFQNVADLHLYLYSAKAQVSGQSARKMRLGDAVEQGVINNTVLGYFIGRIYLYLTKVGISPDKLRFRQHMENEMAHYACDCWDAESKTSYGWIEIVGCADRSCYDLSCHARATKVPLVAEKPLKEPKTVNVVQFEPSKGAIGKAYKKDAKLVMEYLAICDECYITEMEMLLNEKGEFTIETEGKTFQLTKDMINVKRFQKTLYVEEVVPNVIEPSFGLGRIMYTVFEHTFHVREGDEQRTFFSFPAVVAPFKCSVLPLSQNQEFMPFVKELSEALTRHGVSHKVDDSSGSIGRRYARTDEIGVAFGVTIDFDTVNKTPHTATLRDRDSMRQIRAEISELPSIVQDLANGNITWADVEARYPLFEGQETGKKETIEE

SEQ ID NO: 1925 - DNA, 2107 bp, Homo sapiens
atggacgcggcactgctccacagcctgctggaggccaactgcagcctggcgctggctgaagagctgctcttggacggctgggggccacccctggaccccgagggtccctactcctactgcaacacgaccttggaccagatcggaacgtgctggccccgcagcgctgccggagccctcgtggagaggccgtgccccgagtacttcaacggcgtcaagtacaacacgacccggaatgcctatcgagaatgcttggagaatgggacgtgggcctcaaagatcaactactcacagtgtgagcccattttggatgacaagcagaggaagtatgacctgcactaccgcatcgcccttgtcgtcaactacctgggccactgcgtatctgtggcagccctggtggccgccttcctgcttttcctggccctgcggagcattcgctgtctgcggaatgtgattcactggaacctcatcaccacctttatcctgcgaaatgtcatgtggttcctgctgcagctcgttgaccatgaagtgcacgagagcaatgaggtctggtgccgctgcatcaccaccatcttcaactacttcgtggtgaccaacttcttctggatgtttgtggaaggctgctacctgcacacggccattgtcatgacctactccactgagcgcctgcgcaagtgcctcttcctcttcatcggatggtgcatccccttccccatcatcgtcgcctgggccatcggcaagctctactatgagaatgaacagtgctggtttggcaaggagcctggcgacctggtggactacatctaccaaggccccatcattctcgtgctcctgatcaatttcgtatttctgttcaacatcgtcaggatcctaatgacaaagttacgcgcgtccaccacatccgagacaatccagtacaggaaggcagtgaaggccaccctggtgctcctgcccctcctgggcatcacctacatgctcttcttcgtcaatcccggggaggacgacctgtcacagatcatgttcatctatttcaactccttcctgcagtcgttccagggtttcttcgtgtctgtcttctactgcttcttcaatggagaggtgcgctcagccgtgaggaagaggtggcaccgctggcaggaccatcactcccttcgagtccccatggcccgggccatgtccatccctacatcacccacacggatcagcttccacagcatcaagcagacggccgctgtgtgacccctcggtcgcccacctgcacagctcccctgtcctcctccaccttcttcctctgggttctctgtgctgggcaggctctcgtggggcaggagatgggaggggagagaccagctctccagcctggcaggaaagagggggtgcggcagccaagggggactgcaagggacagggatgagtgggggccaccaggctcagcgcaagaggaagcagagggaattcacaggaccccctgagaagagccagtcagatgtctgcaggcatttgcccatcccagcctctctggccagggccttactgggcccagagcagagaaggacctgtccaacacacacagctatttatagtagcagacacagggctcccctgccctactcatggagccagcagccaggcaatggtgtggccctgcactggcccttggactccacactcagtggtgccctgcagttgggtgggttacgccagcaaaggatcagtttggctgccttatcccagggctgtcacctagagaggctcacttgtaccccaccctgttcctgtgtcccctccccagccatcctcccgccttgggggctccatgaaggatgcaggcttccaggcctggcttcctctcttgggagaccccttctctgcctagtccacagattaggcaatcaaggaagacgccatcagggaagccacatccttagtcaaccagttgcatcgtgcggggcaaaatgaggagcagaggcatggaggagggaggcgtgggatgggaatagcagaaccaccatgtcttcagtgattgaaactcataccccattgccctttgccctccagtctccccttcagaaacatctctgctctctgtgaaataaaccatgcctcttgg

SEQ ID NO: 1926 - protein, 411 aa, Homo sapiens
MDAALLHSLLEANCSLALAEELLLDGWGPPLDPEGPYSYCNTTLDQIGTCWPRSAAGALVERPCPEYFNGVKYNTTRNAYRECLENGTWASKINYSQCEPILDDKQRKYDLHYRIALVVNYLGHCVSVAALVAAFLLFLALRSIRCLRNVIHWNLITTFILRNVMWFLLQLVDHEVHESNEVWCRCITTIFNYFVVTNFFWMFVEGCYLHTAIVMTYSTERLRKCLFLFIGWCIPFPIIVAWAIGKLYYENEQCWFGKEPGDLVDYIYQGPIILVLLINFVFLFNIVRILMTKLRASTTSETIQYRKAVKATLVLLPLLGITYMLFFVNPGEDDLSQIMFIYFNSFLQSFQGFFVSVFYCFFNGEVRSAVRKRWHRWQDHHSLRVPMARAMSIPTSPTRISFHSIKQTAAV

SEQ ID NO: 1927 - DNA, 918 bp, Homo sapiens
atgcctggccacaatacctccaggaattcctcttgcgatcctatagtgacaccccacttaatcagcctctacttcatagtgcttattggcgggctggtgggtgtcatttccattcttttcctcctggtgaaaatgaacacccggtcagtgaccaccatggcggtcattaacttggtggtggtccacagcgtttttctgctgacagtgccatttcgcttgacctacctcatcaagaagacttggatgtttgggctgcccttctgcaaatttgtgagtgccatgctgcacatccacatgtacctcacgttcctattctatgtggtgatcctggtcaccagatacctcatcttcttcaagtgcaaagacaaagtggaattctacagaaaactgcatgctgtggctgccagtgctggcatgtggacgctggtgattgtcattgtggtacccctggttgtctcccggtatggaatccatgaggaatacaatgaggagcactgttttaaatttcacaaagagcttgcttacacatatgtgaaaatcatcaactatatgatagtcatttttgtcatagccgttgctgtgattctgttggtcttccaggtcttcatcattatgttgatggtgcagaagctacgccactctttactatcccaccaggagttctgggctcagctgaaaaacctattttttataggggtcatccttgtttgtttccttccctaccagttctttaggatctattacttgaatgttgtgacgcattccaatgcctgtaacagcaaggttgcattttataacgaaatcttcttgagtgtaacagcaattagctgctatgatttgcttctctttgtctttgggggaagccattggtttaagcaaaagataattggcttatggaattgtgttttgtgccgttag

SEQ ID NO: 1928 - protein, 305 aa, Homo sapiens
MPGHNTSRNSSCDPIVTPHLISLYFIVLIGGLVGVISILFLLVKMNTRSVTTMAVINLVVVHSVFLLTVPFRLTYLIKKTWMFGLPFCKFVSAMLHIHMYLTFLFYVVILVTRYLIFFKCKDKVEFYRKLHAVAASAGMWTLVIVIVVPLVVSRYGIHEEYNEEHCFKFHKELAYTYVKIINYMIVIFVIAVAVILLVFQVFIIMLMVQKLRHSLLSHQEFWAQLKNLFFIGVILVCFLPYQFFRIYYLNVVTHSNACNSKVAFYNEIFLSVTAISCYDLLLFVFGGSHWFKQKIIGLWNCVLCR

SEQ ID NO: 1929 - DNA, 2350 bp, Homo sapiens
ggagtttggggatgaggcagctgaagaacagagtcttgtgatggtggaaccaggacttcgttgttccttcattgtgtgggcagaagaggtggaggattttaggcgccacctggtcttgtccccactgcccagacaggcagggaatccctcttcttccttttgctgaatcagctggagaagaaagcccagcaggaggcctgctagcctcagcctcgggccctaccagggtcctaggtactggaatggaacttcgccgaggtcaccgctcaaacggccacaacgagggagccgatttagatcctctgggcctgttccttccttttctttaaacgtcccagtctagcttagaggaggacctgttttgttagataaatggcaagcaaaaaacgagaagtccagttacagacagtcatcaataatcaaagcctgtgggatgagatgttgcagaacaaaggcttaacagtgattgatgtttaccaagcctggtgtggaccttgcagagcaatgcaacctttattcagaaaattgaaaaatgaactgaacgaagacgaaattctgcattttgctgtcgcagaagctgacaacattgtgactttgcagccatttagagataaatgtgaacctgtttttctctttagtgttaatggcaaaattatcgaaaagattcagggtgcaaatgcaccgcttgttaataaaaaagttattaatttgatcgatgaggagagaaaaattgcagcaggtgaaatggctcgacctcagtatcctgaaattccattagtagactcagattcagaagttagtgaagaatcaccatgtgaaagtgttcaggaattatacagtattgctattatcaaaccggatgctgtgattagtaaaaaagttctagaaattaaaagaaaaattaccaaagctggatttattatagaagcagagcataagacagtgctcactgaagaacaagttgtcaacttctatagtcgaatagcagaccagcgtgacttcgaagagtttgtctcttttatgacaagtggcttaagctatattctagttgtatctcaaggaagtaaacacaatcctccctctgaagaaaccgaaccacagactgacaccgaacctaacgaacgatctgaggatcaacctgaggtcgaagcccaggttacacctggaatgatgaagaacaaacaagacagtttacaagaatatctggaaagacaacatttagctcagctctgtgacattgaagaggatgcagctaatgttgctaagttcatggatgctttcttccccgattttaaaaaaatgaaaagcatgaaattagaaaagacattggcattacttcgaccaaatctctttcatgaaaggaaagatgatgttttgcgtattattaaagatgaagacttcaaaatactggagcaaagacaagtagtattatcggaaaaagaagcacaagcactgtgcaaggaatatgaaaatgaagactattttaataaacttatagaaaacatgaccagtggtccatctctagcccttgttttattgagagacaatggcttgcaatactggaaacaattactgggaccaagaactgttgaagaagccattgaatattttccagagagtttatgtgcacagtttgcgatggacagtttgccggtcaaccagttgtatggcagcgattcattagaaaccgctgaaagggaaatacagcatttctttcctcttcaaagcactttaggcttgattaaacctcatgcaacaagtgaacaaagagagcagatcctgaagatagttaaggaggctggatttgatctgacacaggtgaagaaaatgttcctaactcctgagcaaactgagaaaatttatccaaaagtaacaggaaaagacttttataaagatttattggaaatgttatctgtgggtccatctatggtcatgattctgaccaagtggaatgctgttgcagaatggagacgattgatgggcccaacagacccagaagaagcaaaattactttcccctgactccatccgagcccagtttggaataagtaaattgaaaaacattgtccatggagcatctaacgcctatgaagcaaaagaggttgttaatagactctttgaggatcctgaggaaaactaaagtatatactgtgaaaactttgagaagataatacatatgttcacgtcaatatacaaccatttggcacagcttcctgggaggaataataagaaaaacatgctttggaggaaaactcaagatacaaaaatgaatggctatgcataataacaataaaaatgtattccccaaccaaaaaaaaaaaaaaaaaaaaaaaaaaaaaaaaaaaaaaaaa

SEQ ID NO: 1930 - protein, 588 aa, Homo sapiens
MASKKREVQLQTVINNQSLWDEMLQNKGLTVIDVYQAWCGPCRAMQPLFRKLKNELNEDEILHFAVAEADNIVTLQPFRDKCEPVFLFSVNGKIIEKIQGANAPLVNKKVINLIDEERKIAAGEMARPQYPEIPLVDSDSEVSEESPCESVQELYSIAIIKPDAVISKKVLEIKRKITKAGFIIEAEHKTVLTEEQVVNFYSRIADQRDFEEFVSFMTSGLSYILVVSQGSKHNPPSEETEPQTDTEPNERSEDQPEVEAQVTPGMMKNKQDSLQEYLERQHLAQLCDIEEDAANVAKFMDAFFPDFKKMKSMKLEKTLALLRPNLFHERKDDVLRIIKDEDFKILEQRQVVLSEKEAQALCKEYENEDYFNKLIENMTSGPSLALVLLRDNGLQYWKQLLGPRTVEEAIEYFPESLCAQFAMDSLPVNQLYGSDSLETAEREIQHFFPLQSTLGLIKPHATSEQREQILKIVKEAGFDLTQVKKMFLTPEQTEKIYPKVTGKDFYKDLLEMLSVGPSMVMILTKWNAVAEWRRLMGPTDPEEAKLLSPDSIRAQFGISKLKNIVHGASNAYEAKEVVNRLFEDPEEN

SEQ ID NO: 1931 - DNA, 2820 bp, Homo sapiens
ggcgggttcgcgccccgaaggctgagagctggcgctgctcgtgccctgtgtgccagacggcggagctccgcggccggaccccgcggccccgctttgctgccgactggagtttgggggaagaaactctcctgcgccccagaagatttcttcctcggcgaagggacagcgaaagatgagggtggcaggaagagaaggcgctttctgtctgccggggtcgcagcgcgagagggcagtgccatgttcctctccatcctagtggcgctgtgcctgtggctgcacctggcgctgggcgtgcgcggcgcgccctgcgaggcggtgcgcatccctatgtgccggcacatgccctggaacatcacgcggatgcccaaccacctgcaccacagcacgcaggagaacgccatcctggccatcgagcagtacgaggagctggtggacgtgaactgcagcgccgtgctgcgcttcttcttctgtgccatgtacgcgcccatttgcaccctggagttcctgcacgaccctatcaagccgtgcaagtcggtgtgccaacgcgcgcgcgacgactgcgagcccctcatgaagatgtacaaccacagctggcccgaaagcctggcctgcgacgagctgcctgtctatgaccgtggcgtgtgcatttcgcctgaagccatcgtcacggacctcccggaggatgttaagtggatagacatcacaccagacatgatggtacaggaaaggcctcttgatgttgactgtaaacgcctaagccccgatcggtgcaagtgtaaaaaggtgaagccaactttggcaacgtatctcagcaaaaactacagctatgttattcatgccaaaataaaagctgtgcagaggagtggctgcaatgaggtcacaacggtggtggatgtaaaagagatcttcaagtcctcatcacccatccctcgaactcaagtcccgctcattacaaattcttcttgccagtgtccacacatcctgccccatcaagatgttctcatcatgtgttacgagtggcgttcaaggatgatgcttcttgaaaattgcttagttgaaaaatggagagatcagcttagtaaaagatccatacagtgggaagagaggctgcaggaacagcggagaacagttcaggacaagaagaaaacagccgggcgcaccagtcgtagtaatccccccaaaccaaagggaaagcctcctgctcccaaaccagccagtcccaagaagaacattaaaactaggagtgcccagaagagaacaaacccgaaaagagtgtgagctaactagtttccaaagcggagacttccgacttccttacaggatgaggctgggcattgcctgggacagcctatgtaaggccatgtgccccttgccctaacaactcactgcagtgctcttcatagacacatcttgcagcatttttcttaaggctatgcttcagtttttctttgtaagccatcacaagccatagtggtaggtttgccctttggtacagaaggtgagttaaagctggtggaaaaggcttattgcattgcattcagagtaacctgtgtgcatactctagaagagtagggaaaataatgcttgttacaattcgacctaatatgtgcattgtaaaataaatgccatatttcaaacaaaacacgtaatttttttacagtatgttttattaccttttgatatctgttgttgcaatgttagtgatgttttaaaatgtgatgaaaatataatgtttttaagaaggaacagtagtggaatgaatgttaaaagatctttatgtgtttatggtctgcagaaggatttttgtgatgaaaggggattttttgaaaaattagagaagtagcatatggaaaattataatgtgtttttttaccaatgacttcagtttctgtttttagctagaaacttaaaaacaaaaataataataaagaaaaataaataaaaaggagaggcagacaatgtctggattcctgttttttggttacctgatttccatgatcatgatgcttcttgtcaacaccctcttaagcagcaccagaaacagtgagtttgtctgtaccattaggagttaggtactaattagttggctaatgctcaagtattttatacccacaagagaggtatgtcactcatcttacttcccaggacatccaccctgagaataatttgacaagcttaaaaatggccttcatgtgagtgccaaattttgtttttcttcatttaaatattttctttgcctaaatacatgtgagaggagttaaatataaatgtacagagaggaaagttgagttccacctctgaaatgagaattacttgacagttgggatactttaatcagaaaaaaagaacttatttgcagcattttatcaacaaatttcataattgtggacaattggaggcatttattttaaaaaacaattttattggccttttgctaacacagtaagcatgtattttataaggcattcaataaatgcacaacgcccaaaggaaataaaatcctatctaatcctactctccactacacagaggtaatcactattagtattttggcatattattctccaggtgtttgcttatgcacttataaaatgatttgaacaaataaaactaggaacctgtatacatgtgtttcataacctgcctcctttgcttggccctttattgagataagttttcctgtcaagaaagcagaaaccatctcatttctaacagctgtgttatattccatagtatgcattactcaacaaactgttgtgctattggatacttaggtggtttcttcactgacaatactgaataaacatctcaccggaattc

SEQ ID NO: 1932 - protein, 346 aa, Homo sapiens
MFLSILVALCLWLHLALGVRGAPCEAVRIPMCRHMPWNITRMPNHLHHSTQENAILAIEQYEELVDVNCSAVLRFFFCAMYAPICTLEFLHDPIKPCKSVCQRARDDCEPLMKMYNHSWPESLACDELPVYDRGVCISPEAIVTDLPEDVKWIDITPDMMVQERPLDVDCKRLSPDRCKCKKVKPTLATYLSKNYSYVIHAKIKAVQRSGCNEVTTVVDVKEIFKSSSPIPRTQVPLITNSSCQCPHILPHQDVLIMCYEWRSRMMLLENCLVEKWRDQLSKRSIQWEERLQEQRRTVQDKKKTAGRTSRSNPPKPKGKPPAPKPASPKKNIKTRSAQKRTNPKRV

SEQ ID NO: 1933 - DNA, 2614 bp, Homo sapiens
tcccccctcttaaaacacgatgcctcccaggatgctagtggcaccactgccactgcatttcctgttggcagcagtgagcagtgaaaaccgaagcggcagaaggcagtggcagcaggcagtggcagcaggcagtggcccaggcagaaatagctcccgcgcgattcactggagccttccccgggccctggtcccggctaccgggactcgcgcgtccggatctcaaaagcggcagaggccaccgaagggacaggaagcactttggtccagaccacactcccggcacagtgcggaaagagccggcgggagccactctgatcccggacgcctcagcgcccccttgggcttgggcttgccctcgggccggggaaggctgaccgcgatgccaggacgcgctcccctccgcaccgtcccgggcgccctgggtgcctggctgctgggcggcctctgggcctggaccctgtgcggcctgtgcagcctgggggcggtgggagccccgcgcccgtgccaggcgccgcagcagtgggaggggcgccaggttatgtaccagcaaagtagcgggcgcaacagccgcgccctgctctcctacgacgggctcaaccagcgcgtgcgggtgctggacgagaggaaggcgctgatcccctgcaagagattatttgaatatattttgctgtataaggatggagtgatgtttcagattgaccaagccaccaagcagtgctcaaagatgaccctgacacagccctgggatcctcttgacattcctcaaaactccacctttgaagaccagtactccatcggggggcctcaggagcagatcaccgtccaggagtggtcggacagaaagtcagctagatcctatgaaacctggattggcatctatacagtcaaggattgctatcctgtccaggaaacctttaccataaactacagtgtgatattgtctacgcggttttttgacatccagctgggtattaaagacccctcggtgtttacccctccaagcacgtgccagatggcccaactggagaagatgagcgaagactgctcctggtgagcctgtgcatagggaagcggcagcatcggatgtcagccccctgcggccccagctggagatggatatgagactagtcaagatgtgaatgctaattggagagaaatataattttaggaagatgcacattgatgtggggttttgatgtgtctgattttgactactcaagctctgtttacagaagaaaattgaatggcgagggtgtggccatatgaactgactagatggctaatatggacactttgggtatttctaatgcctgttcagggctggttttctgcatgcacgggtatacacataatgcagtgccatgcacatagggaagggtcagtaagagaagtttgccttggcagcaagtatttattgttgacattattcagaattagtgataataaaaagcagagtgattttggtcaattttattattaattcttaaattccctgcagagaatgccccctttattgctgcaccagggttggcattgctcccactgagccctactccaccctgtccctgcactcccttggttgccaaaaaaatgataacttaaatcccttccagacttaagaattttatggcatggcccaattgatataaacatttagaaggaaatgaaaagctaaaataggaagtaattattcctctaaagaaacattttgagcaaggcagtttagagaatcctaatgtctacactggcatagcacgagccatgtaagcttcttttttttctatgcaagagtattgatgtatgtgctgaatcttcacagacttgtcaatacacaggcagtattctaaaatagcactgaacagggagtcaggagactattgtctcctaaacccaggactagagttccctcgtactgtcactcctttggtcattaaatgcactgggcttgcccgcactttggccttcctagaacactgcttcataacctctctgtctgacttctgcatctccttccaggtcagctcattcacaagagttgctcccaagcctggatgagttgcaccttgcatcttgagcatgcatttctcacaataattattaagctgtgtgataatttctgctttcaggacactcatccattatcttggctgtgagctccttgggtacgggtaccttgtatgtttacttttatatccctagcacaaagcaagtgcctggcacatagtcagtgccctaagtattcgtagagtgaagaatgccagcctctcttgtccctggtttccttatgtgttgaatgtggttgagtttgtccattgctagggagagacttccagtaataaaatttactattctagatgcttctactgttatgttttatctgcccatttatctttcttagttaccaggagaaatgtgtgacacctatattataatgaaaacaatctcattacttatagtttatctatattaaacaaatttaattgcattttaaagcattctttgatactgttgcttttgcaataaatatggataatcttggttataagggagttaaaacaatgctgtaataaataaagtgtttcatgtgatcaaaatcaaaaaaaaaaaaaaaaaa

SEQ ID NO: 1934 - protein, 344 aa, Homo sapiens
MPPRMLVAPLPLHFLLAAVSSENRSGRRQWQQAVAAGSGPGRNSSRAIHWSLPRALVPATGTRASGSQKRQRPPKGQEALWSRPHSRHSAERAGGSHSDPGRLSAPLGLGLPSGRGRLTAMPGRAPLRTVPGALGAWLLGGLWAWTLCGLCSLGAVGAPRPCQAPQQWEGRQVMYQQSSGRNSRALLSYDGLNQRVRVLDERKALIPCKRLFEYILLYKDGVMFQIDQATKQCSKMTLTQPWDPLDIPQNSTFEDQYSIGGPQEQITVQEWSDRKSARSYETWIGIYTVKDCYPVQETFTINYSVILSTRFFDIQLGIKDPSVFTPPSTCQMAQLEKMSEDCSW

SEQ ID NO: 1935 - DNA, 1646 bp, Homo sapiens
gccaagccccgcccctcaggccggggcgcgaccgcggatccgcagttcccgggccagcctggggcggccggccaggaaccacccgttaaggtgtcttctctttagggatggtgaggttggaaaaaggctcctgtaaccctcctccaggatgaaccacctgccagaagacatggagaacgctctcaccgggagccagagctcccatgcttctctgcgcaatatccattccatcaaccccacacaactcatggccaggattgagtcctatgaaggaagggaaaagaaaggcatatctgatgtcaggaggactttctgtttgtttgtcacctttgacctcttattcgtaacattactgtggataatagagttaaatgtgaatggaggcattgagaacacattagagaaggaggtgatgcagtatgactactattcttcatattttgatatatttcttctggcagtttttcgatttaaagtgttaatacttgcatatgctgtgtgcagactgcgccattggtgggcaatagcgttgacaacggcagtgaccagtgcctttttactagcaaaagtgatcctttcgaagcttttctctcaaggggcttttggctatgtgctgcccatcatttcattcatccttgcctggattgagacgtggttcctggatttcaaagtgttacctcaagaagcagaagaagaaaacagactcctgatagttcaggatgcttcagagagggcagcacttatacctggtggtctttctgatggtcagttttattcccctcctgaatccgaagcaggatctgaagaagctgaagaaaaacaggacagtgagaaaccacttttagaactatgagtactacttttgttaaatgtgaaaaaccctcacagaaagtcatcgaggcaaaaagaggcaggcagtggagtctccctgtcgacagtaaagttgaaatggtgacgtccactgctggctttattgaacagctaataaagatttatttattgtaatacctcacagacgttgtaccatatccatgcacatttagttgcctgcctgtggctggtaaggtaatgtcatgattcatcctctcttcagtgagactgagcctgatgtgttaacaaataggtgaagaaagtcttgtgctgtattcctaatcaaaagacttaatatattgaagtaacacttttttagtaagcaagatacctttttatttcaattcacagaatggaatttttttgtttcatgtctcagatttattttgtatttcttttttaacactctacatttcccttgttttttaactcatgcacatgtgctctttgtacagttttaaaaagtgtaataaaatctgacatgtcaatgtggctagttttatttttcttgttttgcattatgtgtatggcctgaagtgttggacttgcaaaaggggaagaaaggaattgcgaatacatgtaaaatgtcaccagacatttgtattatttttatcatgaaatcatgtttttctctgattgttctgaaatgttctaaatactcttattttgaatgcacaaaatgacttaaaccattcatatcatgtttcctttgcgttcagccaatttcaattaaaatgaactaaattaaaaaaaaaaaaaaaaaaaaaaaaaaaaaa

SEQ ID NO: 1936 - protein, 234 aa, Homo sapiens
MNHLPEDMENALTGSQSSHASLRNIHSINPTQLMARIESYEGREKKGISDVRRTFCLFVTFDLLFVTLLWIIELNVNGGIENTLEKEVMQYDYYSSYFDIFLLAVFRFKVLILAYAVCRLRHWWAIALTTAVTSAFLLAKVILSKLFSQGAFGYVLPIISFILAWIETWFLDFKVLPQEAEEENRLLIVQDASERAALIPGGLSDGQFYSPPESEAGSEEAEEKQDSEKPLLEL

SEQ ID NO: 1937 - DNA, 857 bp, Homo sapiens
caagcctggaagaactcgtcatgctctttgtagcgtggtgcttctgttgctcacaggacaacttgcctttgatgattttcaagagagttgtgctatgatgtggcaaaagtatgcaggaagcaggcggtcaatgcctctgggagcaaggatccttttccacggtgtgttctatgccgggggctttgccattgtgtattacctcattcaaaagtttcattccagggctttatattacaagttggcagtggagcagctgcagagccatcccgaggcacaggaagctctgggccctcctctcaacatccattatctcaagctcatcgacagggaaaacttcgtggacattgttgatgccaagttgaagattcctgtctctggatccaaatcagagggccttctctacgtccactcatccagaggtggcccctttcagaggtggcaccttgacgaggtctttttagagctcaaggatggtcagcagattcctgtgttcaagctcagtggggaaaacggtgatgaagtgaaaaaggagtagagacgacccagaagacccagcttgcttctagtccatccttccctcatctctaccatatggccactggggtggtggcccatctcagtgacagacactcctgcaacccagttttccagccaccagtgggatgatggtatgtgccagcacatggtaattttggtgtaattctaacttgggcacaacaaatgctatttgtcatttttaaactgaatccgaaagaaactcctattataaatttaagataatgtaatgtatttgaaagtgctttgtataaaaaagcacatgataaaaggaatcagaattaataaaatgtttgttgatc

SEQ ID NO: 1938 - protein, 146 aa, Homo sapiens
MMWQKYAGSRRSMPLGARILFHGVFYAGGFAIVYYLIQKFHSRALYYKLAVEQLQSHPEAQEALGPPLNIHYLKLIDRENFVDIVDAKLKIPVSGSKSEGLLYVHSSRGGPFQRWHLDEVFLELKDGQQIPVFKLSGENGDEVKKE

SEQ ID NO: 1939 - DNA, 1094 bp, Homo sapiens
ccgccccggtccgcaaagccggtggcgcccggaggctgcacggagagcggtgcccgcgtcagtgaccgaaggaagagaccaagatgaatgcagagcccgagaggaagtttggcgtggtggtggttggtgttggccgagccggctccgtgcggatgagggacttgcggaatccacacccttcctcagcgttcctgaacctgattggcttcgtgtcgagaagggagctcgggagcattgatggagtccagcagatttctttggaggatgctctttccagccaagaggtggaggtcgcctatatctgcagtgagagctccagccatgaggactacatcaggcagttccttaatgctggcaagcacgtccttgtggaataccccatgacactgtcattggcggccgctcaggaactgtgggagctggctgagcagaaaggaaaagtcttgcacgaggagcatgttgaactcttgatggaggaattcgctttcctgaaaaaagaagtggtggggaaagacctgctgaaagggtcgctcctcttcacagctggcccgttggaagaagagcggtttggcttccctgcattcagcggcatctctcgcctgacctggctggtctccctctttggggagctttctcttgtgtctgccactttggaagagcgaaaggaagatcagtatatgaaaatgacagtgtgtctggagacagagaagaaaagtccactgtcatggattgaagaaaaaggacctggtctaaaacgaaacagatatttaagcttccatttcaagtctgggtccttggagaatgtgccaaatgtaggagtgaataagaacatatttctgaaagatcaaaatatatttgtccagaaactcttgggccagttctctgagaaggaactggctgctgaaaagaaacgcatcctgcactgcctggggcttgcagaagaaatccagaaatattgctgttcaaggaagtaagaggaggaggtgatgtagcacttccaagatggcaccagcatttggttcttctcaagagttgaccattatctctattcttaaaattaaacatgttggggaaacaagaaaaaaaaaaaaaaa

SEQ ID NO: 1940 - protein, 296 aa, Homo sapiens
MNAEPERKFGVVVVGVGRAGSVRMRDLRNPHPSSAFLNLIGFVSRRELGSIDGVQQISLEDALSSQEVEVAYICSESSSHEDYIRQFLNAGKHVLVEYPMTLSLAAAQELWELAEQKGKVLHEEHVELLMEEFAFLKKEVVGKDLLKGSLLFTAGPLEEERFGFPAFSGISRLTWLVSLFGELSLVSATLEERKEDQYMKMTVCLETEKKSPLSWIEEKGPGLKRNRYLSFHFKSGSLENVPNVGVNKNIFLKDQNIFVQKLLGQFSEKELAAEKKRILHCLGLAEEIQKYCCSRK

SEQ ID NO: 1941 - DNA, 667 bp, Homo sapiens
aagatggcggcctccgtgtgcagcgggttgctggggccacgggtgctgtcctggagccgagagctgccttgcgcttggcgcgccctgcacacctccccggtctgcgccaagaaccgggcggcccgagtacgcgtaagcaagggggacaagccggtgacctacgaggaggcacacgcgccgcactacatcgcccaccgtaaaggctggctgtcgctgcacacaggtaacctggatggagaggaccatgccgcagagcgaacggtggaggatgttttccttcgcaagttcatgtggggtaccttcccaggctgcctggctgaccagctggttttaaagcgccggggtaaccagttggagatctgtgccgtggtcctgaggcagttgtctccacacaagtactacttcctcgtgggctacagtgaaactttgctgtcctacttttacaaatgtcctgtgcgactccacctccaaactgtgccctcaaaggttgtgtataagtacctctagaacaatccccttttttccatcaagctgtagcctgcagagaatggaaacgtgggaaaggaatggtatgtgggggaaatgcatcccctcagaggactgaggcatagtctctcatctgctattgaataaagaccttctatcttgaaaaaaaaaaaaaaaaaaa

SEQ ID NO: 1942 - protein, 167 aa, Homo sapiens
MAASVCSGLLGPRVLSWSRELPCAWRALHTSPVCAKNRAARVRVSKGDKPVTYEEAHAPHYIAHRKGWLSLHTGNLDGEDHAAERTVEDVFLRKFMWGTFPGCLADQLVLKRRGNQLEICAVVLRQLSPHKYYFLVGYSETLLSYFYKCPVRLHLQTVPSKVVYKYL

SEQ ID NO: 1943 - DNA, 3606 bp, Homo sapiens
cctcgctgcgctcatggcgtcgcccgggcattcagatttgggagaagtagccccagaaataaaagcatcagagagacgaacagctgtggccattgcagatttggaatggagagaaatggaaggagatgattgcgagttccgttatggagatggtacaaatgaggctcaggacaatgattttccaacagtggagagaagcaggcttcaagaaatgctgtcacttttgggcctagagacgtaccaggtccagaaactcagcctccaggactctctgcagatcagttttgacagtatgaagaactgggcccctcaggttcccaaagacttgccctggaatttcctcaggaagttgcaggccctcaatgctgatgccaggaataccactatggtgctggacgtgctcccagacgccaggcctgtggagaaggagagccagatggaagaggagatcatctactgggacccagctgatgaccttgctgccgacatttattccttttctgagctgcccacccctgatacgccagtgaaccccttagaccttctctgtgccctgctgctctcctcagacagtttcctgcaacaagaaatagcgttgaaaatggccctctgccagtttgcactcccactcgtgttgcctgactcggagaaccactaccatacatttctgctgtgggccatgcggggcattgtgaggacatggtggtcccagcccccaaggggcatggggagcttccgggaagacagcgtggtcttgtccagggcgcccgccttcgccttcgtgcgcatggacgtcagtagcaactccaagtcccagcttctcaacgccgtcctcagcccgggccacaggcagtgggactgcttctggcatcgggacctcaacttgggcaccaatgcccgggagatttcggatgggttggtagaaatttcctggttttttcccagcggaagggaggacttggacattttcccagaacctgtggcctttctgaacctgagaggtgacatcgggtctcactggctgcagtttaagctcttgacagaaatctcctccgctgtgtttatattgactgacaatatcagtaagaaggaatacaaattgctgtactccatgaaggagtcaaccacaaaatactacttcatcctgagtccctaccgtgggaagcgcaacacaaacctgagatttctgaataagttaattcctgtgctgaaaatagaccactcacatgtcctggtaaaggtcagcagcactgacagcgacagcttcgtgaagaggatccgggccatcgttgggaatgtgctgcgggcaccctgcaggcgggtatctgtggaggacatggcgcacgcagcccgcaaactgggcctaaaggtcgacgaggactgtgaggagtgtcagaaagcgaaagaccggatggagaggattaccaggaaaatcaaagactcggatgcctacagaagggacgagctgaggctgcagggggacccctggagaaaggcagcccaagtggagaaggagttctgccagctccagtgggccgtggacccccctgagaagcacagggctgagctgaggcggcggctgctagaacttcgaatgcagcagaacggccatgattcctcctcgggggtgcaggagttcatctcggggatcagcagcccctccttgagtgagaagcagtacttcctgaggtggatggagtggggcctggcacgggtggcccagccgcgactgagacagcctccggagacgcttctcaccctgagaccaaagcacgggggcaccacagacgtgggggagccgctctggcctgagcccctaggggtggaacacttcttgcgggagatgggacagttttatgaggctgagagctgtcttgtggaggcagggaggctgccggcaggccagaggcgttttgcccacttcccaggcttggcctcggagctgctgctgacagggctgcctctggagctaatcgatgggagcacgctgagcatgcccgtccgctgggtcacagggctcctgaaggagctgcacgtccgactggagagacggtcaaggctggtggttctgtcaaccgtcggggtgccaggcacgggcaagtccacactcctcaacaccatgtttgggctgcggtttgccacagggaagagctgcggtcctcgaggggccttcatgcagctcatcacagtggctgagggcttcagccaggacctgggctgtgaccacatcctggtgatagactccgggggcttgataggtggggccttgacgtcagctggggacagatttgagctggaggcttccttggccactctgctcatgggactgagcaatgtcaccgtgatcagtctagctgaaaccaaggacattccagcagctattctgcatgcatttctgaggttagaaaaaacggggcacatgcccaactaccagtttgtataccagaaccttcatgatgtatctgttcccggccctaggcccagagacaagagacagctcctggatccacctggtgacctgagcagggctgcagcccagatggagaaacagggcgacggcttccgggcactggcaggcctggccttctgcgaccctgagaagcagcacatctggcacatcccaggcctgtggcacggagcacctcccatggccgcagtgagcttggcctacagtgaagccatatttgaattgaagagatgcctactcgaaaacatcaggaacggcttgtcgaaccaaaacaaaaacatccagcagctcattgagctggtgagacggctgtgagtgtgcagagaaacccagttcaggtgtaggaggctgctgtgggcagccctgtctgatggggcacccgtgtggggctgtgctctggtgcctgagaatggctggtgcccaatcgacatgagaagacgagcagaagacagagggtttggagtctcctcaacagtgttaaaagaggaagtgacctcacagaccagctcagagatgttaccaagaatatcacagcccccagggtagggagacaagcagcagtttgttctgtctcagctcctgtcaaggatcctgcggggtgggccctctgtatagctgctctctgtcactggcccctggagtgggagcagcgtccttagtcactgcaggcccaggcgggcaggtggtcccaggacagaggtggggaagttgtcctgaggaagcagaagtaggccttgctcccgcccaacccaagggcctccagtggaccagcattcaagatgtgagtgcccgtggtgtgcaaggcactcccatggcaccgtatttattgactgatctgtgaaggcttccctgacccctgcccaggaagagttcactggtcgctctgttgtgccccacagcactttgttatacctctgccacacacttcacgcagcgcgttgtaactcatgtgtttacatgtctgtccccccagactgtgagctccttgagggcagggactgtacattctccagctctgtgtccccagggcctggcacattgtagacgcttaataaatgtctgttaaatgaaaaaaaaaaaaaaaaaaaaaaaaaaaaaaaaaaaaaaaaaaaaaaaaaaaaaaaaaaaaaaaaaaaaaa

SEQ ID NO: 1944 - protein, 922 aa, Homo sapiens
MASPGHSDLGEVAPEIKASERRTAVAIADLEWREMEGDDCEFRYGDGTNEAQDNDFPTVERSRLQEMLSLLGLETYQVQKLSLQDSLQISFDSMKNWAPQVPKDLPWNFLRKLQALNADARNTTMVLDVLPDARPVEKESQMEEEIIYWDPADDLAADIYSFSELPTPDTPVNPLDLLCALLLSSDSFLQQEIALKMALCQFALPLVLPDSENHYHTFLLWAMRGIVRTWWSQPPRGMGSFREDSVVLSRAPAFAFVRMDVSSNSKSQLLNAVLSPGHRQWDCFWHRDLNLGTNAREISDGLVEISWFFPSGREDLDIFPEPVAFLNLRGDIGSHWLQFKLLTEISSAVFILTDNISKKEYKLLYSMKESTTKYYFILSPYRGKRNTNLRFLNKLIPVLKIDHSHVLVKVSSTDSDSFVKRIRAIVGNVLRAPCRRVSVEDMAHAARKLGLKVDEDCEECQKAKDRMERITRKIKDSDAYRRDELRLQGDPWRKAAQVEKEFCQLQWAVDPPEKHRAELRRRLLELRMQQNGHDSSSGVQEFISGISSPSLSEKQYFLRWMEWGLARVAQPRLRQPPETLLTLRPKHGGTTDVGEPLWPEPLGVEHFLREMGQFYEAESCLVEAGRLPAGQRRFAHFPGLASELLLTGLPLELIDGSTLSMPVRWVTGLLKELHVRLERRSRLVVLSTVGVPGTGKSTLLNTMFGLRFATGKSCGPRGAFMQLITVAEGFSQDLGCDHILVIDSGGLIGGALTSAGDRFELEASLATLLMGLSNVTVISLAETKDIPAAILHAFLRLEKTGHMPNYQFVYQNLHDVSVPGPRPRDKRQLLDPPGDLSRAAAQMEKQGDGFRALAGLAFCDPEKQHIWHIPGLWHGAPPMAAVSLAYSEAIFELKRCLLENIRNGLSNQNKNIQQLIELVRRL

SEQ ID NO: 1945 - DNA, 1398 bp, Homo sapiens
gtgcagcttggtggcggctgagccggcagcgggccgcctcaggcagccccggccgggccgcccgggtccccggcagcggggtaggatggcgctaaagcggatccagaaggaattaaccgacttgcagagggatcctcctgcccagtgttctgcaggacctgtcggtgatgacttgttccactggcaggccaccatcatgggcccgaatgacagtccttaccaaggaggtgttttcttcctgaccatccactttcctacagattacccgttcaagcccccaaaggttgctttcacaaccaaaatttatcaccctaatatcaacagcaatggcagcatctgccttgatatcctgcggtctcagtggtctccagcgttgactgtgtcaaaagttctcttgtccatctgctcgctgctctgcgaccccaaccccgatgaccccctggtgccagagatagcacacacctacaaggccgacagagagaagtacaacagactagcaagagagtggacacaaaaatatgctatgtaagtgccttggaggttttacatgagacactgtccaagagaagctggcagagaggtcttcccttaaaactttgggctgttggctgagccattcaaagagcatcatctgttcttcaaacaaatgttggtcacccactctctccagctgcagcatgttggtgccattttcagcaattacggctttgacagtgccacctctttgatgccaaatcagcaaccattgttgttatgatctgcagtcttcctggtgacactggaatctctctctctgccgcctcagtttgtctgctggtctcttggggggccaggccctgcacgtctctcctacccggcctcaaatggtgcttctgcccatgatggtaccacaccagggcctcagcctggcccctcaccacataccctttgccttttagaactcagtgccatcctgggtgcccagggcagagcaggctttgttcgcacctcatctgctgcagaaccacatcctgaggagtctcagcttatcctggagggaattgggaacagtgtcactgggaagtgaaggcctagccctgtggcttccaccagtctcctcctgcagtgccacgtggtggcatttctcgcctcacaccaagaagcagcaagtggaaaatttcaggatacaaagcacataacaccccataagagatgattatgtttttagaagcaagagcaaaattatgaaacctctagagatttgggtcatgttactccatttgatgaagattctcactaccgcccgctcctcccataggagcctacactaagtccaagtgtgagccattcacagactagaacacaaggagggagagagactcttaaacgtaaataaaaatgcaattcactcacaactct

SEQ ID NO: 1946 - protein, 147 aa, Homo sapiens
MALKRIQKELTDLQRDPPAQCSAGPVGDDLFHWQATIMGPNDSPYQGGVFFLTIHFPTDYPFKPPKVAFTTKIYHPNINSNGSICLDILRSQWSPALTVSKVLLSICSLLCDPNPDDPLVPEIAHTYKADREKYNRLAREWTQKYAM

SEQ ID NO: 1947 - DNA, 1051 bp, Homo sapiens
agttcaagtaattctcctgcctcagcctcctgaggagctgggattacaggcatgcgccaccacacctggctcacagggtgagaccctgtctctaaaaacaacaacgacaaaaatgacacaatagtgagggcacaggccccaggtcactgacttagattctaatcccagctcttccaactgctgtttcttcacctgctgagcctcagtttccccatctgtcattggggataccagcccctgcttcacgggtgcctaggggattcccaggagattatggaggtgcctcaaggtgcctggtagggctgagggtggagggtatgggggttcagggccgtgtccctggctgagctgaccccacaggtttcagcgggtgggcccacctgacggaggttgaccctgatgaggaggtgcagggcgagatccacctgcggctggaagtgcgcccaggggcccgggcctgccagctacgctgctctgtgctggaggccagatcatgaagaagtcatgctacccacgctggaatgagacgtttgaatttgagctgcaggagggggccgtggaggcgctgtgcgtggaggcctgggactgggaccttgtcagccgaaacgacttcctgggcaaagtggtgatcgatgtccagagactgcgggtggcgcagcaggaggagggctggttccggctgcagcccgaccagtccaagagccggcagcatgacgagggcaacctgggctccttgcagctggaggtgcggctgcgggacgagacggtgctgccctccagctactaccagccactggtgcacctgctgtgccacgaggtcaagctgggcatgcagggcccagggcagctgatcccactcatcgaggagacaaccagcaccgagtgtcgccaggacgtggccacgaacctgctcaagctcttcctggggcaggggctggccaaggacttcctggacctgctcttccagctggagctgagtcgcaccatttcctgttggctgtcctgtaaccactcaatgggttcttctttcctgttgctcagatacagctga

SEQ ID NO: 1948 - protein, 185 aa, Homo sapiens
MKKSCYPRWNETFEFELQEGAVEALCVEAWDWDLVSRNDFLGKVVIDVQRLRVAQQEEGWFRLQPDQSKSRQHDEGNLGSLQLEVRLRDETVLPSSYYQPLVHLLCHEVKLGMQGPGQLIPLIEETTSTECRQDVATNLLKLFLGQGLAKDFLDLLFQLELSRTISCWLSCNHSMGSSFLLLRYS

SEQ ID NO: 1949 - DNA, 2691 bp, Homo sapiens
ggggaggggaaggagcggcacatggggttgagcagaggagaaaatcagaaagatggcttagagaagtcagcagtctgcgagtctggggaggatggagagtggtttggggttttgggtcggggtctaaggtgatcagatgcagaagcattacacagtggcctggtttctttactcagcccctggggtagatcccagccccccatgtaggtcccttggctggaaaaggaagagggagtggtcagatgaatctgaggaggagccggagaaggagctcgcccctgagcctgaggagacctgggtagtggagacgctgtgtgggctcaagatgaagctgaagcaacagcgagtgtcacccatcctccttgagcaccacaaggacttcaacagtcagcttgcccctggggtagatcccagccccccgcataggtccttttgctggaaaaggaagatggagtggtgggacaaatctgaggagtcggaggaggagccacggaaggtgctcgcccctgagcctgaggagatctgggtggcggagatgctgtgtggcctcaagatgaagctgaagcgacggcgagtgtcgctcgtgctccctgagcaccacgaggccttcaacaggctgcttgaggatcctgtcattaaaagattcctggcctgggacaaagatctgagggtgtcggacaagtatctccttgctatggtcatagcgtatttcagccgagccggcttcccctcctggcaataccaacgccttcatttcttcctggctctctacctggccaatgacatggaggaggacgacgaggactccaaacaaaacatcttccacttcctgtatgggaagaaccgctctcgcatacccttgctccgtaagcgtcggttccagttataccgttccatgaacccgagggccaggaagaaccgctctcacatacccttggtccgtaagcgtcggttccagttacgccgttgcatgaacccgagggccaggaagaaccgctctcagatagtcctgttccagaaacgtcggttccacttcttctgttccatgagctgcagggcttgggtttccccagaggagttggaggagatccaggcttatgacccagagcactgggtgtgggcgcgagatcgcgctcgcctttcctagagctccagggaccgtggaggcctgaggtcatcggcctgagagaagaacaccggacccaggggagatgtggattttcagcaggaactttattccaatgctaatggcagacaccaggaaggaggagaggaaccatttgtgcagatcatctagaagaacctggaccattcttgatggagctgaatacagtgatcacgttgtcctcctaggagcaggggtggggggagggggatggggtccttctaggagtccttggagaaaagtaagaaaccaggagtgtttccagttccaccctttcctggggcaccaccaccctttttatattgctgaattccaacctccctggggcggaacctggaggtcctgtttcttacggacttggttgccacagtccaggagcatttgaaggcacaatgcaggggctcagattggcacagaattcttttgtgaaatatcagtgccacagattgtaacagatagcttcatgcacactctgcattttattggtttgtttggaaaatgttggccattgaattattcatagatttatttcaaatagtttggaaattgttgtacttttgaaaacatgctgttcctgtagttttttgatgagagttatagttgttatatatacataaagataattttcttttcatttttgagacaattctttttatcctaaatattttatcatctttaaatttgtttctgtattattatatgtgctcctgaagcgagcactctttttatctatgatacttccataataatctcttctatttatagctattggtagttcccctaaattctgacgatagaaatttttatttgctgtttaggtttgtgactgaattgtgagaattcagttgtgatttttaacatgtgtcagatatatatactaacacgtctaatatatactattttattggtttattttgaaaaacatgggtatagaattatttaaatattattttatttatttaaatatttattaaatatatttatttatttaaatgttattattactttaaatattattttaaatattttggaaatactggtatttttgaatagatgctgtttctataaagctgtgtgatggtattataactgttatatacacatacatataattttgttttcctttttaagagaggattcttttcatcctaaatcttttacctttcaatctttgtatctattattacacgtgctgctgaagggagcatggtttttatctatgatacttagttaacatatatattacatttatagctatgtagtagttcccctaaattcttgtaaaaataaatttttatttgatatttcatctatgtttgaaatgtgagaattcagatgtaattttttaccttgatttggcatgtttgtatgttactttaaagaggatgtgtgttctaaaggaggacatgagctgtgtgttttcaagagaacaatagagtgtgtctcttggggaaacgtaataaaaatgaacttttctcaccttcaaaaaaaaaaaaaaaaaaaaaaaaaaaaaaaaaaaaaaaaaa

SEQ ID NO: 1950 - protein, 336 aa, Homo sapiens
MQKHYTVAWFLYSAPGVDPSPPCRSLGWKRKREWSDESEEEPEKELAPEPEETWVVETLCGLKMKLKQQRVSPILLEHHKDFNSQLAPGVDPSPPHRSFCWKRKMEWWDKSEESEEEPRKVLAPEPEEIWVAEMLCGLKMKLKRRRVSLVLPEHHEAFNRLLEDPVIKRFLAWDKDLRVSDKYLLAMVIAYFSRAGFPSWQYQRLHFFLALYLANDMEEDDEDSKQNIFHFLYGKNRSRIPLLRKRRFQLYRSMNPRARKNRSHIPLVRKRRFQLRRCMNPRARKNRSQIVLFQKRRFHFFCSMSCRAWVSPEELEEIQAYDPEHWVWARDRARLS

SEQ ID NO: 1951 - DNA, 3751 bp, Homo sapiens
cccccaaaagaatgtgtgtgtgattaaaatttaagttagagacagtctcactatgttgcccaggctggtctcaaactcctggcctcaagtgatcctcctgcctcggcctcccaaagtgctaggattacaagggctaagaattctagtcattcattcactcactcattcattcattcatgaataaacagtttgccctgcttgtgtacctgtccccctcctgggcggatacggcaggcaaacggtgcaagggcggctgccgggagaaggtgggcagctggagtgggactgggggagacaggatcaatgtgacctgcggtggtccccaggtggccgggatgcagtacctgcacggcgtcctgggccccatcatcaacaaggtgtttgaggagaagtacgtggagctggaccccagcaaagtggaagttaaggatgtagggtgttccgggctgcaccgcccgcagaccgaggccgaggtgctggagcagagcgcgcagacgctgcgcgcccacctgggggccctgctgagcgcgctcagccgctcggttcccgcgtgccccgccgtggtgcgcgccaccttccgccagctcttccggcgcgtgcgcgagcgcttccccggcgcccagcacgagaatgtaccgttcatcgccgtcaccagcttcctgtgcctgcgcttcttctctcccgccatcatgtcgcccaagctcttccacctgcgggagcgccacgcggacgcccgcaccagccgcaccctgctcctgttggccaaggcagtccagaacgtgggcaacatggacacgccggcttccagggccaaggaggcttggatggagccgctgcagcccaccgtgcgccagggcgtggcgcagctgaaggacttcatcaccaagctcgtggacatcgaggagaaggacgagctggacctgcagcggacgctgagtttgcaggcgccacctgtgaaggaggggccactcttcatccacaggaccaagggcaagggccccctcatgtcctcctccttcaagaagctctacttctccctcactaccgaggccctcagcttcgcgaagacgcccagctccaagaaaagcgccctcatcaagttagccaacatccgggcagcagaaaaggttgaggaaaagaactttggcagctcgcacgtcatgcaggtcatctacacggacgacgccggcaggccccagactgcctacctgcagtgcaagtgtgtgaatgagcttaaccagtggctgtctgtgctgcggaaggtgagcatcaacaacaccggactgctgggctcctaccaccctggcatcttctgtggggacaagtggagctgctgccaccaaaaagagaagacaggtcagggctgcgataagacccggtcacgggtgaccctgcaggagtggaatgaccctcttgaccatgaccttgaggcccagctcatctaccggcacctgctgggcgtggaggccatgctgtgggagaggcaccgggagctgagcgggggtgcagaggcaggcacggtgcccacgagccctggcaaagtccccgaggactcattggcccggctgctccgggtgctgcaggacctccgcgaggcccatagctccagcccggccggctccccaccctcagagcccaactgcctcctggagctgcagacgtgaggcccgccctacgctcccttgctgagtcccctgccaagcgctcggagcccctccaggacactctgcaccccctcaccccggtcctcctcattagggtgcagggcctaggtctcttccaagtgggggaggggggagagtcaggaataaggggatccccagaagtgcagagctgagcaggcttgggcctgtcatggctggcctgaagtgtccccagctccctacagccgctgtagccatcactgcctctccagggaccctcctctcctgcctaggacagacccagccagaaccactgctaggatgggccacacccaggggtctggcctccagggacctagagaatgggagggagaacggggccccaggagacccggccgccaccccacccgctacccttgggtgccacagggctgtgctgttgccaacagtaaacctgctgttactgtccaggctctggggtcttgtgatgagggtctggggagaaagtgggcccggggggaccccggaggctgtcggtggatgtgccgatgatggggctgacagtatgggctctgggcatccctgttcccccctctttcttccccccactcttctggggtcgggggttcctttcccttcccagttgctgtccctgggtcccctctttcatgtcccacaggccacagagcccagtgtgtccaaccagctgttctctcctcaaagcagcccccaagcaagtcccttctctagggtgtccctgaggacagcacagatgcgggactcagagaccccattcctcttcacgcagcccttaccccaagccctctagctgtgtggctggcagtgttggccacgtaggggctcccatccccccaccattgtgtcacataggctgccaggctcagctcccagctgcgtccacagtgacctggatcagggtggggacaaggactggaccctccttctccagaaggccttcagctcttgccttgccatgcagtcacctccttccccctctgaccccagatcccaaaggtgcaccgttgccccagcccctttctggccccatggggtttctctgatgccttcatcatagaggcccggggctggtccgatggttggcaaaacttgactccggcccagtccccactcttggggacttagaacccctggtgtcctgggatctggcctgcctttctttggtcagtccctgtggtcccccaccagctccccctcccatagggctgcccaccaagccctgcccccagcccaagaggagcccccactgcctgcggggcagtgatgtctggccaccggctcacaccaatgacttggtcctggggtggcagaagcagcaggtgacaggagcagggcccctgtccctctcttctggccctgtggtacccaggccacacgttgtgcccgctcttagggctgaccggctgcagggaccaccagccgctgctactgtgggccgccccggggcagggtgggcagggcttttgtgggttatgaggacacagaagtccctgaggcccccagacctggcacagccaacctccttcctcccccggttgcccccaactctaaagcctcctccctcccagtgtccactggctccaggctcctcacaacagcagctcatagacacagggcgtctccaggtgtcccagccctccagatgtttctagctctccagatgggcgctgttttcacgtctgcctgcatccattcattccttcattcctcacctttatcctgttatctctatttttttaagctaccaggaaggaaagggaagaagagatcacgaaactgggacccccagaagggaggagtgggctttgaacttagacatctacctcagagctcaaataggttgtttaaaatcacattcaattttcagatgaaggggaactttatagttttttttgtttgtttgtttttttgagacagagtctcactctgttgcccaggctggagtgcaaatggcttgatcttggttcactgcaacctctgcctcccaggttcaagcaattctcttgcctcagcctcccgagtagctgggactacaggcgtgtgccaccacgcccagctaattcttgtat

SEQ ID NO: 1952 - protein, 495 aa, Homo sapiens
MNKQFALLVYLSPSWADTAGKRCKGGCREKVGSWSGTGGDRINVTCGGPQVAGMQYLHGVLGPIINKVFEEKYVELDPSKVEVKDVGCSGLHRPQTEAEVLEQSAQTLRAHLGALLSALSRSVPACPAVVRATFRQLFRRVRERFPGAQHENVPFIAVTSFLCLRFFSPAIMSPKLFHLRERHADARTSRTLLLLAKAVQNVGNMDTPASRAKEAWMEPLQPTVRQGVAQLKDFITKLVDIEEKDELDLQRTLSLQAPPVKEGPLFIHRTKGKGPLMSSSFKKLYFSLTTEALSFAKTPSSKKSALIKLANIRAAEKVEEKNFGSSHVMQVIYTDDAGRPQTAYLQCKCVNELNQWLSVLRKVSINNTGLLGSYHPGIFCGDKWSCCHQKEKTGQGCDKTRSRVTLQEWNDPLDHDLEAQLIYRHLLGVEAMLWERHRELSGGAEAGTVPTSPGKVPEDSLARLLRVLQDLREAHSSSPAGSPPSEPNCLLELQT

SEQ ID NO: 1953 - DNA, 2860 bp, Homo sapiens
gatcactggaggccaggagtttgagaacagcctggccaatgtagcaagaccccatctctaaaaaaaagaaattagccagccatgatggcattataggagtgagccactgggattataggagtgagccactgcacctgctctccaggccatgcgcccgggcatgggtcatgttccactggaggaagggcagcttctcctaattcactcaaagctgctgggttggtatggtggggaacatggtgtctggcatggtacaggagctccgggttaggagggcttcctggaggaggtgacgtctgaacaggcctccccctctgtgtcccctgcagtgtgtgaatgagcttaaccagtggctgtctgtgctgcggaaggtgagcatcaacaacaccggactgctgggctcctaccaccctggcatcttctgtggggacaagtggagctgctgccaccaaaaagagaagacaggtcagggctgcgataagacccggtcacgggtgaccctgcaggagtggaatgaccctcttgaccatgaccttgaggcccagctcatctaccggcacctgctgggcgtggaggccatgctgtgggagaggcaccgggagctgagcgggggtgcagaggcaggcacggtgcccacgagccctggcaaagtccccgaggactcattggcccggctgctccgggtgctgcaggacctccgcgaggcccatagctccagcccggccggctccccaccctcagagcccaactgcctcctggagctgcagacgtgaggcccgccctacgctcccttgctgagtcccctgccaagcgctcggagcccctccaggacactctgcaccccctcaccccggtcctcctcattagggtgcagggcctaggtctcttccaagtgggggaggggggagagtcaggaataaggggatccccagaagtgcagagctgagcaggcttgggcctgtcatggctggcctgaagtgtccccagctccctacagccgctgtagccatcactgcctctccagggaccctcctctcctgcctaggacagacccagccagaaccactgctaggatgggccacacccaggggtctggcctccagggacctagagaatgggagggagaacggggccccaggagacccggccgccaccccacccgctacccttgggtgccacagggctgtgctgttgccaacagtaaacctgctgttactgtccaggctctggggtcttgtgatgagggtctggggagaaagtgggcccggggggaccccggaggctgtcggtggatgtgccgatgatggggctgacagtatgggctctgggcatccctgttcccccctctttcttccccccactcttctggggtcgggggttcctttcccttcccagttgctgtccctgggtcccctctttcatgtcccacaggccacagagcccagtgtgtccaaccagctgttctctcctcaaagcagcccccaagcaagtcccttctctagggtgtccctgaggacagcacagatgcgggactcagagaccccattcctcttcacgcagcccttaccccaagccctctagctgtgtggctggcagtgttggccacgtaggggctcccatccccccaccattgtgtcacataggctgccaggctcagctcccagctgcgtccacagtgacctggatcagggtggggacaaggactggaccctccttctccagaaggccttcagctcttgccttgccatgcagtcacctccttccccctctgaccccagatcccaaaggtgcaccgttgccccagcccctttctggccccatggggtttctctgatgccttcatcatagaggcccggggctggtccgatggttggcaaaacttgactccggcccagtccccactcttggggacttagaacccctggtgtcctgggatctggcctgcctttctttggtcagtccctgtggtcccccaccagctccccctcccatagggctgcccaccaagccctgcccccagcccaagaggagcccccactgcctgcggggcagtgatgtctggccaccggctcacaccaatgacttggtcctggggtggcagaagcagcaggtgacaggagcagggcccctgtccctctcttctggccctgtggtacccaggccacacgttgtgcccgctcttagggctgaccggctgcagggaccaccagccgctgctactgtgggccgccccggggcagggtgggcagggcttttgtgggttatgaggacacagaagtccctgaggcccccagacctggcacagccaacctccttcctcccccggttgcccccaactctaaagcctcctccctcccagtgtccactggctccaggctcctcacaacagcagctcatagacacagggcgtctccaggtgtcccagccctccagatgtttctagctctccagatgggcgctgttttcacgtctgcctgcatccattcattccttcattcctcacctttatcctgttatctctatttttttaagctaccaggaaggaaagggaagaagagatcacgaaactgggacccccagaagggaggagtgggctttgaacttagacatctacctcagagctcaaataggttgtttaaaatcacattcaattttcagatgaaggggaactttatagttttttttgtttgtttgtttttttgagacagagtctcactctgttgcccaggctggagtgcaaatggcttgatcttggttcactgcaacctctgcctcccaggttcaagcaattctcttgcctcagcctcccgagtagctgggactacaggcgtgtgccaccacgcccagctaattcttgtat

SEQ ID NO: 1954 - protein, 64 aa, Homo sapiens
MLWERHRELSGGAEAGTVPTSPGKVPEDSLARLLRVLQDLREAHSSSPAGSPPSEPNCLLELQT

SEQ ID NO: 1955 - DNA, 2815 bp, Homo sapiens
tcttccaggcttgaccgtcctggcctgtggggaggaagtcacagacctgtccctctgtgcccttccctctaggagttcccttttgtgtcagggtccagagccactgggaaaagtagtgatatcagggccaccaaatatatttggcgggttctggaatacctacgagcgtggccaaggggccagcggcggctgaaatccagcccacaccagcctcctgggctcctaccatcccggtgccttccgtggggacaagtggagctgttgccaccaaaaagacaagacagtgtgtgaatgagcttaaccagtggctgtctgtgctgcggaaggtgagcatcaacaacaccggactgctgggctcctaccaccctggcatcttctgtggggacaagtggagctgctgccaccaaaaagagaagacaggtcagggctgcgataagacccggtcacgggtgaccctgcaggagtggaatgaccctcttgaccatgaccttgaggcccagctcatctaccggcacctgctgggcgtggaggccatgctgtgggagaggcaccgggagctgagcgggggtgcagaggcaggcacggtgcccacgagccctggcaaagtccccgaggactcattggcccggctgctccgggtgctgcaggacctccgcgaggcccatagctccagcccggccggctccccaccctcagagcccaactgcctcctggagctgcagacgtgaggcccgccctacgctcccttgctgagtcccctgccaagcgctcggagcccctccaggacactctgcaccccctcaccccggtcctcctcattagggtgcagggcctaggtctcttccaagtgggggaggggggagagtcaggaataaggggatccccagaagtgcagagctgagcaggcttgggcctgtcatggctggcctgaagtgtccccagctccctacagccgctgtagccatcactgcctctccagggaccctcctctcctgcctaggacagacccagccagaaccactgctaggatgggccacacccaggggtctggcctccagggacctagagaatgggagggagaacggggccccaggagacccggccgccaccccacccgctacccttgggtgccacagggctgtgctgttgccaacagtaaacctgctgttactgtccaggctctggggtcttgtgatgagggtctggggagaaagtgggcccggggggaccccggaggctgtcggtggatgtgccgatgatggggctgacagtatgggctctgggcatccctgttcccccctctttcttccccccactcttctggggtcgggggttcctttcccttcccagttgctgtccctgggtcccctctttcatgtcccacaggccacagagcccagtgtgtccaaccagctgttctctcctcaaagcagcccccaagcaagtcccttctctagggtgtccctgaggacagcacagatgcgggactcagagaccccattcctcttcacgcagcccttaccccaagccctctagctgtgtggctggcagtgttggccacgtaggggctcccatccccccaccattgtgtcacataggctgccaggctcagctcccagctgcgtccacagtgacctggatcagggtggggacaaggactggaccctccttctccagaaggccttcagctcttgccttgccatgcagtcacctccttccccctctgaccccagatcccaaaggtgcaccgttgccccagcccctttctggccccatggggtttctctgatgccttcatcatagaggcccggggctggtccgatggttggcaaaacttgactccggcccagtccccactcttggggacttagaacccctggtgtcctgggatctggcctgcctttctttggtcagtccctgtggtcccccaccagctccccctcccatagggctgcccaccaagccctgcccccagcccaagaggagcccccactgcctgcggggcagtgatgtctggccaccggctcacaccaatgacttggtcctggggtggcagaagcagcaggtgacaggagcagggcccctgtccctctcttctggccctgtggtacccaggccacacgttgtgcccgctcttagggctgaccggctgcagggaccaccagccgctgctactgtgggccgccccggggcagggtgggcagggcttttgtgggttatgaggacacagaagtccctgaggcccccagacctggcacagccaacctccttcctcccccggttgcccccaactctaaagcctcctccctcccagtgtccactggctccaggctcctcacaacagcagctcatagacacagggcgtctccaggtgtcccagccctccagatgtttctagctctccagatgggcgctgttttcacgtctgcctgcatccattcattccttcattcctcacctttatcctgttatctctatttttttaagctaccaggaaggaaagggaagaagagatcacgaaactgggacccccagaagggaggagtgggctttgaacttagacatctacctcagagctcaaataggttgtttaaaatcacattcaattttcagatgaaggggaactttatagttttttttgtttgtttgtttttttgagacagagtctcactctgttgcccaggctggagtgcaaatggcttgatcttggttcactgcaacctctgcctcccaggttcaagcaattctcttgcctcagcctcccgagtagctgggactacaggcgtgtgccaccacgcccagctaattcttgtat

SEQ ID NO: 1956 - protein, 64 aa, Homo sapiens; identical to SEQ ID NO: 1954

SEQ ID NO: 1957 - DNA, 1314 bp, Homo sapiens
ccgcgtgccccgccgtggtgcgcgccaccttccgccagctcttccggcgcgtgcgcgagcgcttccccggcgcccagcacgaggtgcgccctccacccgctgggctaggctgggccgggttggactgggctggggcgaggggcgggcgaagagcggtggggaaccagggagcgctggggaggaccagggaggctgtgtcccggcgagggtcagggacggagcctaaggggagggggctgccaggagccctggtctgggggactccagcccgcgctcttccgcacccctccagaatgtaccgttcatcgccgtcaccagcttcctgtgcctgcgcttcttctctcccgccatcatgtcgcccaagctcttccacctgcgggagcgccacgcggacgcccgcaccagccgcaccctgctcctgttggccaaggtgcgggccttgcggccacgggcgggatgcacagctgggtgtcctaccggggccctggcctggactgcagagtgttccctaccggctccggcgaggccactggcacgcccacgtaggcactgcacttcacagtttgcaaagccttcctgtggccaccttgtccgagttccatctcatggataagggaacaggcctgcgaggggtcgggggttgccaaggccgcccatcctgtcggtggtgaatcgcgggaccttccaacccaggcagtccagaacgtgggcaacatggacacgccggcttccagggccaaggaggcttggatggagccgctgcagcccaccgtgcgccagggcgtggcgcagctgaaggacttcatcaccaagctcgtggacatcgaggagaaggacggtgagcgccgccctgcacagacccgcccacagcctactgctgacgtttgctccgcccttgagccccacggccccacccaccgctgtttgttcctctcgtggccccacccaccgcctgctgttgacatttgccaggcccccaggccatagacccacgcaccactgtttgtgcttcctgtgaccctgcccactgcctgctgttgacgtttgccccacccctagacccatggcctcacctcccatcatctgtgcctgttgacatttgctccatccttgagctccatagccccgccgccacctgctactgacgcgtgtcccgcctccaagcccatggccctgccttcctcagtccacctgtcaccccgctcaccaccagctgttgatgtttgctccgcccttgagccccatgactacgtccactgcctgctgttcagatttgctcagcccttgagccccatggccccgcccactgctccg

SEQ ID NO: 1958 - protein, 90 aa, Homo sapiens
MDTPASRAKEAWMEPLQPTVRQGVAQLKDFITKLVDIEEKDGERRPAQTRPQPTADVCSALEPHGPTHRCLFLSWPHPPPAVDICQAPRP

SEQ ID NO: 1959 - DNA, 1222 bp, Homo sapiens
gcgagcgcttccccggcgcccagcacgaggtgcgccctccacccgctgggctaggctgggccgggttggactgggctggggcgaggggcgggcgaagagcggtggggaaccagggagcgctggggaggaccagggaggctgtgtcccggcgagggtcagggacggagcctaaggggagggggctgccaggagccctggtctgggggactccagcccgcgctcttccgcacccctccagaatgtaccgttcatcgccgtcaccagcttcctgtgcctgcgcttcttctctcccgccatcatgtcgcccaagctcttccacctgcgggagcgccacgcggacgcccgcaccagccgcaccctgctcctgttggccaaggcagtccagaacgtgggcaacatggacacgccggcttccagggccaaggaggcttggatggagccgctgcagcccaccgtgcgccagggcgtggcgcagctgaaggacttcatcaccaagctcgtggacatcgaggagaaggacgagctggacctgcagcggacgctgagtttgcaggcgccacctgtgaaggaggggccactcttcatccacaggaccaagggcaagggccccctcatgtcctcctccttcaagaagctctacttctccctcactaccgaggccctcagcttcgcgaagacgcccagctccaagaaaagcgccctcatcaagttagccaacatccgggcagcagaaaaggttgaggaaaagaactttggcagctcgcacgtcatgcaggtcatctacacggacgacgccggcaggccccagactgcctacctgcagtgcaagtgtgtgaatgagcttaaccagtggctgtctgtgctgcggaaggtcagggctgcgataagacccggtcacgggtgaccctgcaggagtggaatgaccctcttgaccatgaccttgaggcccagctcatctaccggcacctgctgggcgtggaggccatgctgtggtgagtcccacccaggagagcctgtgcagcctggggaacgtgccaggcttggggctgctccatggtggctggtcacctctcttgtaattggccacatctggggagggcaccaggagtacctctctgcagcacgaggccagctcaggttaggacagaggccccaagggtcagggccatgcctgcttcatgccatgtgctgactgagcccaccttgcaacctgcccagctgt

SEQ ID NO: 1960 - protein, 201 aa, Homo sapiens
MSPKLFHLRERHADARTSRTLLLLAKAVQNVGNMDTPASRAKEAWMEPLQPTVRQGVAQLKDFITKLVDIEEKDELDLQRTLSLQAPPVKEGPLFIHRTKGKGPLMSSSFKKLYFSLTTEALSFAKTPSSKKSALIKLANIRAAEKVEEKNFGSSHVMQVIYTDDAGRPQTAYLQCKCVNELNQWLSVLRKVRAAIRPGHG

SEQ ID NO: 1961 - DNA, 4441 bp, Homo sapiens
attcccctccctccctggcctggcagagctggacctgcagcggacgctgagtttgcaggcgccacctgtgaaggaggggccactcttcatccacaggaccaagggcaagggccccctcatgtcctcctccttcaagaagctctacttctccctcactaccgaggccctcagcttcgcgaagacgcccagctccaagtgtgtgaatgagcttaaccagtggctgtctgtgctgcggaaggtgagcatcaacaacaccggactgctgggctcctaccaccctggcatcttctgtggggacaagtggagctgctgccaccaaaaagagaagacaggtgggagaggaggcctgggtcccgggctctgcatccgtccactgcgagatcgggcctctggctgaacgatgggaccgtgagccctgctgtgcacctgcagggacataacccaaggaatgctggcccctccaggagctctgggcagaaagggtcccgtggaccaggtcagggctgcgataagacccggtcacgggtgaccctgcaggagtggaatgaccctcttgaccatgaccttgaggcccagctcatctaccggcacctgctgggcgtggaggccatgctgtgggagaggcaccgggagctgagcgggggtgcagaggcaggcacggtgcccacgagccctggcaaagtccccgaggactcattggcccggctgctccgggtgctgcaggacctccgcgaggcccatagctccagcccggccggctccccaccctcagagcccaactgcctcctggagctgcagacgtgaggcccgccctacgctcccttgctgagtcccctgccaagcgctcggagcccctccaggacactctgcaccccctcaccccggtcctcctcattagggtgcagggcctaggtctcttccaagtgggggaggggggagagtcaggaataaggggatccccagaagtgcagagctgagcaggcttgggcctgtcatggctggcctgaagtgtccccagctccctacagccgctgtagccatcactgcctctccagggaccctcctctcctgcctaggacagacccagccagaaccactgctaggatgggccacacccaggggtctggcctccagggacctagagaatgggagggagaacggggccccaggagacccggccgccaccccacccgctacccttgggtgccacagggctgtgctgttgccaacagtaaacctgctgttactgtccaggctctggggtcttgtgatgagggtctggggagaaagtgggcccggggggaccccggaggctgtcggtggatgtgccgatgatggggctgacagtatgggctctgggcatccctgttcccccctctttcttccccccactcttctggggtcgggggttcctttcccttcccagttgctgtccctgggtcccctctttcatgtcccacaggccacagagcccagtgtgtccaaccagctgttctctcctcaaagcagcccccaagcaagtcccttctctagggtgtccctgaggacagcacagatgcgggactcagagaccccattcctcttcacgcagcccttaccccaagccctctagctgtgtggctggcagtgttggccacgtaggggctcccatccccccaccattgtgtcacataggctgccaggctcagctcccagctgcgtccacagtgacctggatcagggtggggacaaggactggaccctccttctccagaaggccttcagctcttgccttgccatgcagtcacctccttccccctctgaccccagatcccaaaggtgcaccgttgccccagcccctttctggccccatggggtttctctgatgccttcatcatagaggcccggggctggtccgatggttggcaaaacttgactccggcccagtccccactcttggggacttagaacccctggtgtcctgggatctggcctgcctttctttggtcagtccctgtggtcccccaccagctccccctcccatagggctgcccaccaagccctgcccccagcccaagaggagcccccactgcctgcggggcagtgatgtctggccaccggctcacaccaatgacttggtcctggggtggcagaagcagcaggtgacaggagcagggcccctgtccctctcttctggccctgtggtacccaggccacacgttgtgcccgctcttagggctgaccggctgcagggaccaccagccgctgctactgtgggccgccccggggcagggtgggcagggcttttgtgggttatgaggacacagaagtccctgaggcccccagacctggcacagccaacctccttcctcccccggttgcccccaactctaaagcctcctccctcccagtgtccactggctccaggctcctcacaacagcagctcatagacacagggcgtctccaggtgtcccagccctccagatgtttctagctctccagatgggcgctgttttcacgtctgcctgcatccattcattccttcattcctcacctttatcctgttatctctatttttttaagctaccaggaaggaaagggaagaagagatcacgaaactgggacccccagaagggaggagtgggctttgaacttagacatctacctcagagctcaaataggttgtttaaaatcacattcaattttcagatgaaggggaactttatagttttttttgtttgtttgtttttttgagacagagtctcactctgttgcccaggctggagtgcaaatggcttgatcttggttcactgcaacctctgcctcccaggttcaagcaattctcttgcctcagcctcccgagtagctgggactacaggcgtgtgccaccacgcccagctaattcttgtatttttagtagagacggagtttctccatgttggccagactggtctcgaactcctgacctcaggtgatctgaccgccttggcttccgaaagtgctgagattacagttgcgagccactgtgcatggccagaactttataataattaaaagagacttgaagctgggtgtgacggtgcacacctctagtcccagctactcgggaggccaaggcagaaggatcaccttgaggccaggagtttaaggccagcctgggcaacatagcaaaacctagtccctaaaattaaaaaaaaaaaaaaaaaaaggaaaataaaggagacttgaaatttttgaactaaatagtggtgatggctatacattgtgaatgtaattaacaccactgagttaaacacttaaaatggttaaaatggcaaattgtatgttatacctattttactacaataaaaagtataaaaaagaggcaagatatttaggtgacttacagcaaccaattgcaacaaaacaaaatgttaagaaatgatctttttatgaggcaattggaaatttgaacactgatcaactataggatgattggaattattaattttgtaaaggtgtgataagatactgcacttggctgggcacagtggcacatgcctgtaatcccagctacttggcaggctgaggtgggagaatcgcttgagctcaggagttcgagaccagcctgggcaatgtggcgaaatccccgtctttacaaaaacaaacaaacaaacaaaaaagatattgcagttgtgttgtaagcgtccttatctttcagagctacatagtggaatgtttatggaatatttaggataaatgatatacgcatttgggatttgctgcaaaatgacccagagtcaggggtcagggggagaggtagagatgagacaagaggtagaggggagaggtagaggtagccacgagctgataattacagacaagagatgcggagtatgtgggggctcattatcctgcatagtctatctttgtatatctttgaacttttcaagaataaaaaagcttaaaaagtatacatggcctggtcctaccagagactcacccaatgccagcctccagccagggagagccaagtttgcattttcacacgcatctcacactcctctgcactctcaacttggagagctccaaacagggaaaccccaagccttgctggcttctgccaaccccctgaacagaagcatgggtccccctgatcaccacctcaccaccctcatcctgatctcactggagactccctttcccggtctgctaagtagcgggtgtttttccttgacactaacgctaccgctagaccacggtcggcttggcaacaggtgtcttcccagatgctggcgttactgctagaccaaggagccctctggtggccctgtccgggcataacagaaagctcgcactctttgtcttctggtcactcctcactgtcccctcagctcccatctctgtatggcctggtttttcctaggttatgattgtagagcgaggattattataatattggaataaagaataattactaca

SEQ ID NO: 1962 - protein, 64 aa, Homo sapiens; identical to SEQ ID NO: 1954

SEQ ID NO: 1963 - DNA, 4051 bp, Homo sapiens
ctgggctaggctgggccgggttggactgggctggggcgaggggcgggcgaagagcggtggggaaccagggagcgctggggaggaccagggaggctgtgtcccggcgagggtcagggacggagcctaaggggagggggctgccaggagccctggtctgggggactccagcccgcgctcttccgcacccctccagaatgtaccgttcatcgccgtcaccagcttcctgtgcctgcgcttcttctctcccgccatcatgtcgcccaagctcttccacctgcgggagcgccacgcggacgcccgcaccagccgcaccctgctcctgttggccaaggcagtccagaacgtgggcaacatggacacgccggcttccagggccaaggaggcttggatggagccgctgcagcccaccgtgcgccagggcgtggcgcagctgaaggacttcatcaccaagctcgtggacatcgaggagaaggacgagctggacctgcagcggacgctgagtttgcaggcgccacctgtgaaggaggggccactcttcatccacaggaccaagggcaagggccccctcatgtcctcctccttcaagaagctctacttctccctcactaccgaggccctcagcttcgcgaagacgcccagctccaaggagttcccttttgtgtcagggtccagagccactgggaaaagtagtgatatcagggccaccaaatatatttggcgggttctggaatacctacgagcgtggccaaggggccagcggcggctgaaatccagcccacaccagcctcctgggctcctaccatcccggtgccttccgtggggacaagtggagctgttgccaccaaaaagacaagacagtgtgtgaatgagcttaaccagtggctgtctgtgctgcggaaggtgagcatcaacaacaccggactgctgggctcctaccaccctggcatcttctgtggggacaagtggagctgctgccaccaaaaagagaagacaggtgggagaggaggcctgggtcccgggctctgcatccgtccactgcgagatcgggcctctggctgaacgatgggaccgtgagccctgctgtgcacctgcagggacataacccaaggaatgctggcccctccaggagctctgggcagaaagggtcccgtggaccaggtggtttgggaaatgccacgtgatgtgtgtgaagcacatgagtgaattcgctgaaggctctaaggaggcccgaaaacacgttagaatcccatttctttttatttcttcttcttttttttttttcagacacagattttcactctgtcccccagactggagtgcaatggcacgatctcagctcactgcaatctccacctcccagggtcaagcaattctcctgcctcaacctccccagtagctgggattaccggcactcgccaccaagcctagctaatttttttgtattttgactagagatggggtttcaccatgttagtcaagctgctcttgtttttttttgttgttgttgttgttgttgtttgataccaagtctcgctctatcatccaggctggagtgcagtggtgcaatctcggctcactgcaatctctgtttcccaggctcaagtgattctcctgcctcagcctcccaagtactacaggcgcaagccactgcacccagtcagggctgcgataagacccggtcacgggtgaccctgcaggagtggaatgaccctcttgaccatgaccttgaggcccagctcatctaccggcacctgctgggcgtggaggccatgctgtgggagaggcaccgggagctgagcgggggtgcagaggcaggcacggtgcccacgagccctggcaaagtccccgaggactcattggcccggctgctccgggtgctgcaggacctccgcgaggcccatagctccagcccggccggctccccaccctcagagcccaactgcctcctggagctgcagacgtgaggcccgccctacgctcccttgctgagtcccctgccaagcgctcggagcccctccaggacactctgcaccccctcaccccggtcctcctcattagggtgcagggcctaggtctcttccaagtgggggaggggggagagtcaggaataaggggatccccagaagtgcagagctgagcaggcttgggcctgtcatggctggcctgaagtgtccccagctccctacagccgctgtagccatcactgcctctccagggaccctcctctcctgcctaggacagacccagccagaaccactgctaggatgggccacacccaggggtctggcctccagggacctagagaatgggagggagaacggggccccaggagacccggccgccaccccacccgctacccttgggtgccacagggctgtgctgttgccaacagtaaacctgctgttactgtccaggctctggggtcttgtgatgagggtctggggagaaagtgggcccggggggaccccggaggctgtcggtggatgtgccgatgatggggctgacagtatgggctctgggcatccctgttcccccctctttcttccccccactcttctggggtcgggggttcctttcccttcccagttgctgtccctgggtcccctctttcatgtcccacaggccacagagcccagtgtgtccaaccagctgttctctcctcaaagcagcccccaagcaagtcccttctctagggtgtccctgaggacagcacagatgcgggactcagagaccccattcctcttcacgcagcccttaccccaagccctctagctgtgtggctggcagtgttggccacgtaggggctcccatccccccaccattgtgtcacataggctgccaggctcagctcccagctgcgtccacagtgacctggatcagggtggggacaaggactggaccctccttctccagaaggccttcagctcttgccttgccatgcagtcacctccttccccctctgaccccagatcccaaaggtgcaccgttgccccagcccctttctggccccatggggtttctctgatgccttcatcatagaggcccggggctggtccgatggttggcaaaacttgactccggcccagtccccactcttggggacttagaacccctggtgtcctgggatctggcctgcctttctttggtcagtccctgtggtcccccaccagctccccctcccatagggctgcccaccaagccctgcccccagcccaagaggagcccccactgcctgcggggcagtgatgtctggccaccggctcacaccaatgacttggtcctggggtggcagaagcagcaggtgacaggagcagggcccctgtccctctcttctggccctgtggtacccaggccacacgttgtgcccgctcttagggctgaccggctgcagggaccaccagccgctgctactgtgggccgccccggggcagggtgggcagggcttttgtgggttatgaggacacagaagtccctgaggcccccagacctggcacagccaacctccttcctcccccggttgcccccaactctaaagcctcctccctcccagtgtccactggctccaggctcctcacaacagcagctcatagacacagggcgtctccaggtgtcccagccctccagatgtttctagctctccagatgggcgctgttttcacgtctgcctgcatccattcattccttcattcctcacctttatcctgttatctctatttttttaagctaccaggaaggaaagggaagaagagatcacgaaactgggacccccagaagggaggagtgggctttgaacttagacatctacctcagagctcaaataggttgtttaaaatcacattcaattttcagatgaaggggaactttatagttttttttgtttgtttgtttttttgagacagagtctcactctgttgcccaggctggagtgcaaatggcttgatcttggttcactgcaacctctgcctcccaggttcaagcaattctcttgcctcagcctcccgagtagctgggactacaggcgtgtgccaccacgcccagctaattcttgtat

SEQ ID NO: 1964 - protein, 203 aa, Homo sapiens
MSPKLFHLRERHADARTSRTLLLLAKAVQNVGNMDTPASRAKEAWMEPLQPTVRQGVAQLKDFITKLVDIEEKDELDLQRTLSLQAPPVKEGPLFIHRTKGKGPLMSSSFKKLYFSLTTEALSFAKTPSSKEFPFVSGSRATGKSSDIRATKYIWRVLEYLRAWPRGQRRLKSSPHQPPGLLPSRCLPWGQVELLPPKRQDSV

SEQ ID NO: 1965 - DNA, 3295 bp, Homo sapiens
gcgagcgcttccccggcgcccagcacgaggtgcgccctccacccgctgggctaggctgggccgggttggactgggctggggcgaggggcgggcgaagagcggtggggaaccagggagcgctggggaggaccagggaggctgtgtcccggcgagggtcagggacggagcctaaggggagggggctgccaggagccctggtctgggggactccagcccgcgctcttccgcacccctccagaatgtaccgttcatcgccgtcaccagcttcctgtgcctgcgcttcttctctcccgccatcatgtcgcccaagctcttccacctgcgggagcgccacgcggacgcccgcaccagccgcaccctgctcctgttggccaaggcagtccagaacgtgggcaacatggacacgccggcttccagggccaaggaggcttggatggagccgctgcagcccaccgtgcgccagggcgtggcgcagctgaaggacttcatcaccaagctcgtggacatcgaggagaaggacgagctggacctgcagcggacgctgagtttgcaggcgccacctgtgaaggaggggccactcttcatccacaggaccaagggcaagggccccctcatgtcctcctccttcaagaagctctacttctccctcactaccgaggccctcagcttcgcgaagacgcccagctccaagaaaagcgccctcatcaagttagccaacatccgggcagcagaaaaggttgaggaaaagaactttggcagctcgcacgtcatgcaggtcatctacacggacgacgccggcaggccccagactgcctacctgcagtgcaagtgtgtgaatgagcttaaccagtggctgtctgtgctgcggaaggtgagcatcaacaacaccggactgctgggctcctaccaccctggcatcttctgtggggacaagtggagctgctgccaccaaaaagagaagacaggtcagggctgcgataagacccggtcacgggtgaccctgcaggagtggaatgaccctcttgaccatgaccttgaggcccagctcatctaccggcacctgctgggcgtggaggccatgctgtgtccccgaggactcattggcccggctgctccgggtgctgcaggacctccgcgaggcccatagctccagcccggccggctccccaccctcagagcccaactgcctcctggagctgcagacgtgaggcccgccctacgctcccttgctgagtcccctgccaagcgctcggagcccctccaggacactctgcaccccctcaccccggtcctcctcattagggtgcagggcctaggtctcttccaagtgggggaggggggagagtcaggaataaggggatccccagaagtgcagagctgagcaggcttgggcctgtcatggctggcctgaagtgtccccagctccctacagccgctgtagccatcactgcctctccagggaccctcctctcctgcctaggacagacccagccagaaccactgctaggatgggccacacccaggggtctggcctccagggacctagagaatgggagggagaacggggccccaggagacccggccgccaccccacccgctacccttgggtgccacagggctgtgctgttgccaacagtaaacctgctgttactgtccaggctctggggtcttgtgatgagggtctggggagaaagtgggcccggggggaccccggaggctgtcggtggatgtgccgatgatggggctgacagtatgggctctgggcatccctgttcccccctctttcttccccccactcttctggggtcgggggttcctttcccttcccagttgctgtccctgggtcccctctttcatgtcccacaggccacagagcccagtgtgtccaaccagctgttctctcctcaaagcagcccccaagcaagtcccttctctagggtgtccctgaggacagcacagatgcgggactcagagaccccattcctcttcacgcagcccttaccccaagccctctagctgtgtggctggcagtgttggccacgtaggggctcccatccccccaccattgtgtcacataggctgccaggctcagctcccagctgcgtccacagtgacctggatcagggtggggacaaggactggaccctccttctccagaaggccttcagctcttgccttgccatgcagtcacctccttccccctctgaccccagatcccaaaggtgcaccgttgccccagcccctttctggccccatggggtttctctgatgccttcatcatagaggcccggggctggtccgatggttggcaaaacttgactccggcccagtccccactcttggggacttagaacccctggtgtcctgggatctggcctgcctttctttggtcagtccctgtggtcccccaccagctccccctcccatagggctgcccaccaagccctgcccccagcccaagaggagcccccactgcctgcggggcagtgatgtctggccaccggctcacaccaatgacttggtcctggggtggcagaagcagcaggtgacaggagcagggcccctgtccctctcttctggccctgtggtacccaggccacacgttgtgcccgctcttagggctgaccggctgcagggaccaccagccgctgctactgtgggccgccccggggcagggtgggcagggcttttgtgggttatgaggacacagaagtccctgaggcccccagacctggcacagccaacctccttcctcccccggttgcccccaactctaaagcctcctccctcccagtgtccactggctccaggctcctcacaacagcagctcatagacacagggcgtctccaggtgtcccagccctccagatgtttctagctctccagatgggcgctgttttcacgtctgcctgcatccattcattccttcattcctcacctttatcctgttatctctatttttttaagctaccaggaaggaaagggaagaagagatcacgaaactgggacccccagaagggaggagtgggctttgaacttagacatctacctcagagctcaaataggttgtttaaaatcacattcaattttcagatgaaggggaactttatagttttttttgtttgtttgtttttttgagacagagtctcactctgttgcccaggctggagtgcaaatggcttgatcttggttcactgcaacctctgcctcccaggttcaagcaattctcttgcctcagcctcccgagtagctgggactacaggcgtgtgccaccacgcccagctaattcttgtat

SEQ ID NO: 1966 - protein, 282 aa, Homo sapiens
MSPKLFHLRERHADARTSRTLLLLAKAVQNVGNMDTPASRAKEAWMEPLQPTVRQGVAQLKDFITKLVDIEEKDELDLQRTLSLQAPPVKEGPLFIHRTKGKGPLMSSSFKKLYFSLTTEALSFAKTPSSKKSALIKLANIRAAEKVEEKNFGSSHVMQVIYTDDAGRPQTAYLQCKCVNELNQWLSVLRKVSINNTGLLGSYHPGIFCGDKWSCCHQKEKTGQGCDKTRSRVTLQEWNDPLDHDLEAQLIYRHLLGVEAMLCPRGLIGPAAPGAAGPPRGP

SEQ ID NO: 1967 - DNA, 2697 bp, Homo sapiens
actgcactgcagcctgcgcgacagagcgagactccgtctcaaaaaaaaccaaaagttacccagcaacccgagtcatatcctgatgatatccatgctcctcagtcacgcatcccgtggtgcaggggctgaccccaagaggagctgctgcccccagagggtggggagccgaggcagggcctgggtcagacttaccaggctatgctcccagcccagccctcaccagggacccccgagtgcatctctctcctctccaggcctctgtttctccatctgtgcaaccacagtgttggacatggtagtcccaagtggctgcgataagacccggtcacgggtgaccctgcaggagtggaatgaccctcttgaccatgaccttgaggcccagctcatctaccggcacctgctgggcgtggaggccatgctgtgggagaggcaccgggagctgagcgggggtgcagaggcaggcacggtgcccacgagccctggcaaagtccccgaggactcattggcccggctgctccgggtgctgcaggacctccgcgaggcccatagctccagcccggccggctccccaccctcagagcccaactgcctcctggagctgcagacgtgaggcccgccctacgctcccttgctgagtcccctgccaagcgctcggagcccctccaggacactctgcaccccctcaccccggtcctcctcattagggtgcagggcctaggtctcttccaagtgggggaggggggagagtcaggaataaggggatccccagaagtgcagagctgagcaggcttgggcctgtcatggctggcctgaagtgtccccagctccctacagccgctgtagccatcactgcctctccagggaccctcctctcctgcctaggacagacccagccagaaccactgctaggatgggccacacccaggggtctggcctccagggacctagagaatgggagggagaacggggccccaggagacccggccgccaccccacccgctacccttgggtgccacagggctgtgctgttgccaacagtaaacctgctgttactgtccaggctctggggtcttgtgatgagggtctggggagaaagtgggcccggggggaccccggaggctgtcggtggatgtgccgatgatggggctgacagtatgggctctgggcatccctgttcccccctctttcttccccccactcttctggggtcgggggttcctttcccttcccagttgctgtccctgggtcccctctttcatgtcccacaggccacagagcccagtgtgtccaaccagctgttctctcctcaaagcagcccccaagcaagtcccttctctagggtgtccctgaggacagcacagatgcgggactcagagaccccattcctcttcacgcagcccttaccccaagccctctagctgtgtggctggcagtgttggccacgtaggggctcccatccccccaccattgtgtcacataggctgccaggctcagctcccagctgcgtccacagtgacctggatcagggtggggacaaggactggaccctccttctccagaaggccttcagctcttgccttgccatgcagtcacctccttccccctctgaccccagatcccaaaggtgcaccgttgccccagcccctttctggccccatggggtttctctgatgccttcatcatagaggcccggggctggtccgatggttggcaaaacttgactccggcccagtccccactcttggggacttagaacccctggtgtcctgggatctggcctgcctttctttggtcagtccctgtggtcccccaccagctccccctcccatagggctgcccaccaagccctgcccccagcccaagaggagcccccactgcctgcggggcagtgatgtctggccaccggctcacaccaatgacttggtcctggggtggcagaagcagcaggtgacaggagcagggcccctgtccctctcttctggccctgtggtacccaggccacacgttgtgcccgctcttagggctgaccggctgcagggaccaccagccgctgctactgtgggccgccccggggcagggtgggcagggcttttgtgggttatgaggacacagaagtccctgaggcccccagacctggcacagccaacctccttcctcccccggttgcccccaactctaaagcctcctccctcccagtgtccactggctccaggctcctcacaacagcagctcatagacacagggcgtctccaggtgtcccagccctccagatgtttctagctctccagatgggcgctgttttcacgtctgcctgcatccattcattccttcattcctcacctttatcctgttatctctatttttttaagctaccaggaaggaaagggaagaagagatcacgaaactgggacccccagaagggaggagtgggctttgaacttagacatctacctcagagctcaaataggttgtttaaaatcacattcaattttcagatgaaggggaactttatagttttttttgtttgtttgtttttttgagacagagtctcactctgttgcccaggctggagtgcaaatggcttgatcttggttcactgcaacctctgcctcccaggttcaagcaattctcttgcctcagcctcccgagtagctgggactacaggcgtgtgccaccacgcccagctaattcttgtat

SEQ ID NO: 1968 - protein, 105 aa, Homo sapiens
MVVPSGCDKTRSRVTLQEWNDPLDHDLEAQLIYRHLLGVEAMLWERHRELSGGAEAGTVPTSPGKVPEDSLARLLRVLQDLREAHSSSPAGSPPSEPNCLLELQT

SEQ ID NO: 1969 - DNA, 2886 bp, Homo sapiens
taacacagtgaaaccccgtctctactaaaaatataaaaaattagctgggcgtggtggcgggcatctgcagtcccagctactcaggagtctgaaacaggagaatggcgtgaacctgggaggcagagctcgcagtgagccaagatcgtgccactgcactgcagcctgcgcgacagagcgagactccgtctcaaaaaaaaccaaaagttacccagcaacccgagtcatatcctgatgatatccatgctcctcagtcacgcatcccgtggtgcaggggctgaccccaagaggagctgctgcccccagagggtggggagccgaggcagggcctgggtcagacttaccaggctatgctcccagcccagccctcaccagggacccccgagtgcatctctctcctctccaggcctctgtttctccatctgtgcaaccacagtgttggacatggtagtcccaagtgtctgcttgtaactttgccctctctgtgcccccaggtcagggctgcgataagacccggtcacgggtgaccctgcaggagtggaatgaccctcttgaccatgaccttgaggcccagctcatctaccggcacctgctgggcgtggaggccatgctgtgggagaggcaccgggagctgagcgggggtgcagaggcaggcacggtgcccacgagccctggcaaagtccccgaggactcattggcccggctgctccgggtgctgcaggacctccgcgaggcccatagctccagcccggccggctccccaccctcagagcccaactgcctcctggagctgcagacgtgaggcccgccctacgctcccttgctgagtcccctgccaagcgctcggagcccctccaggacactctgcaccccctcaccccggtcctcctcattagggtgcagggcctaggtctcttccaagtgggggaggggggagagtcaggaataaggggatccccagaagtgcagagctgagcaggcttgggcctgtcatggctggcctgaagtgtccccagctccctacagccgctgtagccatcactgcctctccagggaccctcctctcctgcctaggacagacccagccagaaccactgctaggatgggccacacccaggggtctggcctccagggacctagagaatgggagggagaacggggccccaggagacccggccgccaccccacccgctacccttgggtgccacagggctgtgctgttgccaacagtaaacctgctgttactgtccaggctctggggtcttgtgatgagggtctggggagaaagtgggcccggggggaccccggaggctgtcggtggatgtgccgatgatggggctgacagtatgggctctgggcatccctgttcccccctctttcttccccccactcttctggggtcgggggttcctttcccttcccagttgctgtccctgggtcccctctttcatgtcccacaggccacagagcccagtgtgtccaaccagctgttctctcctcaaagcagcccccaagcaagtcccttctctagggtgtccctgaggacagcacagatgcgggactcagagaccccattcctcttcacgcagcccttaccccaagccctctagctgtgtggctggcagtgttggccacgtaggggctcccatccccccaccattgtgtcacataggctgccaggctcagctcccagctgcgtccacagtgacctggatcagggtggggacaaggactggaccctccttctccagaaggccttcagctcttgccttgccatgcagtcacctccttccccctctgaccccagatcccaaaggtgcaccgttgccccagcccctttctggccccatggggtttctctgatgccttcatcatagaggcccggggctggtccgatggttggcaaaacttgactccggcccagtccccactcttggggacttagaacccctggtgtcctgggatctggcctgcctttctttggtcagtccctgtggtcccccaccagctccccctcccatagggctgcccaccaagccctgcccccagcccaagaggagcccccactgcctgcggggcagtgatgtctggccaccggctcacaccaatgacttggtcctggggtggcagaagcagcaggtgacaggagcagggcccctgtccctctcttctggccctgtggtacccaggccacacgttgtgcccgctcttagggctgaccggctgcagggaccaccagccgctgctactgtgggccgccccggggcagggtgggcagggcttttgtgggttatgaggacacagaagtccctgaggcccccagacctggcacagccaacctccttcctcccccggttgcccccaactctaaagcctcctccctcccagtgtccactggctccaggctcctcacaacagcagctcatagacacagggcgtctccaggtgtcccagccctccagatgtttctagctctccagatgggcgctgttttcacgtctgcctgcatccattcattccttcattcctcacctttatcctgttatctctatttttttaagctaccaggaaggaaagggaagaagagatcacgaaactgggacccccagaagggaggagtgggctttgaacttagacatctacctcagagctcaaataggttgtttaaaatcacattcaattttcagatgaaggggaactttatagttttttttgtttgtttgtttttttgagacagagtctcactctgttgcccaggctggagtgcaaatggcttgatcttggttcactgcaacctctgcctcccaggttcaagcaattctcttgcctcagcctcccgagtagctgggactacaggcgtgtgccaccacgcccagctaattcttgtat

SEQ ID NO: 1970 - protein, 64 aa, Homo sapiens; identical to SEQ ID NO: 1954

SEQ ID NO: 1971 - DNA, 3677 bp, Homo sapiens
ccgcgtgccccgccgtggtgcgcgccaccttccgccagctcttccggcgcgtgcgcgagcgcttccccggcgcccagcacgaggtgcgccctccacccgctgggctaggctgggccgggttggactgggctggggcgaggggcgggcgaagagcggtggggaaccagggagcgctggggaggaccagggaggctgtgtcccggcgagggtcagggacggagcctaaggggagggggctgccaggagccctggtctgggggactccagcccgcgctcttccgcacccctccagaatgtaccgttcatcgccgtcaccagcttcctgtgcctgcgcttcttctctcccgccatcatgtcgcccaagctcttccacctgcgggagcgccacgcggacgcccgcaccagccgcaccctgctcctgttggccaaggtgcgggccttgcggccacgggcgggatgcacagctgggtgtcctaccggggccctggcctggactgcagagtgttccctaccggctccggcgaggccactggcacgcccacgtaggcactgcacttcacagtttgcaaagccttcctgtggccaccttgtccgagttccatctcatggataagggaacaggcctgcgaggggtcgggggttgccaaggccgcccatcctgtcggtggtgaatcgcgggaccttccaacccaggcagtccagaacgtgggcaacatggacacgccggcttccagggccaaggaggcttggatggagccgctgcagcccaccgtgcgccagggcgtggcgcagctgaaggacttcatcaccaagctcgtggacatcgaggagaaggacgagctggacctgcagcggacgctgagtttgcaggcgccacctgtgaaggaggggccactcttcatccacaggaccaagggcaagggccccctcatgtcctcctccttcaagaagctctacttctccctcactaccgaggccctcagcttcgcgaagacgcccagctccaagaaaagcgccctcatcaagttagccaacatccgggcagcagaaaaggttgaggaaaagaactttggcagctcgcacgtcatgcaggtcatctacacggacgacgccggcaggccccagactgcctacctgcagtgcaagtgtgtgaatgagcttaaccagtggctgtctgtgctgcggaaggtgagcatcaacaacaccggactgctgggctcctaccaccctggcatcttctgtggggacaagtggagctgctgccaccaaaaagagaagacaggtcagggctgcgataagacccggtcacgggtgaccctgcaggagtggaatgaccctcttgaccatgaccttgaggcccagctcatctaccggcacctgctgggcgtggaggccatgctgtgggagaggcaccgggagctgagcgggggtgcagaggcaggcacggtgcccacgagccctggcaaagtccccgaggactcattggcccggctgctccgggtgctgcaggacctccgcgaggcccatagctccagcccggccggctccccaccctcagagcccaactgcctcctggagctgcagacgtgaggcccgccctacgctcccttgctgagtcccctgccaagcgctcggagcccctccaggacactctgcaccccctcaccccggtcctcctcattagggtgcagggcctaggtctcttccaagtgggggaggggggagagtcaggaataaggggatccccagaagtgcagagctgagcaggcttgggcctgtcatggctggcctgaagtgtccccagctccctacagccgctgtagccatcactgcctctccagggaccctcctctcctgcctaggacagacccagccagaaccactgctaggatgggccacacccaggggtctggcctccagggacctagagaatgggagggagaacggggccccaggagacccggccgccaccccacccgctacccttgggtgccacagggctgtgctgttgccaacagtaaacctgctgttactgtccaggctctggggtcttgtgatgagggtctggggagaaagtgggcccggggggaccccggaggctgtcggtggatgtgccgatgatggggctgacagtatgggctctgggcatccctgttcccccctctttcttccccccactcttctggggtcgggggttcctttcccttcccagttgctgtccctgggtcccctctttcatgtcccacaggccacagagcccagtgtgtccaaccagctgttctctcctcaaagcagcccccaagcaagtcccttctctagggtgtccctgaggacagcacagatgcgggactcagagaccccattcctcttcacgcagcccttaccccaagccctctagctgtgtggctggcagtgttggccacgtaggggctcccatccccccaccattgtgtcacataggctgccaggctcagctcccagctgcgtccacagtgacctggatcagggtggggacaaggactggaccctccttctccagaaggccttcagctcttgccttgccatgcagtcacctccttccccctctgaccccagatcccaaaggtgcaccgttgccccagcccctttctggccccatggggtttctctgatgccttcatcatagaggcccggggctggtccgatggttggcaaaacttgactccggcccagtccccactcttggggacttagaacccctggtgtcctgggatctggcctgcctttctttggtcagtccctgtggtcccccaccagctccccctcccatagggctgcccaccaagccctgcccccagcccaagaggagcccccactgcctgcggggcagtgatgtctggccaccggctcacaccaatgacttggtcctggggtggcagaagcagcaggtgacaggagcagggcccctgtccctctcttctggccctgtggtacccaggccacacgttgtgcccgctcttagggctgaccggctgcagggaccaccagccgctgctactgtgggccgccccggggcagggtgggcagggcttttgtgggttatgaggacacagaagtccctgaggcccccagacctggcacagccaacctccttcctcccccggttgcccccaactctaaagcctcctccctcccagtgtccactggctccaggctcctcacaacagcagctcatagacacagggcgtctccaggtgtcccagccctccagatgtttctagctctccagatgggcgctgttttcacgtctgcctgcatccattcattccttcattcctcacctttatcctgttatctctatttttttaagctaccaggaaggaaagggaagaagagatcacgaaactgggacccccagaagggaggagtgggctttgaacttagacatctacctcagagctcaaataggttgtttaaaatcacattcaattttcagatgaaggggaactttatagttttttttgtttgtttgtttttttgagacagagtctcactctgttgcccaggctggagtgcaaatggcttgatcttggttcactgcaacctctgcctcccaggttcaagcaattctcttgcctcagcctcccgagtagctgggactacaggcgtgtgccaccacgcccagctaattcttgtat

SEQ ID NO: 1972 - protein, 291 aa, Homo sapiens
MDTPASRAKEAWMEPLQPTVRQGVAQLKDFITKLVDIEEKDELDLQRTLSLQAPPVKEGPLFIHRTKGKGPLMSSSFKKLYFSLTTEALSFAKTPSSKKSALIKLANIRAAEKVEEKNFGSSHVMQVIYTDDAGRPQTAYLQCKCVNELNQWLSVLRKVSINNTGLLGSYHPGIFCGDKWSCCHQKEKTGQGCDKTRSRVTLQEWNDPLDHDLEAQLIYRHLLGVEAMLWERHRELSGGAEAGTVPTSPGKVPEDSLARLLRVLQDLREAHSSSPAGSPPSEPNCLLELQT

SEQ ID NO: 1973 - DNA, 3360 bp, Homo sapiens
gcgagcgcttccccggcgcccagcacgaggtgcgccctccacccgctgggctaggctgggccgggttggactgggctggggcgaggggcgggcgaagagcggtggggaaccagggagcgctggggaggaccagggaggctgtgtcccggcgagggtcagggacggagcctaaggggagggggctgccaggagccctggtctgggggactccagcccgcgctcttccgcacccctccagaatgtaccgttcatcgccgtcaccagcttcctgtgcctgcgcttcttctctcccgccatcatgtcgcccaagctcttccacctgcgggagcgccacgcggacgcccgcaccagccgcaccctgctcctgttggccaaggcagtccagaacgtgggcaacatggacacgccggcttccagggccaaggaggcttggatggagccgctgcagcccaccgtgcgccagggcgtggcgcagctgaaggacttcatcaccaagctcgtggacatcgaggagaaggacgagctggacctgcagcggacgctgagtttgcaggcgccacctgtgaaggaggggccactcttcatccacaggaccaagggcaagggccccctcatgtcctcctccttcaagaagctctacttctccctcactaccgaggccctcagcttcgcgaagacgcccagctccaagaaaagcgccctcatcaagttagccaacatccgggcagcagaaaaggttgaggaaaagaactttggcagctcgcacgtcatgcaggtcatctacacggacgacgccggcaggccccagactgcctacctgcagtgcaagtgtgtgaatgagcttaaccagtggctgtctgtgctgcggaaggtgagcatcaacaacaccggactgctgggctcctaccaccctggcatcttctgtggggacaagtggagctgctgccaccaaaaagagaagacaggtcagggctgcgataagacccggtcacgggtgaccctgcaggagtggaatgaccctcttgaccatgaccttgaggcccagctcatctaccggcacctgctgggcgtggaggccatgctgtgggagaggcaccgggagctgagcgggggtgcagaggcaggcacggtgcccacgagccctggcaaagtccccgaggactcattggcccggctgctccgggtgctgcaggacctccgcgaggcccatagctccagcccggccggctccccaccctcagagcccaactgcctcctggagctgcagacgtgaggcccgccctacgctcccttgctgagtcccctgccaagcgctcggagcccctccaggacactctgcaccccctcaccccggtcctcctcattagggtgcagggcctaggtctcttccaagtgggggaggggggagagtcaggaataaggggatccccagaagtgcagagctgagcaggcttgggcctgtcatggctggcctgaagtgtccccagctccctacagccgctgtagccatcactgcctctccagggaccctcctctcctgcctaggacagacccagccagaaccactgctaggatgggccacacccaggggtctggcctccagggacctagagaatgggagggagaacggggccccaggagacccggccgccaccccacccgctacccttgggtgccacagggctgtgctgttgccaacagtaaacctgctgttactgtccaggctctggggtcttgtgatgagggtctggggagaaagtgggcccggggggaccccggaggctgtcggtggatgtgccgatgatggggctgacagtatgggctctgggcatccctgttcccccctctttcttccccccactcttctggggtcgggggttcctttcccttcccagttgctgtccctgggtcccctctttcatgtcccacaggccacagagcccagtgtgtccaaccagctgttctctcctcaaagcagcccccaagcaagtcccttctctagggtgtccctgaggacagcacagatgcgggactcagagaccccattcctcttcacgcagcccttaccccaagccctctagctgtgtggctggcagtgttggccacgtaggggctcccatccccccaccattgtgtcacataggctgccaggctcagctcccagctgcgtccacagtgacctggatcagggtggggacaaggactggaccctccttctccagaaggccttcagctcttgccttgccatgcagtcacctccttccccctctgaccccagatcccaaaggtgcaccgttgccccagcccctttctggccccatggggtttctctgatgccttcatcatagaggcccggggctggtccgatggttggcaaaacttgactccggcccagtccccactcttggggacttagaacccctggtgtcctgggatctggcctgcctttctttggtcagtccctgtggtcccccaccagctccccctcccatagggctgcccaccaagccctgcccccagcccaagaggagcccccactgcctgcggggcagtgatgtctggccaccggctcacaccaatgacttggtcctggggtggcagaagcagcaggtgacaggagcagggcccctgtccctctcttctggccctgtggtacccaggccacacgttgtgcccgctcttagggctgaccggctgcagggaccaccagccgctgctactgtgggccgccccggggcagggtgggcagggcttttgtgggttatgaggacacagaagtccctgaggcccccagacctggcacagccaacctccttcctcccccggttgcccccaactctaaagcctcctccctcccagtgtccactggctccaggctcctcacaacagcagctcatagacacagggcgtctccaggtgtcccagccctccagatgtttctagctctccagatgggcgctgttttcacgtctgcctgcatccattcattccttcattcctcacctttatcctgttatctctatttttttaagctaccaggaaggaaagggaagaagagatcacgaaactgggacccccagaagggaggagtgggctttgaacttagacatctacctcagagctcaaataggttgtttaaaatcacattcaattttcagatgaaggggaactttatagttttttttgtttgtttgtttttttgagacagagtctcactctgttgcccaggctggagtgcaaatggcttgatcttggttcactgcaacctctgcctcccaggttcaagcaattctcttgcctcagcctcccgagtagctgggactacaggcgtgtgccaccacgcccagctaattcttgtat

SEQ ID NO: 1974 - protein, 324 aa, Homo sapiens
MSPKLFHLRERHADARTSRTLLLLAKAVQNVGNMDTPASRAKEAWMEPLQPTVRQGVAQLKDFITKLVDIEEKDELDLQRTLSLQAPPVKEGPLFIHRTKGKGPLMSSSFKKLYFSLTTEALSFAKTPSSKKSALIKLANIRAAEKVEEKNFGSSHVMQVIYTDDAGRPQTAYLQCKCVNELNQWLSVLRKVSINNTGLLGSYHPGIFCGDKWSCCHQKEKTGQGCDKTRSRVTLQEWNDPLDHDLEAQLIYRHLLGVEAMLWERHRELSGGAEAGTVPTSPGKVPEDSLARLLRVLQDLREAHSSSPAGSPPSEPNCLLELQT

SEQ ID NO: 1975 - DNA, 2144 bp, Homo sapiens
acagcagcggcgcggagactgcggggcgggccatggcggcgaacctgagccggaacgggccagcgctgcaagaggcctacgtgcgggtggtcaccgagaagtccccgaccgactgggctctctttacctatgaaggcaacagcaatgacatccgcgtggctggcacaggggagggtggcctggaggagatggtggaggagctcaacagcgggaaggtgatgtacgccttctgcagagtgaaggaccccaactctggactgcccaaatttgtcctcatcaactggacaggcgagggcgtgaacgatgtgcggaagggagcctgtgccagccacgtcagcaccatggccagcttcctgaagggggcccatgtgaccatcaacgcacgggccgaggaggatgtggagcctgagtgcatcatggagaaggtggccaaggcttcaggtgccaactacagctttcacaaggagagtggccgcttccaggacgtgggaccccaggccccagtgggctctgtgtaccagaagaccaatgccgtgtctgagattaaaagggttggtaaagacagcttctgggccaaagcagagaaggaggaggagaaccgtcggctggaggaaaagcggcgggccgaggaggcacagcggcagctggagcaggagcgccgggagcgtgagctgcgtgaggctgcacgccgggagcagcgctatcaggagcagggtggcgaggccagcccccagaggacgtgggagcagcagcaagaagtggtttcaaggaaccgaaatgagcaggagtctgccgtgcacccgagggagattttcaagcagaaggagagggccatgtccaccacctccatctccagtcctcagcctggcaagctgaggagccccttcctgcagaagcagctcacccaaccagagacccactttggcagagagccagctgctgccatctcaaggcccagggcagatctccctgctgaggagccggcgcccagcactcctccatgtctggtgcaggcagaagaggaggctgtgtatgaggaacctccagagcaggagaccttctacgagcagcccccactggtgcagcagcaaggtgctggctctgagcacattgaccaccacattcagggccaggggctcagtgggcaagggctctgtgcccgtgccctgtacgactaccaggcagccgacgacacagagatctcctttgaccccgagaacctcatcacgggcatcgaggtgatcgacgaaggctggtggcgtggctatgggccggatggccattttggcatgttccctgccaactacgtggagctcattgagtgaggctgagggcacatcttgcccttcccctctcagacatggcttccttattgctggaagaggaggcctgggagttgacattcagcactcttccaggaataggacccccagtgaggatgaggcctcagggctccctccggcttggcagactcagcctgtcaccccaaatgcagcaatggcctggtgattcccacacatccttcctgcatcccccgaccctcccagacagcttggctcttgcccctgacaggatactgagccaagccctgcctgtggccaagccctgagtggccactgccaagctgcggggaagggtcctgagcaggggcatctgggaggctctggctgccttctgcatttatttgccttttttctttttctcttgcttctaaggggtggtggccaccactgtttagaatgacccttgggaacagtgaacgtagagaattgtttttagcagagtttgtgaccaaagtcagagtggatcatggtggtttggcagcagggaatttgtcttgttggagcctgctctgtgctccccactccatttctctgtccctctgcctgggctatgggaagtggggatgcagatggccaagctcccaccctgggtattcaaaaacggcagacacaacatgttcctccacgcggctcactcgatgcctgcaggccccagtgtgtgcctcaactgattctgacttcaggaaaagtaacacagagtggccttggcctgttgtcttcccctattttctgtcccagctcatccgtgtctctgaagaacaaatatgcttttggaccacgaaaaaaaaaaaaaaaaaaaaa

SEQ ID NO: 1976 - protein, 430 aa, Homo sapiens
MAANLSRNGPALQEAYVRVVTEKSPTDWALFTYEGNSNDIRVAGTGEGGLEEMVEELNSGKVMYAFCRVKDPNSGLPKFVLINWTGEGVNDVRKGACASHVSTMASFLKGAHVTINARAEEDVEPECIMEKVAKASGANYSFHKESGRFQDVGPQAPVGSVYQKTNAVSEIKRVGKDSFWAKAEKEEENRRLEEKRRAEEAQRQLEQERRERELREAARREQRYQEQGGEASPQRTWEQQQEVVSRNRNEQESAVHPREIFKQKERAMSTTSISSPQPGKLRSPFLQKQLTQPETHFGREPAAAISRPRADLPAEEPAPSTPPCLVQAEEEAVYEEPPEQETFYEQPPLVQQQGAGSEHIDHHIQGQGLSGQGLCARALYDYQAADDTEISFDPENLITGIEVIDEGWWRGYGPDGHFGMFPANYVELIE

SEQ ID NO: 1977 - DNA, 2147 bp, Homo sapiens
acagcagcggcgcggagactgcggggcgggccatggcggcgaacctgagccggaacgggccagcgctgcaagaggcctacgtgcgggtggtcaccgagaagtccccgaccgactgggctctctttacctatgaaggcaacagcaatgacatccgcgtggctggcacaggggagggtggcctggaggagatggtggaggagctcaacagcgggaaggtgatgtacgccttctgcagagtgaaggaccccaactctggactgcccaaatttgtcctcatcaactggacaggcgagggcgtgaacgatgtgcggaagggagcctgtgccagccacgtcagcaccatggccagcttcctgaagggggcccatgtgaccatcaacgcacgggccgaggaggatgtggagcctgagtgcatcatggagaaggtggccaaggcttcaggtgccaactacagctttcacaaggagagtggccgcttccaggacgtgggaccccaggccccagtgggctctgtgtaccagaagaccaatgccgtgtctgagattaaaagggttggtaaagacagcttctgggccaaagcagagaaggaggaggagaaccgtcggctggaggaaaagcggcgggccgaggaggcacagcggcagctggagcaggagcgccgggagcgtgagctgcgtgaggctgcacgccgggagcagcgctatcaggagcagggtggcgaggccagcccccagagcaggacgtgggagcagcagcaagaagtggtttcaaggaaccgaaatgagcaggagtctgccgtgcacccgagggagattttcaagcagaaggagagggccatgtccaccacctccatctccagtcctcagcctggcaagctgaggagccccttcctgcagaagcagctcacccaaccagagacccactttggcagagagccagctgctgccatctcaaggcccagggcagatctccctgctgaggagccggcgcccagcactcctccatgtctggtgcaggcagaagaggaggctgtgtatgaggaacctccagagcaggagaccttctacgagcagcccccactggtgcagcagcaaggtgctggctctgagcacattgaccaccacattcagggccaggggctcagtgggcaagggctctgtgcccgtgccctgtacgactaccaggcagccgacgacacagagatctcctttgaccccgagaacctcatcacgggcatcgaggtgatcgacgaaggctggtggcgtggctatgggccggatggccattttggcatgttccctgccaactacgtggagctcattgagtgaggctgagggcacatcttgcccttcccctctcagacatggcttccttattgctggaagaggaggcctgggagttgacattcagcactcttccaggaataggacccccagtgaggatgaggcctcagggctccctccggcttggcagactcagcctgtcaccccaaatgcagcaatggcctggtgattcccacacatccttcctgcatcccccgaccctcccagacagcttggctcttgcccctgacaggatactgagccaagccctgcctgtggccaagccctgagtggccactgccaagctgcggggaagggtcctgagcaggggcatctgggaggctctggctgccttctgcatttatttgccttttttctttttctcttgcttctaaggggtggtggccaccactgtttagaatgacccttgggaacagtgaacgtagagaattgtttttagcagagtttgtgaccaaagtcagagtggatcatggtggtttggcagcagggaatttgtcttgttggagcctgctctgtgctccccactccatttctctgtccctctgcctgggctatgggaagtggggatgcagatggccaagctcccaccctgggtattcaaaaacggcagacacaacatgttcctccacgcggctcactcgatgcctgcaggccccagtgtgtgcctcaactgattctgacttcaggaaaagtaacacagagtggccttggcctgttgtcttcccctattttctgtcccagctcatccgtgtctctgaagaacaaatatgcttttggaccacgaaaaaaaaaaaaaaaaaaaaa

SEQ ID NO: 1978 - protein, 431 aa, Homo sapiens
MAANLSRNGPALQEAYVRVVTEKSPTDWALFTYEGNSNDIRVAGTGEGGLEEMVEELNSGKVMYAFCRVKDPNSGLPKFVLINWTGEGVNDVRKGACASHVSTMASFLKGAHVTINARAEEDVEPECIMEKVAKASGANYSFHKESGRFQDVGPQAPVGSVYQKTNAVSEIKRVGKDSFWAKAEKEEENRRLEEKRRAEEAQRQLEQERRERELREAARREQRYQEQGGEASPQSRTWEQQQEVVSRNRNEQESAVHPREIFKQKERAMSTTSISSPQPGKLRSPFLQKQLTQPETHFGREPAAAISRPRADLPAEEPAPSTPPCLVQAEEEAVYEEPPEQETFYEQPPLVQQQGAGSEHIDHHIQGQGLSGQGLCARALYDYQAADDTEISFDPENLITGIEVIDEGWWRGYGPDGHFGMFPANYVELIE

SEQ ID NO: 1979 - DNA, 845 bp, Homo sapiens
cccgtccagagtcctctgtggtccctgctgccaccatggccactcaccgcctcgtgatggtccggcacggcgagagcacatggaaccaggagaaccgtttctgtggctggttcgatgcagagctgagtgaaaaggggaccgaggaggccaagcggggagccaaggccatcaaggatgccaagatggagtttgacatctgctacacgtcagtgctgaagcgggccatccgcaccctctgggccatcctggacggcacggaccagatgtggctgcctgtggtgcgcacttggcgcctcaatgagcggcattacgggggcctcacaggcctcaacaaggcagaaacggccgccaagcacggggaggagcaggtgaagatctggaggcgctccttcgacatcccgccgcccccgatggacgagaagcacccctactacaactccattagcaaggagcgtcggtacgcaggcctgaagcccggggaactccccacctgcgagagcctcaaggacaccattgcccgggccctgcccttctggaacgaggagattgttccccagatcaaggccggcaagcgagtgctcattgcagcccacgggaacagcctgcggggcattgtcaagcacctggaagggatgtcagaccaggcgatcatggagctgaacctgcccacggggatccccattgtgtatgagctgaacaaggagctgaagcccaccaagcccatgcagttcctgggtgatgaggaaacggtgcggaaggccatggaggctgtggctgcccagggcaaggccaagtgaggggtgggcttgggcaataaaggcacctcccccaacaaaaaaaaaaaa

SEQ ID NO: 1980 - protein, 253 aa, Homo sapiens
MATHRLVMVRHGESTWNQENRFCGWFDAELSEKGTEEAKRGAKAIKDAKMEFDICYTSVLKRAIRTLWAILDGTDQMWLPVVRTWRLNERHYGGLTGLNKAETAAKHGEEQVKIWRRSFDIPPPPMDEKHPYYNSISKERRYAGLKPGELPTCESLKDTIARALPFWNEEIVPQIKAGKRVLIAAHGNSLRGIVKHLEGMSDQAIMELNLPTGIPIVYELNKELKPTKPMQFLGDEETVRKAMEAVAAQGKAK

SEQ ID NO: 1981 - DNA, 2589 bp, Homo sapiens
gtttccctctgcgttcgctccgcgctgctggaggctgtcgtcccaatgctccccaaacggcggcgagcgcgggtcgggtcccctagcggcgatgccgcttcctccacgccgccctcgacgcgcttcccgggagtcgccatctacctggtcgagcctcgcatgggtcgcagccgccgggccttcctcacaggcctggcgcgctccaaaggcttccgcgtccttgacgcctgcagctccgaagcgacacatgttgtgatggaagagacctcagcagaggaggccgtcagctggcaggagcgcaggatggcagctgctcccccgggttgcacccccccagctctgctggacataagctggttaacagagagcctgggagctgggcagcctgtacctgtggagtgccggcaccgcctggaggtggctgggccaaggaaggggcctctgagcccagcatggatgcctgcctatgcctgccagcgccctacgcccctcacacaccacaacactggcctctccgaggctctggagatactggccgaggcagcaggctttgaaggcagtgagggccgcctcctcaccttctgcagagcagcctcggtgctcaaggcccttcccagccctgtcacaaccctgagccagctgcaggggcttccccactttggagaacactcctctagggttgtccaggagctgctggagcatggagtgtgtgaggaggtggagagagttcggcgctcagagaggtaccagaccatgaagctcttcacccagatcttcggggtcggtgtgaagactgctgaccggtggtaccgggaaggactgcgaaccttagatgacctccgagagcagccccagaaactaacccaacagcagaaagcggggctccagcaccaccaggacctgagcaccccagtcctgcggtccgatgtagatgccctgcagcaggtggtggaggaagctgtggggcaggccctgcctggggccaccgtcacgctgaccggcggcttccgcagggggaagttgcagggccatgacgtggacttcctcatcacccaccccaaggagggtcaggaggcggggctgctgcctagagtgatgtgccgcctgcaggaccagggcctcatcctgtaccaccagcaccagcacagctgctgtgagtcccctacccgcctggcccaacagagccacatggacgcttttgagagaagtttctgcattttccgcctaccacaacctccaggggctgctgtggggggatccacgaggccctgcccatcctggaaggccgtgagagtggacttggtagttgcacccgtcagccagttccctttcgccctgctcggttggactggctccaagcttttccagcgggagctgcgccgcttcagccggaaggagaagggcctgtggctgaacagccatgggctgtttgacccggagcagaagacatttttccaagcggcttcagaggaagacatcttcagacacctgggccttgagtaccttcctccagagcagagaaacgcctgaacctgcctgtgtcccccacttccactcaggaaattgggctgcccccaaactggccactgaatgtctccaagcaaatatgctgccccctgaccccaccttcaaccctccccgccaaggcctggctcttccggaggtcaattgtgcctgcaggatcagttgagcccctgctggtgtgctgcagggtgtgatgaggtgggagccctcagtgccagcctcatcactgtgtgaccctgggtctgctcttagcctccccatggctcacgttcctgccctggatgggatgtgagtggggcccacatcgtggagctgtggtggggcctgcagtcatgaatggcaagtggtccctgatgtgcagtgtctcattagttgcactgcagttaactgtggctcctgcagggcaccctgcccagaatgcccagaagagaaccatgcatacctgcactgcatttgagagccatgagctggaggctgtggttcgtgccagcaaggagcctactgtctggtgtgctgtaggcatctggagagggagagggcctgggtaggagctgggaggaagataattttcaactatggggcttcagtactgcagcgccccgaagccaggctctgtgcttctgcctttaaggcctgttctcagcacaatgtctcaaaaataggtcatatcctgccactcccgtcgcagagccctttaatggttccaaaccctaagtccacacatagcccctggctctggcatctctccagccccactggccccgagctgcttgactcaccggcttcctatttgatgcacccaggcccccttgtggccaactccctccccttctcactgaggcagaagcactgaggtgggctggacatgggtgccctccacgtccctcatatccccaggcacactctggcctcaggttttgccctggccatgtcatctacctggagtgggccctccccttcttcaggccttgaatcaaaagccactttgttaggcgaggatttcccagaccactcatcacattaaaaaatattttgaaaacatgcagtaaaaaaaaaaaaaaaaaa

SEQ ID NO: 1982 - protein, 494 aa, Homo sapiens
MLPKRRRARVGSPSGDAASSTPPSTRFPGVAIYLVEPRMGRSRRAFLTGLARSKGFRVLDACSSEATHVVMEETSAEEAVSWQERRMAAAPPGCTPPALLDISWLTESLGAGQPVPVECRHRLEVAGPRKGPLSPAWMPAYACQRPTPLTHHNTGLSEALEILAEAAGFEGSEGRLLTFCRAASVLKALPSPVTTLSQLQGLPHFGEHSSRVVQELLEHGVCEEVERVRRSERYQTMKLFTQIFGVGVKTADRWYREGLRTLDDLREQPQKLTQQQKAGLQHHQDLSTPVLRSDVDALQQVVEEAVGQALPGATVTLTGGFRRGKLQGHDVDFLITHPKEGQEAGLLPRVMCRLQDQGLILYHQHQHSCCESPTRLAQQSHMDAFERSFCIFRLPQPPGAAVGGSTRPCPSWKAVRVDLVVAPVSQFPFALLGWTGSKLFQRELRRFSRKEKGLWLNSHGLFDPEQKTFFQAASEEDIFRHLGLEYLPPEQRNA

SEQ ID NO: 1983 - DNA, 4125 bp, Homo sapiens
cggctatccgcgcgggagtgcgccacgcggggccggagcgcctattagccgccaggacctcggagcgccccgaccacccctgagcccctctggcttcggagccccccagcaccccttcccgggtcccctcgcccaccctaatccactctccctccctttcccggattccctcgctcaccccatcctctctcccgccccttcctggattccctcacccgtctcgatcccctctccgccctttcccagagacccagagcccctgaccccccgcgccctccccggagccccccgcgcgtgccgcggccatggcggccgtgcgcggggcgcccctgctcagctgcctcctggcgttgctggccctgtgccctggagggcgcccgcagacggtgctgaccgacgacgagatcgaggagttcctcgagggcttcctgtcagagctagaacctgagccccgggaggacgacgtggaggccccgccgcctcccgagcccaccccgcgggtccgaaaagcccaggcggggggcaagccagggaagcggccagggacggccgcagaagtgcctccggaaaagaccaaagacaaagggaagaaaggcaagaaagacaaaggccccaaggtgcccaaggagtccttggaggggtcccccaggccgcccaagaaggggaaggagaagccacccaaggccaccaagaagcccaaggagaagccacctaaggccaccaagaagcccaaggagaagccacccaaggccaccaagaagcccaaagagaagccacccaaggccaccaagaagcccccgtcagggaagaggccccccattctggctccctcagaaaccctggagtggccactgcccccaccccccagccctggccccgaggagctaccccaggagggaggggcgcccctctcaaataactggcagaatccaggagaggagacccatgtggaggcacgggagcaccagcctgagccggaggaggagaccgagcaacccacactggactacaatgaccagatcgagagggaggactatgaggactttgagtacattcggcgccagaagcaacccaggccacccccaagcagaaggaggaggcccgagcgggtctggccagagccccctgaggagaaggccccggccccagccccggaggagaggattgagcctcctgtgaagcctctgctgcccccgctgccccctgactatggtgatggttacgtgatccccaactacgatgacatggactattactttgggcctcctccgccccagaagcccgatgctgagcgccagacggacgaagagaaggaggagctgaagaaacccaaaaaggaggacagcagccccaaggaggagaccgacaagtgggcagtggagaagggcaaggaccacaaagagccccgaaagggcgaggagttggaggaggagtggacgcctacggagaaagtcaagtgtccccccattgggatggagtcacaccgtattgaggacaaccagatccgagcctcctccatgctgcgccacggcctgggggcacagcgcggccggctcaacatgcagaccggtgccactgaggacgactactatgatggtgcgtggtgtgccgaggacgatgccaggacccagtggatagaggtggacaccaggaggactacccggttcacaggcgtcatcacccagggcagagactccagcatccatgacgattttgtgaccaccttcttcgtgggcttcagcaatgacagccagacatgggtgatgtacaccaacggctatgaggaaatgacctttcatgggaacgtggacaaggacacacccgtgctgagtgagctcccagagccggtggtggctcgtttcatccgcatctacccactcacctggaatggcagcctgtgcatgcgcctggaggtgctggggtgctctgtggcccctgtctacagctactacgcacagaatgaggtggtggccaccgatgacctggatttccggcaccacagctacaaggacatgcgccagctcatgaaggtggtgaacgaggagtgccccaccatcacccgcacttacagcctgggcaagagctcacgaggcctcaagatctatgccatggagatctcagacaaccctggggagcatgaactgggggagcccgagttccgctacactgctgggatccatggcaacgaggtgctgggccgagagctgttgctgctgctcatgcagtacctgtgccgagagtaccgcgatgggaacccacgtgtgcgcagcctggtgcaggacacacgcatccacctggtgccctcactgaaccctgatggctacgaggtggcagcgcagatgggctcagagtttgggaactgggcgctgggactgtggactgaggagggctttgacatctttgaagatttcccggatctcaactctgtgctctggggagctgaggagaggaaatgggtcccctaccgggtccccaacaataacttgcccatccctgaacgctacctttcgccagatgccacggtatccacggaggtccgggccatcattgcctggatggagaagaaccccttcgtgctgggagcaaatctgaacggcggcgagcggctagtatcctacccctacgatatggcccgcacgcctacccaggagcagctgctggccgcagccatggcagcagcccggggggaggatgaggacgaggtctccgaggcccaggagactccagaccacgccatcttccggtggcttgccatctccttcgcctccgcacacctcaccttgaccgagccctaccgcggaggctgccaagcccaggactacaccggcggcatgggcatcgtcaacggggccaagtggaacccccggaccgggactatcaatgacttcagttacctgcataccaactgcctggagctctccttctacctgggctgtgacaagttccctcatgagagtgagctgccccgcgagtgggagaacaacaaggaggcgctgctcaccttcatggagcaggtgcaccgcggcattaagggggtggtgacggacgagcaaggcatccccattgccaacgccaccatctctgtgagtggcattaatcacggcgtgaagacagccagtggtggtgattactggcgaatcttgaacccgggtgagtaccgcgtgacagcccacgcggagggctacaccccgagcgccaagacctgcaatgttgactatgacatcggggccactcagtgcaacttcatcctggctcgctccaactggaagcgcatccgggagatcatggccatgaacgggaaccggcctatcccacacatagacccatcgcgccctatgaccccccaacagcgacgcctgcagcagcgacgcctacaacaccgcctgcggcttcgggcacagatgcggctgcggcgcctcaacgccaccaccaccctaggcccccacactgtgcctcccacgctgccccctgcccctgccaccaccctgagcactaccatagagccctggggcctcataccgccaaccaccgctggctgggaggagtcggagactgagacctacacagaggtggtgacagagtttgggaccgaggtggagcccgagtttgggaccaaggtggagcccgagtttgagacccagttggagcctgagtttgagacccagctggaacccgagtttgaggaagaggaggaggaggagaaagaggaggagatagccactggccaggcattccccttcacaacagtagagacctacacagtgaactttggggacttctgagatcagcgtcctaccaagaccccagcccaactcaagctacagcagcagcacttcccaagcctgctgaccacagtcacatcacccatcagcacatggaaggcccctggtatggacactgaaaggaagggctggtcctgcccctttgagggggtgcaaacatgactgggacctaagagccagaggctgtgtagaggctcctgctccacctgccagtctcgtaagagatggggttgctgcagtgttggagtaggggcagagggagggagccaaggtcactccaataaaacaagctcatggcaaaaaaaaaaaaaaaaaaaaaaaaaaaaaaaaaaaaaaaaaaaaa

SEQ ID NO: 1984 - protein, 1158 aa, Homo sapiens
MAAVRGAPLLSCLLALLALCPGGRPQTVLTDDEIEEFLEGFLSELEPEPREDDVEAPPPPEPTPRVRKAQAGGKPGKRPGTAAEVPPEKTKDKGKKGKKDKGPKVPKESLEGSPRPPKKGKEKPPKATKKPKEKPPKATKKPKEKPPKATKKPKEKPPKATKKPPSGKRPPILAPSETLEWPLPPPPSPGPEELPQEGGAPLSNNWQNPGEETHVEAREHQPEPEEETEQPTLDYNDQIEREDYEDFEYIRRQKQPRPPPSRRRRPERVWPEPPEEKAPAPAPEERIEPPVKPLLPPLPPDYGDGYVIPNYDDMDYYFGPPPPQKPDAERQTDEEKEELKKPKKEDSSPKEETDKWAVEKGKDHKEPRKGEELEEEWTPTEKVKCPPIGMESHRIEDNQIRASSMLRHGLGAQRGRLNMQTGATEDDYYDGAWCAEDDARTQWIEVDTRRTTRFTGVITQGRDSSIHDDFVTTFFVGFSNDSQTWVMYTNGYEEMTFHGNVDKDTPVLSELPEPVVARFIRIYPLTWNGSLCMRLEVLGCSVAPVYSYYAQNEVVATDDLDFRHHSYKDMRQLMKVVNEECPTITRTYSLGKSSRGLKIYAMEISDNPGEHELGEPEFRYTAGIHGNEVLGRELLLLLMQYLCREYRDGNPRVRSLVQDTRIHLVPSLNPDGYEVAAQMGSEFGNWALGLWTEEGFDIFEDFPDLNSVLWGAEERKWVPYRVPNNNLPIPERYLSPDATVSTEVRAIIAWMEKNPFVLGANLNGGERLVSYPYDMARTPTQEQLLAAAMAAARGEDEDEVSEAQETPDHAIFRWLAISFASAHLTLTEPYRGGCQAQDYTGGMGIVNGAKWNPRTGTINDFSYLHTNCLELSFYLGCDKFPHESELPREWENNKEALLTFMEQVHRGIKGVVTDEQGIPIANATISVSGINHGVKTASGGDYWRILNPGEYRVTAHAEGYTPSAKTCNVDYDIGATQCNFILARSNWKRIREIMAMNGNRPIPHIDPSRPMTPQQRRLQQRRLQHRLRLRAQMRLRRLNATTTLGPHTVPPTLPPAPATTLSTTIEPWGLIPPTTAGWEESETETYTEVVTEFGTEVEPEFGTKVEPEFETQLEPEFETQLEPEFEEEEEEEKEEEIATGQAFPFTTVETYTVNFGDF

SEQ ID NO: 1985 - DNA, 1584 bp, Homo sapiens
cgggatgcggcgcgccgcgcgttgaacctccttggcctgggcgaagctgtgtggaccaagcaagtcaggagtgtggccatgttttctgagcaggctgcccagagggcccacactctactgtccccaccatcagccaacaatgccacctttgcccgggtgccagtggcaacctacaccaactcctcacaacccttccggctaggagagcgcagctttagccggcagtatgcccacatttatgccacccgcctcatccaaatgagacccttcctggagaaccgggcccagcagcactggggcagtggagtgggagtgaagaagctgtgtgaactgcagcctgaggagaagtgctgtgtggtgggcactctgttcaaggccatgccgctgcagccctccatcctgcgggaggtcagcgaggagcacaacctgctcccccagcctcctcggagtaaatacatacacccagatgacgagctggtcttggaagatgaactgcagcgtatcaaactaaaaggcaccattgacgtgtcaaagctggttacggggactgtcctggctgtgtttggctccgtgagagacgacgggaagtttctggtggaggactattgctttgctgaccttgctccccagaagcccgcacccccacttgacacagataggtttgtgctactggtgtccggcctgggcctgggtggcggtggaggcgagagcctgctgggcacccagctgctggtggatgtggtgacggggcagcttggggacgaaggggagcagtgcagcgccgcccacgtctcccgggttatcctcgctggcaacctcctcagccacagcacccagagcagggattctatcaataaggccaaatacctcaccaagaaaacccaggcagccagcgtggaggctgttaagatgctggatgagatcctcctgcagctgagcgcctcagtgcccgtggacgtgatgccaggcgagtttgatcccaccaattacacgctcccccagcagcccctccacccctgcatgttcccgctggccactgcctactccacgctccagctggtcaccaacccctaccaggccaccattgatggagtcagatttttggggacatcaggacagaacgtgagtgacattttccgatacagcagcatggaggatcacttggagatcctggagtggaccctgcgggtccgtcacatcagccccacagccccggacactctaggttgttaccccttctacaaaactgacccgttcatcttcccagagtgcccgcatgtctacttttgtggcaacacccccagctttggctccaaaatcatccgaggtcctgaggaccagacagtgctgttggtgactgtccctgacttcagtgccacgcagaccgcctgccttgtgaacctgcgcagcctggcctgccagcccatcagcttctcgggcttcggggcagaggacgatgacctgggaggcctggggctgggcccctgactcaaaaaagtggttttgaccagagaggcccagatggaggctgttcattccctgcagtgtcggcattgtaaataaagcctggcacttgctgatgcg

SEQ ID NO: 1986 - protein, 469 aa, Homo sapiens
MFSEQAAQRAHTLLSPPSANNATFARVPVATYTNSSQPFRLGERSFSRQYAHIYATRLIQMRPFLENRAQQHWGSGVGVKKLCELQPEEKCCVVGTLFKAMPLQPSILREVSEEHNLLPQPPRSKYIHPDDELVLEDELQRIKLKGTIDVSKLVTGTVLAVFGSVRDDGKFLVEDYCFADLAPQKPAPPLDTDRFVLLVSGLGLGGGGGESLLGTQLLVDVVTGQLGDEGEQCSAAHVSRVILAGNLLSHSTQSRDSINKAKYLTKKTQAASVEAVKMLDEILLQLSASVPVDVMPGEFDPTNYTLPQQPLHPCMFPLATAYSTLQLVTNPYQATIDGVRFLGTSGQNVSDIFRYSSMEDHLEILEWTLRVRHISPTAPDTLGCYPFYKTDPFIFPECPHVYFCGNTPSFGSKIIRGPEDQTVLLVTVPDFSATQTACLVNLRSLACQPISFSGFGAEDDDLGGLGLGP

SEQ ID NO: 1987 - DNA, 619 bp, Homo sapiens
tctgcagagagaatggccagcaggaaggcggggacccggggcaaggtggcagccaccaagcaggcccaacgtggttcttccaacgtcttttccatgtttgaacaagcccagatacaggagttcaaagaagccttcagctgtatcgaccagaatcgtgatggcatcatctgcaaggcagacctgagggagacctactcccagctggggaaggtgagtgtcccagaggaggagctggacgccatgctgcaagagggcaagggccccatcaacttcaccgtcttcctcacgctctttggggagaagctcaatgggacagaccccgaggaagccatcctgagtgccttccgcatgtttgaccccagcggcaaaggggtggtgaacaaggatgagttcaagcagcttctcctgacccaggcagacaagttctctccagctgaggtggagcagatgttcgccctgacacccatggacctggcggggaacatcgactacaagtcactgtgctacatcatcacccatggagacgagaaagaggaatgaggggcagggccaggcccacgggggggcacctcaataaactctgttgcaaaattggaaaaaaaaaaaaaaaaaaaaaaaa

SEQ ID NO: 1988 - protein, 175 aa, Homo sapiens
MASRKAGTRGKVAATKQAQRGSSNVFSMFEQAQIQEFKEAFSCIDQNRDGIICKADLRETYSQLGKVSVPEEELDAMLQEGKGPINFTVFLTLFGEKLNGTDPEEAILSAFRMFDPSGKGVVNKDEFKQLLLTQADKFSPAEVEQMFALTPMDLAGNIDYKSLCYIITHGDEKEE

SEQ ID NO: 1989 - DNA, 2759 bp, Homo sapiens
actccacacctggctggagcaggaaatgccgagcggcgcctgagccccagggaagcaggctaggatgtgagagacacagtcacctgcagcctaattactcaaaagctgtccccaggtcacagaagggagaggacatttcccactgaatctgtctgaaggacactaagccccacagctcaacacaaccaggagagaaagcgctgaggacgccacccaagcgcccagcaatggccctgcctggagaacatccaggctcagtgaggaagggtccagaagggaatgcttgccgactcgttggagaacaatgaaaaggaggaaactgtgactgaacctcaaaccccaaaccagcccgaggagaaccacattctcccagggacccagggcgggccgtgacccctgcggcggagaagccttggatatttccacttcagaagcctactggggaaggctgaggggtcccagctccccacgctggctgctgtgcagatgctggacgacagagccaggatggaggccgccaagaaggagaaggtagagcagatcctggcagagttccagctgcaggaggaggacctgaagaaggtgatgagacggatgcagaaggagatggaccgcggcctgaggctggagacccatgaagaggccagtgtgaagatgctgcccacctacgtgcgctccaccccagaaggctcagaagtcggggacttcctctccctggacctgggtggcactaacttcagggtgatgctggtgaaggtgggagaaggtgaggaggggcagtggagcgtgaagaccaaacaccagatgtactccatccccgaggacgccatgaccggcactgctgagatgctcttcgactacatctctgagtgcatctccgacttcctggacaagcatcagatgaaacacaagaagctgcccctgggcttcaccttctcctttcctgtgaggcacgaagacatcgataagggcatccttctcaactggaccaagggcttcaaggcctcaggagcagaagggaacaatgtcgtggggcttctgcgagacgctatcaaacggagaggggactttgaaatggatgtggtggcaatggtgaatgacacggtggccacgatgatctcctgctactacgaagaccatcagtgcgaggtcggcatgatcgtgggcacgggctgcaatgcctgctacatggaggagatgcagaatgtggagctggtggagggggacgagggccgcatgtgcgtcaataccgagtggggcgccttcggggactccggcgagctggacgagttcctgctggagtatgaccgcctggtggacgagagctctgcaaaccccggtcagcagctgtatgagaagctcataggtggcaagtacatgggcgagctggtgcggcttgtgctgctcaggctcgtggacgaaaacctgctcttccacggggaggcctccgagcagctgcgcacacgcggagccttcgagacgcgcttcgtgtcgcaggtggagagcgacacgggcgaccgcaagcagatctacaacatcctgagcacgctggggctgcgaccctcgaccaccgactgcgacatcgtgcgccgcgcctgcgagagcgtgtctacgcgcgctgcgcacatgtgctcggcggggctggcgggcgtcatcaaccgcatgcgcgagagccgcagcgaggacgtaatgcgcatcactgtgggcgtggatggctccgtgtacaagctgcaccccagcttcaaggagcggttccatgccagcgtgcgcaggctgacgcccagctgcgagatcaccttcatcgagtcggaggagggcagtggccggggcgcggccctggtctcggcggtggcctgtaagaaggcctgtatgctgggccagtgagagcagtggccgcaagcgcagggaggatgccacagccccacagcacccaggctccatggggaagtgctccccacacgtgctcgcagcctggcggggcaggaggcctggccttgtcaggacccaggccgcctgccataccgctggggaacagagcgggcctcttccctcagtttttcggtgggacagccccagggccctaacgggggtgcggcaggagcaggaacagagactctggaagccccccacctttctcgctggaatcaatttcccagaagggagttgctcactcaggactttgatgcatttccacactgtcagagctgttggcctcgcctgggcccaggctctgggaaggggtgccctctggatcctgctgtggcctcacttccctgggaactcatcctgtgtggggaggcagctccaacagcttgaccagacctagacctgggccaaaagggcaggccaggggctgctcatcacccagtcctggccattttcttgcctgaggctcaagaggcccagggagcaatgggagggggctccatggaggaggtgtcccaagctttgaataccccccagagaccttttctctcccataccatcactgagtggcttgtgattctgggatggaccctcgcagcaggtgcaagagacagagcccccaagcctctgccccaaggggcccacaaaggggagaagggccagccctacatcttcagctcccatagcgctggctcaggaagaaaccccaagcagcattcagcacaccccaagggacaaccccatcatatgacatgccaccctctccatgcccaacctaagattgtgtgggttttttaattaaaaatgttaaaagttttaaacatgaaaaaaaa

SEQ ID NO: 1990 - protein, 465 aa, Homo sapiens [sequence omitted]

SEQ ID NO: 1991 - DNA, 2442 bp, Homo sapiens
cctttcagtgcagaagccctgggctgccagcctcaggcagctctccatccaagcagccgttgctgccacaggcgggccttacgctccaaggctacagcatgtgctaggcctcagcaggcaggagcatctctgcctcccaaagcatctacctcttagcccctcggagagatggcgatggatgtcacaaggagccaggcccagacagccttgactctggtagagcagatcctggcagagttccagctgcaggaggaggacctgaagaaggtgatgagacggatgcagaaggagatggaccgcggcctgaggctggagacccatgaagaggccagtgtgaagatgctgcccacctacgtgcgctccaccccagaaggctcagaagtcggggacttcctctccctggacctgggtggcactaacttcagggtgatgctggtgaaggtgggagaaggtgaggaggggcagtggagcgtgaagaccaaacaccagatgtactccatccccgaggacgccatgaccggcactgctgagatgctcttcgactacatctctgagtgcatctccgacttcctggacaagcatcagatgaaacacaagaagctgcccctgggcttcaccttctcctttcctgtgaggcacgaagacatcgataagggcatccttctcaactggaccaagggcttcaaggcctcaggagcagaagggaacaatgtcgtggggcttctgcgagacgctatcaaacggagaggggactttgaaatggatgtggtggcaatggtgaatgacacggtggccacgatgatctcctgctactacgaagaccatcagtgcgaggtcggcatgatcgtgggcacgggctgcaatgcctgctacatggaggagatgcagaatgtggagctggtggagggggacgagggccgcatgtgcgtcaataccgagtggggcgccttcggggactccggcgagctggacgagttcctgctggagtatgaccgcctggtggacgagagctctgcaaaccccggtcagcagctgtatgagaagctcataggtggcaagtacatgggcgagctggtgcggcttgtgctgctcaggctcgtggacgaaaacctgctcttccacggggaggcctccgagcagctgcgcacacgcggagccttcgagacgcgcttcgtgtcgcaggtggagagcgacacgggcgaccgcaagcagatctacaacatcctgagcacgctggggctgcgaccctcgaccaccgactgcgacatcgtgcgccgcgcctgcgagagcgtgtctacgcgcgctgcgcacatgtgctcggcggggctggcgggcgtcatcaaccgcatgcgcgagagccgcagcgaggacgtaatgcgcatcactgtgggcgtggatggctccgtgtacaagctgcaccccagcttcaaggagcggttccatgccagcgtgcgcaggctgacgcccagctgcgagatcaccttcatcgagtcggaggagggcagtggccggggcgcggccctggtctcggcggtggcctgtaagaaggcctgtatgctgggccagtgagagcagtggccgcaagcgcagggaggatgccacagccccacagcacccaggctccatggggaagtgctccccacacgtgctcgcagcctggcggggcaggaggcctggccttgtcaggacccaggccgcctgccataccgctggggaacagagcgggcctcttccctcagtttttcggtgggacagccccagggccctaacgggggtgcggcaggagcaggaacagagactctggaagccccccacctttctcgctggaatcaatttcccagaagggagttgctcactcaggactttgatgcatttccacactgtcagagctgttggcctcgcctgggcccaggctctgggaaggggtgccctctggatcctgctgtggcctcacttccctgggaactcatcctgtgtggggaggcagctccaacagcttgaccagacctagacctgggccaaaagggcagccaggggctgctcatcacccagtcctggccattttcttgcctgaggctcaagaggcccagggagcaatgggagggggctccatggaggaggtgtcccaagctttgaatacccccagagaccttttctctcccataccatcactgagtggcttgtgattctgggatggaccctcgcagcaggtgcaagagacagagcccccaagcctctgccccaaggggcccacaaaggggagaagggccagccctacatcttcagctcccatagcgctggctcaggaagaaaccccaagcagcattcagcacaccccaagggacaaccccatcatatgacatgccaccctctccatgcccaacctaagattgtgtgggttttttaattaaaaatgttaaaagttttaaacatgaaaaaaaa

SEQ ID NO: 1992 - protein, 466 aa, Homo sapiens
MAMDVTRSQAQTALTLVEQILAEFQLQEEDLKKVMRRMQKEMDRGLRLETHEEASVKMLPTYVRSTPEGSEVGDFLSLDLGGTNFRVMLVKVGEGEEGQWSVKTKHQMYSIPEDAMTGTAEMLFDYISECISDFLDKHQMKHKKLPLGFTFSFPVRHEDIDKGILLNWTKGFKASGAEGNNVVGLLRDAIKRRGDFEMDVVAMVNDTVATMISCYYEDHQCEVGMIVGTGCNACYMEEMQNVELVEGDEGRMCVNTEWGAFGDSGELDEFLLEYDRLVDESSANPGQQLYEKLIGGKYMGELVRLVLLRLVDENLLFHGEASEQLRTRGAFETRFVSQVESDTGDRKQIYNILSTLGLRPSTTDCDIVRRACESVSTRAAHMCSAGLAGVINRMRESRSEDVMRITVGVDGSVYKLHPSFKERFHASVRRLTPSCEITFIESEEGSGRGAALVSAVACKKACMLGQ

SEQ ID NO: 1993 - DNA, 2566 bp, Homo sapiens
cctttcagtgcagaagccctgggctgccagcctcaggcagctctccatccaagcagccgttgctgccacaggcgggccttacgctccaaggctacagcatgtgctaggcctcagcaggcaggagcatctctgcctcccaaagcatctacctcttagcccctcggagagatggcgatggatgtcacaaggagccaggcccagacagccttgactctgccagactctcctctgaactcgggcctcacatggccaactgctacttggaacaaatcgccccttggctggcagatgtgttaacatgcccagaccaagatcccaactcccacaacccaactcccaggtagagcagatcctggcagagttccagctgcaggaggaggacctgaagaaggtgatgagacggatgcagaaggagatggaccgcggcctgaggctggagacccatgaagaggccagtgtgaagatgctgcccacctacgtgcgctccaccccagaaggctcagaagtcggggacttcctctccctggacctgggtggcactaacttcagggtgatgctggtgaaggtgggagaaggtgaggaggggcagtggagcgtgaagaccaaacaccagatgtactccatccccgaggacgccatgaccggcactgctgagatgctcttcgactacatctctgagtgcatctccgacttcctggacaagcatcagatgaaacacaagaagctgcccctgggcttcaccttctcctttcctgtgaggcacgaagacatcgataagggcatccttctcaactggaccaagggcttcaaggcctcaggagcagaagggaacaatgtcgtggggcttctgcgagacgctatcaaacggagaggggactttgaaatggatgtggtggcaatggtgaatgacacggtggccacgatgatctcctgctactacgaagaccatcagtgcgaggtcggcatgatcgtgggcacgggctgcaatgcctgctacatggaggagatgcagaatgtggagctggtggagggggacgagggccgcatgtgcgtcaataccgagtggggcgccttcggggactccggcgagctggacgagttcctgctggagtatgaccgcctggtggacgagagctctgcaaaccccggtcagcagctgtatgagaagctcataggtggcaagtacatgggcgagctggtgcggcttgtgctgctcaggctcgtggacgaaaacctgctcttccacggggaggcctccgagcagctgcgcacacgcggagccttcgagacgcgcttcgtgtcgcaggtggagagcgacacgggcgaccgcaagcagatctacaacatcctgagcacgctggggctgcgaccctcgaccaccgactgcgacatcgtgcgccgcgcctgcgagagcgtgtctacgcgcgctgcgcacatgtgctcggcggggctggcgggcgtcatcaaccgcatgcgcgagagccgcagcgaggacgtaatgcgcatcactgtgggcgtggatggctccgtgtacaagctgcaccccagcttcaaggagcggttccatgccagcgtgcgcaggctgacgcccagctgcgagatcaccttcatcgagtcggaggagggcagtggccggggcgcggccctggtctcggcggtggcctgtaagaaggcctgtatgctgggccagtgagagcagtggccgcaagcgcagggaggatgccacagccccacagcacccaggctccatggggaagtgctccccacacgtgctcgcagcctggcggggcaggaggcctggccttgtcaggacccaggccgcctgccataccgctggggaacagagcgggcctcttccctcagtttttcggtgggacagccccagggccctaacgggggtgcggcaggagcaggaacagagactctggaagccccccacctttctcgctggaatcaatttcccagaagggagttgctcactcaggactttgatgcatttccacactgtcagagctgttggcctcgcctgggcccaggctctgggaaggggtgccctctggatcctgctgtggcctcacttccctgggaactcatcctgtgtggggaggcagctccaacagcttgaccagacctagacctgggccaaaagggcagccaggggctgctcatcacccagtcctggccattttcttgcctgaggctcaagaggcccagggagcaatgggagggggctccatggaggaggtgtcccaagctttgaatacccccagagaccttttctctcccataccatcactgagtggcttgtgattctgggatggaccctcgcagcaggtgcaagagacagagcccccaagcctctgccccaaggggcccacaaaggggagaagggccagccctacatcttcagctcccatagcgctggctcaggaagaaaccccaagcagcattcagcacaccccaagggacaaccccatcatatgacatgccaccctctccatgcccaacctaagattgtgtgggttttttaattaaaaatgttaaaagttttaaacatgaaaaaaaa

SEQ ID NO: 1994 - protein, 464 aa, Homo sapiens
MPRPRSQLPQPNSQVEQILAEFQLQEEDLKKVMRRMQKEMDRGLRLETHEEASVKMLPTYVRSTPEGSEVGDFLSLDLGGTNFRVMLVKVGEGEEGQWSVKTKHQMYSIPEDAMTGTAEMLFDYISECISDFLDKHQMKHKKLPLGFTFSFPVRHEDIDKGILLNWTKGFKASGAEGNNVVGLLRDAIKRRGDFEMDVVAMVNDTVATMISCYYEDHQCEVGMIVGTGCNACYMEEMQNVELVEGDEGRMCVNTEWGAFGDSGELDEFLLEYDRLVDESSANPGQQLYEKLIGGKYMGELVRLVLLRLVDENLLFHGEASEQLRTRGAFETRFVSQVESDTGDRKQIYNILSTLGLRPSTTDCDIVRRACESVSTRAAHMCSAGLAGVINRMRESRSEDVMRITVGVDGSVYKLHPSFKERFHASVRRLTPSCEITFIESEEGSGRGAALVSAVACKKACMLGQ

SEQ ID NO: 1995 - DNA, 2783 bp, Homo sapiens
gattgcgagccaggaggaggaagccggcggtggccccgtcagcagccggctgctgagaggccggtaggcggcggcggtcccgaggggcggcggccgcgctgctccctgagaacgggtcccgcagctgggcaggcgggcggcctgagggcgcggagccatgaagctgtacagcctcagcgtcctctacaaaggcgaggccaaggtggtgctgctcaaagccgcatacgatgtgtcttccttcagctttttccagagatccagcgttcaggaattcatgaccttcacgagtcaactgattgtggagcgctcatcgaaaggcactagagcttctgtcaaagaacaagactatctgtgccacgtctacgtccggaatgatagtcttgcaggtgtggtcattgctgacaatgaatacccatcccgggtggcctttaccttgctggagaaggtactagatgaattctccaagcaagtcgacaggatagactggccagtaggatcccctgctacaatccattacccagccctggatggtcacctcagtagataccagaacccacgagaagctgatcccatgactaaagtgcaggccgaactagatgagaccaaaatcattctgcacaacaccatggagtctctgttagagcgaggtgagaagctagatgacttggtgtccaaatccgaggtgctgggaacacagtctaaagccttctataaaactgcccggaaacaaaactcatgctgtgccatcatgtgatgcagcctgccagaggcccaatgctggaatggcaccatcattcacatcagaactgcagcccctggaaaagaagagacagccatagacgaggagccagagtgggggcagactggccatttttattttgaagttcctgcgagaaatggatggtggaagggtggcgaatgttcaaattcatatgtgtggtagtgattcttggaaagaatttgaggtccccaaaggtgtatttttgggcaaatgaaaccataaactccgactggcttctgtagatgccaaagggctctttttcagctaaccctgggaaggctctgtgggagggaggtcggagccagctgtttctcgatctttggtatatctttggatcttatttgtacattaatgatattaacactccagtggggggtggggagtccctgatgctagggctggggtgggtggagtttgaagactcttgggaaagcctctcctggggccactgttgggggtgggagtgagcccaccacagaggccacaggcaggcccccacttcaggcccaaggcctggggcggggggaacagtcactgggtctcagattctgagactgttgtttagcttacctttctgctaggattggcttcccgcagagggcagggcccatcctaagcagcttccaagtcccacaaaggtggcttgtgggaggatttggaaggagctgcattgtgggcggggagtgtgtgggttgggttcgtaccagcaagtagactaggaactgagcccaggaaagggggatgttttcctggtgtttggatggtcagctgggagtgtccatcatcaggggaagatcaaacacaggtgcactcagctgcccagggcctctgggacacttgccttgacttgcaacttgccttgaacatcacgatcaaagcagcaggtgctgtggtctctcaaaattgatttttatttgactctgtggctctaagactgccttgaaccgcctgaggcctatgcatctgaacaagtgggtctctcccttgagcaccaggagtgggtgccagccggccccgaggattcccagcaccccacctatggtcttgccagcataggcttgctagttccttcttggtcagaggtagctgcagaggggggaggccaagggtttggtctaagctgtgccctgccacctggcaggaggcccactcactgcccaagtcatggcaacaggctggagcagcccaggagatgggcctaaaatgttctggatcccttgggtcctagtgttatgttccagtctgcccacctgtgctcaggatgcagccctgggatccagcacccatggaagcttctgctgggatggtgtcacctatgggttttgaaccagtgtggtatggtccttgggagctctgctctgagcttgccacactgctgagagcacccactgtcctgaccagagtctcagtggtcctgacccccaatgtgggcaggggctgggcaggagggtggggtctgctgtgggttcagaggactccacctcctggctggtttacctgctgctgcccattttctctgggtactgctggccagaggactttagcctacccctgaagagcctgtccatgtcattttcctactgccatagataccctaagcccagggccccttgaggcccagactcagcctgcccactggtgccggagacggagtggagtgggcctggatccgagggatgctacctctccctttcccacttgaggaccctggggagagatgggggcggggaaaatggaggtatgaatttggggtaagaggaagtgagatctccgcttgcaggtcagcccctgccttgcagggcgggctggcttgactcaggccctgtgagatagagggcccagcccagccccacccacagatcccctgctcctgttgtgttctgttgtaaatcatttggcgagactgtattttagtaactgctgcctaacttccctgtgttctatttgagaggcgcctgtctggataaagttgtcttgaaatttcaaaaaaaaaaaaaaaaaa

SEQ ID NO: 1996 - protein, 198 aa, Homo sapiens
MKLYSLSVLYKGEAKVVLLKAAYDVSSFSFFQRSSVQEFMTFTSQLIVERSSKGTRASVKEQDYLCHVYVRNDSLAGVVIADNEYPSRVAFTLLEKVLDEFSKQVDRIDWPVGSPATIHYPALDGHLSRYQNPREADPMTKVQAELDETKIILHNTMESLLERGEKLDDLVSKSEVLGTQSKAFYKTARKQNSCCAIM

SEQ ID NO: 1997 - DNA, 2438 bp, Homo sapiens
gcggcgcgctcctggcgaggacggagcgagcagatctcgcgtgcgctcgccgcccggcgcagcccagcccggcccccgcctggcgccgcgagccgaggtgtctcccgcgcccgcgcccgtgtcgccgccgtgcccgcgagcgggagccggagtcgccgccgcccgagcgcagccgagcgcacgccgagcccgtccgccgccgccatggccaccacggtgacctgcacccgcttcaccgacgagtaccagctctacgaggatattggcaagggggctttctctgtggtccgacgctgtgtcaagctctgcaccggccatgagtatgcagccaagatcatcaacaccaagaagctgtcagccagagatcaccagaagctggagagagaggctcggatctgccgccttctgaagcattccaacatcgtgcgtctccacgacagcatctccgaggagggcttccactacctggtcttcgatctggtcactggtggggagctctttgaagacattgtggcgagagagtactacagcgaggctgatgccagtcactgtatccagcagatcctggaggccgttctccattgtcaccaaatgggggtcgtccacagagacctcaagccggagaacctgcttctggccagcaagtgcaaaggggctgcagtgaagctggcagacttcggcctagctatcgaggtgcagggggaccagcaggcatggtttggtttcgctggcacaccaggctacctgtcccctgaggtccttcgcaaagaggcgtatggcaagcctgtggacatctgggcatgtggggtgatcctgtacatcctgctcgtgggctacccacccttctgggacgaggaccagcacaagctgtaccagcagatcaaggctggtgcctatgacttcccgtcccctgagtgggacaccgtcactcctgaagccaaaaacctcatcaaccagatgctgaccatcaaccctgccaagcgcatcacagcccatgaggccctgaagcacccgtgggtctgccaacgctccacggtagcatccatgatgcacagacaggagactgtggagtgtctgaaaaagttcaatgccaggagaaagctcaagggagccatcctcaccaccatgctggccacacggaatttctcagtgggcagacagaccaccgctccggccacaatgtccaccgcggcctccggcaccaccatggggctggtggaacaagccaagagtttactcaacaagaaagcagatggagtcaagccccagacgaatagcaccaaaaacagtgcagccgccaccagccccaaagggacgcttcctcctgccgccctggagcctcaaaccaccgtcatccataacccagtggacgggattaaggagtcttctgacagtgccaataccaccatagaggatgaagacgctaaagcccccagggtccccgacatcctgagctcagtgaggaggggctcgggagccccagaagccgaggggcccctgccctgcccatctccggctccctttagccccctgccagccccatcccccaggatctctgacatcctgaactctgtgagaaggggttcaggaaccccagaagccgagggccccctctcagcggggcccccgccctgcctgtctccggctctcctaggccccctgtcctccccgtcccccaggatctctgacatcctgaactctgtgaggaggggctcagggaccccagaagccgagggcccctcgccagtggggcccccgccctgcccatctccgactatccctggccccctgcccaccccatcccggaagcaggagatcattaagaccacggagcagctcatcgaggccgtcaacaacggtgactttgaggcctacgcgaaaatctgtgacccagggctgacctcgtttgagcctgaagcactgggcaacctggttgaagggatggacttccacagattctacttcgagaacctgctggccaagaacagcaagccgatccacacgaccatcctgaacccacacgtgcacgtcattggagaggatgccgcctgcatcgcttacatccggctcacgcagtacattgacgggcagggccggccccgcaccagccagtctgaggagacccgcgtgtggcaccgccgcgacggcaagtggcagaacgtgcacttccactgctcgggcgcgcctgtggccccgctgcagtgaagagctgcgccctggtttcgccggacagagttggtgtttggagcccgactgccctcgggcacacggcctgcctgtcgcatgtttgtgtctgcctcgttccctcccctggtgcctgtgtctgcagaaaaacaagaccagatgtgatttgttaaaaaaaaacaaaaaaaaaaaaaaaaaaaacaagatgacgacgacaaccacaaaaaaaattgacatcagatgaaatgaaaaaa

SEQ ID NO: 1998 - protein, 666 aa, Homo sapiens
MATTVTCTRFTDEYQLYEDIGKGAFSVVRRCVKLCTGHEYAAKIINTKKLSARDHQKLEREARICRLLKHSNIVRLHDSISEEGFHYLVFDLVTGGELFEDIVAREYYSEADASHCIQQILEAVLHCHQMGVVHRDLKPENLLLASKCKGAAVKLADFGLAIEVQGDQQAWFGFAGTPGYLSPEVLRKEAYGKPVDIWACGVILYILLVGYPPFWDEDQHKLYQQIKAGAYDFPSPEWDTVTPEAKNLINQMLTINPAKRITAHEALKHPWVCQRSTVASMMHRQETVECLKKFNARRKLKGAILTTMLATRNFSVGRQTTAPATMSTAASGTTMGLVEQAKSLLNKKADGVKPQTNSTKNSAAATSPKGTLPPAALEPQTTVIHNPVDGIKESSDSANTTIEDEDAKAPRVPDILSSVRRGSGAPEAEGPLPCPSPAPFSPLPAPSPRISDILNSVRRGSGTPEAEGPLSAGPPPCLSPALLGPLSSPSPRISDILNSVRRGSGTPEAEGPSPVGPPPCPSPTIPGPLPTPSRKQEIIKTTEQLIEAVNNGDFEAYAKICDPGLTSFEPEALGNLVEGMDFHRFYFENLLAKNSKPIHTTILNPHVHVIGEDAACIAYIRLTQYIDGQGRPRTSQSEETRVWHRRDGKWQNVHFHCSGAPVAPLQ

SEQ ID NO: 1999 - DNA, 2066 bp, Homo sapiens
gcggcgcgctcctggcgaggacggagcgagcagatctcgcgtgcgctcgccgcccggcgcagcccagcccggcccccgcctggcgccgcgagccgaggtgtctcccgcgcccgcgcccgtgtcgccgccgtgcccgcgagcgggagccggagtcgccgccgcccgagcgcagccgagcgcacgccgagcccgtccgccgccgccatggccaccacggtgacctgcacccgcttcaccgacgagtaccagctctacgaggatattggcaagggggctttctctgtggtccgacgctgtgtcaagctctgcaccggccatgagtatgcagccaagatcatcaacaccaagaagctgtcagccagagatcaccagaagctggagagagaggctcggatctgccgccttctgaagcattccaacatcgtgcgtctccacgacagcatctccgaggagggcttccactacctggtcttcgatctggtcactggtggggagctctttgaagacattgtggcgagagagtactacagcgaggctgatgccagtcactgtatccagcagatcctggaggccgttctccattgtcaccaaatgggggtcgtccacagagacctcaagccggagaacctgcttctggccagcaagtgcaaaggggctgcagtgaagctggcagacttcggcctagctatcgaggtgcagggggaccagcaggcatggtttggtttcgctggcacaccaggctacctgtcccctgaggtccttcgcaaagaggcgtatggcaagcctgtggacatctgggcatgtggggtgatcctgtacatcctgctcgtgggctacccacccttctgggacgaggaccagcacaagctgtaccagcagatcaaggctggtgcctatgacttcccgtcccctgagtgggacaccgtcactcctgaagccaaaaacctcatcaaccagatgctgaccatcaaccctgccaagcgcatcacagcccatgaggccctgaagcacccgtgggtctgccaacgctccacggtagcatccatgatgcacagacaggagactgtggagtgtctgaaaaagttcaatgccaggagaaagctcaagggagccatcctcaccaccatgctggccacacggaatttctcagtgggcagacagaccaccgctccggccacaatgtccaccgcggcctccggcaccaccatggggctggtggaacaagccaagagtttactcaacaagaaagcagatggagtcaagccccagacgaatagcaccaaaaacagtgcagccgccaccagccccaaagggacgcttcctcctgccgccctggagcctcaaaccaccgtcatccataacccagtggacgggattaaggagtcttctgacagtgccaataccaccatagaggatgaagacgctaaagcccggaagcaggagatcattaagaccacggagcagctcatcgaggccgtcaacaacggtgactttgaggcctacgcgaaaatctgtgacccagggctgacctcgtttgagcctgaagcactgggcaacctggttgaagggatggacttccacagattctacttcgagaacctgctggccaagaacagcaagccgatccacacgaccatcctgaacccacacgtgcacgtcattggagaggatgccgcctgcatcgcttacatccggctcacgcagtacattgacgggcagggccggccccgcaccagccagtctgaggagacccgcgtgtggcaccgccgcgacggcaagtggcagaacgtgcacttccactgctcgggcgcgcctgtggccccgctgcagtgaagagctgcgccctggtttcgccggacagagttggtgtttggagcccgactgccctcgggcacacggcctgcctgtcgcatgtttgtgtctgcctcgttccctcccctggtgcctgtgtctgcagaaaaacaagaccagatgtgatttgttaaaaaaaaacaaaaaaaaaaaaaaaaaaaacaagatgacgacgacaaccacaaaaaaaattgacatcagatgaaatgaaaaaa

SEQ ID NO: 2000 - protein, 542 aa, Homo sapiens
MATTVTCTRFTDEYQLYEDIGKGAFSVVRRCVKLCTGHEYAAKIINTKKLSARDHQKLEREARICRLLKHSNIVRLHDSISEEGFHYLVFDLVTGGELFEDIVAREYYSEADASHCIQQILEAVLHCHQMGVVHRDLKPENLLLASKCKGAAVKLADFGLAIEVQGDQQAWFGFAGTPGYLSPEVLRKEAYGKPVDIWACGVILYILLVGYPPFWDEDQHKLYQQIKAGAYDFPSPEWDTVTPEAKNLINQMLTINPAKRITAHEALKHPWVCQRSTVASMMHRQETVECLKKFNARRKLKGAILTTMLATRNFSVGRQTTAPATMSTAASGTTMGLVEQAKSLLNKKADGVKPQTNSTKNSAAATSPKGTLPPAALEPQTTVIHNPVDGIKESSDSANTTIEDEDAKARKQEIIKTTEQLIEAVNNGDFEAYAKICDPGLTSFEPEALGNLVEGMDFHRFYFENLLAKNSKPIHTTILNPHVHVIGEDAACIAYIRLTQYIDGQGRPRTSQSEETRVWHRRDGKWQNVHFHCSGAPVAPLQ

SEQ ID NO: 2001 - DNA, 1994 bp, Homo sapiens
gcggcgcgctcctggcgaggacggagcgagcagatctcgcgtgcgctcgccgcccggcgcagcccagcccggcccccgcctggcgccgcgagccgaggtgtctcccgcgcccgcgcccgtgtcgccgccgtgcccgcgagcgggagccggagtcgccgccgcccgagcgcagccgagcgcacgccgagcccgtccgccgccgccatggccaccacggtgacctgcacccgcttcaccgacgagtaccagctctacgaggatattggcaagggggctttctctgtggtccgacgctgtgtcaagctctgcaccggccatgagtatgcagccaagatcatcaacaccaagaagctgtcagccagagatcaccagaagctggagagagaggctcggatctgccgccttctgaagcattccaacatcgtgcgtctccacgacagcatctccgaggagggcttccactacctggtcttcgatctggtcactggtggggagctctttgaagacattgtggcgagagagtactacagcgaggctgatgccagtcactgtatccagcagatcctggaggccgttctccattgtcaccaaatgggggtcgtccacagagacctcaagccggagaacctgcttctggccagcaagtgcaaaggggctgcagtgaagctggcagacttcggcctagctatcgaggtgcagggggaccagcaggcatggtttggtttcgctggcacaccaggctacctgtcccctgaggtccttcgcaaagaggcgtatggcaagcctgtggacatctgggcatgtggggtgatcctgtacatcctgctcgtgggctacccacccttctgggacgaggaccagcacaagctgtaccagcagatcaaggctggtgcctatgacttcccgtcccctgagtgggacaccgtcactcctgaagccaaaaacctcatcaaccagatgctgaccatcaaccctgccaagcgcatcacagcccatgaggccctgaagcacccgtgggtctgccaacgctccacggtagcatccatgatgcacagacaggagactgtggagtgtctgaaaaagttcaatgccaggagaaagctcaagggagccatcctcaccaccatgctggccacacggaatttctcagcagccaagagtttactcaacaagaaagcagatggagtcaagccccagacgaatagcaccaaaaacagtgcagccgccaccagccccaaagggacgcttcctcctgccgccctggagcctcaaaccaccgtcatccataacccagtggacgggattaaggagtcttctgacagtgccaataccaccatagaggatgaagacgctaaagcccggaagcaggagatcattaagaccacggagcagctcatcgaggccgtcaacaacggtgactttgaggcctacgcgaaaatctgtgacccagggctgacctcgtttgagcctgaagcactgggcaacctggttgaagggatggacttccacagattctacttcgagaacctgctggccaagaacagcaagccgatccacacgaccatcctgaacccacacgtgcacgtcattggagaggatgccgcctgcatcgcttacatccggctcacgcagtacattgacgggcagggccggccccgcaccagccagtctgaggagacccgcgtgtggcaccgccgcgacggcaagtggcagaacgtgcacttccactgctcgggcgcgcctgtggccccgctgcagtgaagagctgcgccctggtttcgccggacagagttggtgtttggagcccgactgccctcgggcacacggcctgcctgtcgcatgtttgtgtctgcctcgttccctcccctggtgcctgtgtctgcagaaaaacaagaccagatgtgatttgttaaaaaaaaacaaaaaaaaaaaaaaaaaaaacaagatgacgacgacaaccacaaaaaaaattgacatcagatgaaatgaaaaaa

SEQ ID NO: 2002 - protein, 518 aa, Homo sapiens
MATTVTCTRFTDEYQLYEDIGKGAFSVVRRCVKLCTGHEYAAKIINTKKLSARDHQKLEREARICRLLKHSNIVRLHDSISEEGFHYLVFDLVTGGELFEDIVAREYYSEADASHCIQQILEAVLHCHQMGVVHRDLKPENLLLASKCKGAAVKLADFGLAIEVQGDQQAWFGFAGTPGYLSPEVLRKEAYGKPVDIWACGVILYILLVGYPPFWDEDQHKLYQQIKAGAYDFPSPEWDTVTPEAKNLINQMLTINPAKRITAHEALKHPWVCQRSTVASMMHRQETVECLKKFNARRKLKGAILTTMLATRNFSAAKSLLNKKADGVKPQTNSTKNSAAATSPKGTLPPAALEPQTTVIHNPVDGIKESSDSANTTIEDEDAKARKQEIIKTTEQLIEAVNNGDFEAYAKICDPGLTSFEPEALGNLVEGMDFHRFYFENLLAKNSKPIHTTILNPHVHVIGEDAACIAYIRLTQYIDGQGRPRTSQSEETRVWHRRDGKWQNVHFHCSGAPVAPLQ

SEQ ID NO: 2003 - DNA, 1991 bp, Homo sapiens
gcggcgcgctcctggcgaggacggagcgagcagatctcgcgtgcgctcgccgcccggcgcagcccagcccggcccccgcctggcgccgcgagccgaggtgtctcccgcgcccgcgcccgtgtcgccgccgtgcccgcgagcgggagccggagtcgccgccgcccgagcgcagccgagcgcacgccgagcccgtccgccgccgccatggccaccacggtgacctgcacccgcttcaccgacgagtaccagctctacgaggatattggcaagggggctttctctgtggtccgacgctgtgtcaagctctgcaccggccatgagtatgcagccaagatcatcaacaccaagaagctgtcagccagagatcaccagaagctggagagagaggctcggatctgccgccttctgaagcattccaacatcgtgcgtctccacgacagcatctccgaggagggcttccactacctggtcttcgatctggtcactggtggggagctctttgaagacattgtggcgagagagtactacagcgaggctgatgccagtcactgtatccagcagatcctggaggccgttctccattgtcaccaaatgggggtcgtccacagagacctcaagccggagaacctgcttctggccagcaagtgcaaaggggctgcagtgaagctggcagacttcggcctagctatcgaggtgcagggggaccagcaggcatggtttggtttcgctggcacaccaggctacctgtcccctgaggtccttcgcaaagaggcgtatggcaagcctgtggacatctgggcatgtggggtgatcctgtacatcctgctcgtgggctacccacccttctgggacgaggaccagcacaagctgtaccagcagatcaaggctggtgcctatgacttcccgtcccctgagtgggacaccgtcactcctgaagccaaaaacctcatcaaccagatgctgaccatcaaccctgccaagcgcatcacagcccatgaggccctgaagcacccgtgggtctgccaacgctccacggtagcatccatgatgcacagacaggagactgtggagtgtctgaaaaagttcaatgccaggagaaagctcaagggagccatcctcaccaccatgctggccacacggaatttctcagccaagagtttactcaacaagaaagcagatggagtcaagccccagacgaatagcaccaaaaacagtgcagccgccaccagccccaaagggacgcttcctcctgccgccctggagcctcaaaccaccgtcatccataacccagtggacgggattaaggagtcttctgacagtgccaataccaccatagaggatgaagacgctaaagcccggaagcaggagatcattaagaccacggagcagctcatcgaggccgtcaacaacggtgactttgaggcctacgcgaaaatctgtgacccagggctgacctcgtttgagcctgaagcactgggcaacctggttgaagggatggacttccacagattctacttcgagaacctgctggccaagaacagcaagccgatccacacgaccatcctgaacccacacgtgcacgtcattggagaggatgccgcctgcatcgcttacatccggctcacgcagtacattgacgggcagggccggccccgcaccagccagtctgaggagacccgcgtgtggcaccgccgcgacggcaagtggcagaacgtgcacttccactgctcgggcgcgcctgtggccccgctgcagtgaagagctgcgccctggtttcgccggacagagttggtgtttggagcccgactgccctcgggcacacggcctgcctgtcgcatgtttgtgtctgcctcgttccctcccctggtgcctgtgtctgcagaaaaacaagaccagatgtgatttgttaaaaaaaaacaaaaaaaaaaaaaaaaaaaacaagatgacgacgacaaccacaaaaaaaattgacatcagatgaaatgaaaaaa

SEQ ID NO: 2004 - protein, 517 aa, Homo sapiens
MATTVTCTRFTDEYQLYEDIGKGAFSVVRRCVKLCTGHEYAAKIINTKKLSARDHQKLEREARICRLLKHSNIVRLHDSISEEGFHYLVFDLVTGGELFEDIVAREYYSEADASHCIQQILEAVLHCHQMGVVHRDLKPENLLLASKCKGAAVKLADFGLAIEVQGDQQAWFGFAGTPGYLSPEVLRKEAYGKPVDIWACGVILYILLVGYPPFWDEDQHKLYQQIKAGAYDFPSPEWDTVTPEAKNLINQMLTINPAKRITAHEALKHPWVCQRSTVASMMHRQETVECLKKFNARRKLKGAILTTMLATRNFSAKSLLNKKADGVKPQTNSTKNSAAATSPKGTLPPAALEPQTTVIHNPVDGIKESSDSANTTIEDEDAKARKQEIIKTTEQLIEAVNNGDFEAYAKICDPGLTSFEPEALGNLVEGMDFHRFYFENLLAKNSKPIHTTILNPHVHVIGEDAACIAYIRLTQYIDGQGRPRTSQSEETRVWHRRDGKWQNVHFHCSGAPVAPLQ

SEQ ID NO: 2005 - DNA, 1949 bp, Homo sapiens
gcggcgcgctcctggcgaggacggagcgagcagatctcgcgtgcgctcgccgcccggcgcagcccagcccggcccccgcctggcgccgcgagccgaggtgtctcccgcgcccgcgcccgtgtcgccgccgtgcccgcgagcgggagccggagtcgccgccgcccgagcgcagccgagcgcacgccgagcccgtccgccgccgccatggccaccacggtgacctgcacccgcttcaccgacgagtaccagctctacgaggatattggcaagggggctttctctgtggtccgacgctgtgtcaagctctgcaccggccatgagtatgcagccaagatcatcaacaccaagaagctgtcagccagagatcaccagaagctggagagagaggctcggatctgccgccttctgaagcattccaacatcgtgcgtctccacgacagcatctccgaggagggcttccactacctggtcttcgatctggtcactggtggggagctctttgaagacattgtggcgagagagtactacagcgaggctgatgccagtcactgtatccagcagatcctggaggccgttctccattgtcaccaaatgggggtcgtccacagagacctcaagccggagaacctgcttctggccagcaagtgcaaaggggctgcagtgaagctggcagacttcggcctagctatcgaggtgcagggggaccagcaggcatggtttggtttcgctggcacaccaggctacctgtcccctgaggtccttcgcaaagaggcgtatggcaagcctgtggacatctgggcatgtggggtgatcctgtacatcctgctcgtgggctacccacccttctgggacgaggaccagcacaagctgtaccagcagatcaaggctggtgcctatgacttcccgtcccctgagtgggacaccgtcactcctgaagccaaaaacctcatcaaccagatgctgaccatcaaccctgccaagcgcatcacagcccatgaggccctgaagcacccgtgggtctgccaacgctccacggtagcatccatgatgcacagacaggagactgtggagtgtctgaaaaagttcaatgccaggagaaagctcaagggagccatcctcaccaccatgctggccacacggaatttctcagcagccaagagtttactcaacaagaaagcagatggagtcaagccccagacgaatagcaccaaaaacagtgcagccgccaccagccccaaagggacgcttcctcctgccgccctggagtcttctgacagtgccaataccaccatagaggatgaagacgctaaagcccggaagcaggagatcattaagaccacggagcagctcatcgaggccgtcaacaacggtgactttgaggcctacgcgaaaatctgtgacccagggctgacctcgtttgagcctgaagcactgggcaacctggttgaagggatggacttccacagattctacttcgagaacctgctggccaagaacagcaagccgatccacacgaccatcctgaacccacacgtgcacgtcattggagaggatgccgcctgcatcgcttacatccggctcacgcagtacattgacgggcagggccggccccgcaccagccagtctgaggagacccgcgtgtggcaccgccgcgacggcaagtggcagaacgtgcacttccactgctcgggcgcgcctgtggccccgctgcagtgaagagctgcgccctggtttcgccggacagagttggtgtttggagcccgactgccctcgggcacacggcctgcctgtcgcatgtttgtgtctgcctcgttccctcccctggtgcctgtgtctgcagaaaaacaagaccagatgtgatttgttaaaaaaaaacaaaaaaaaaaaaaaaaaaaacaagatgacgacgacaaccacaaaaaaaattgacatcagatgaaatgaaaaaa

SEQ ID NO: 2006 - protein, 503 aa, Homo sapiens
MATTVTCTRFTDEYQLYEDIGKGAFSVVRRCVKLCTGHEYAAKIINTKKLSARDHQKLEREARICRLLKHSNIVRLHDSISEEGFHYLVFDLVTGGELFEDIVAREYYSEADASHCIQQILEAVLHCHQMGVVHRDLKPENLLLASKCKGAAVKLADFGLAIEVQGDQQAWFGFAGTPGYLSPEVLRKEAYGKPVDIWACGVILYILLVGYPPFWDEDQHKLYQQIKAGAYDFPSPEWDTVTPEAKNLINQMLTINPAKRITAHEALKHPWVCQRSTVASMMHRQETVECLKKFNARRKLKGAILTTMLATRNFSAAKSLLNKKADGVKPQTNSTKNSAAATSPKGTLPPAALESSDSANTTIEDEDAKARKQEIIKTTEQLIEAVNNGDFEAYAKICDPGLTSFEPEALGNLVEGMDFHRFYFENLLAKNSKPIHTTILNPHVHVIGEDAACIAYIRLTQYIDGQGRPRTSQSEETRVWHRRDGKWQNVHFHCSGAPVAPLQ

SEQ ID NO: 2007 - DNA, 1916 bp, Homo sapiens
gcggcgcgctcctggcgaggacggagcgagcagatctcgcgtgcgctcgccgcccggcgcagcccagcccggcccccgcctggcgccgcgagccgaggtgtctcccgcgcccgcgcccgtgtcgccgccgtgcccgcgagcgggagccggagtcgccgccgcccgagcgcagccgagcgcacgccgagcccgtccgccgccgccatggccaccacggtgacctgcacccgcttcaccgacgagtaccagctctacgaggatattggcaagggggctttctctgtggtccgacgctgtgtcaagctctgcaccggccatgagtatgcagccaagatcatcaacaccaagaagctgtcagccagagatcaccagaagctggagagagaggctcggatctgccgccttctgaagcattccaacatcgtgcgtctccacgacagcatctccgaggagggcttccactacctggtcttcgatctggtcactggtggggagctctttgaagacattgtggcgagagagtactacagcgaggctgatgccagtcactgtatccagcagatcctggaggccgttctccattgtcaccaaatgggggtcgtccacagagacctcaagccggagaacctgcttctggccagcaagtgcaaaggggctgcagtgaagctggcagacttcggcctagctatcgaggtgcagggggaccagcaggcatggtttggtttcgctggcacaccaggctacctgtcccctgaggtccttcgcaaagaggcgtatggcaagcctgtggacatctgggcatgtggggtgatcctgtacatcctgctcgtgggctacccacccttctgggacgaggaccagcacaagctgtaccagcagatcaaggctggtgcctatgacttcccgtcccctgagtgggacaccgtcactcctgaagccaaaaacctcatcaaccagatgctgaccatcaaccctgccaagcgcatcacagcccatgaggccctgaagcacccgtgggtctgccaacgctccacggtagcatccatgatgcacagacaggagactgtggagtgtctgaaaaagttcaatgccaggagaaagctcaagggagccatcctcaccaccatgctggccacacggaatttctcagtgggcagacagaccaccgctccggccacaatgtccaccgcggcctccggcaccaccatggggctggtggaacaagccaagagtttactcaacaagaaagcagatggagtcaaggagcctcaaaccaccgtcatccataacccagtggacgggattaaggagtcttctgacagtgccaataccaccatagaggatgaagacgctaaagcccggaagcaggagatcattaagaccacggagcagctcatcgaggccgtcaacaacggtgactttgaggcctacgcattctacttcgagaacctgctggccaagaacagcaagccgatccacacgaccatcctgaacccacacgtgcacgtcattggagaggatgccgcctgcatcgcttacatccggctcacgcagtacattgacgggcagggccggccccgcaccagccagtctgaggagacccgcgtgtggcaccgccgcgacggcaagtggcagaacgtgcacttccactgctcgggcgcgcctgtggccccgctgcagtgaagagctgcgccctggtttcgccggacagagttggtgtttggagcccgactgccctcgggcacacggcctgcctgtcgcatgtttgtgtctgcctcgttccctcccctggtgcctgtgtctgcagaaaaacaagaccagatgtgatttgttaaaaaaaaacaaaaaaaaaaaaaaaaaaaacaagatgacgacgacaaccacaaaaaaaattgacatcagatgaaatgaaaaaa

SEQ ID NO: 2008 - protein, 492 aa, Homo sapiens
MATTVTCTRFTDEYQLYEDIGKGAFSVVRRCVKLCTGHEYAAKIINTKKLSARDHQKLEREARICRLLKHSNIVRLHDSISEEGFHYLVFDLVTGGELFEDIVAREYYSEADASHCIQQILEAVLHCHQMGVVHRDLKPENLLLASKCKGAAVKLADFGLAIEVQGDQQAWFGFAGTPGYLSPEVLRKEAYGKPVDIWACGVILYILLVGYPPFWDEDQHKLYQQIKAGAYDFPSPEWDTVTPEAKNLINQMLTINPAKRITAHEALKHPWVCQRSTVASMMHRQETVECLKKFNARRKLKGAILTTMLATRNFSVGRQTTAPATMSTAASGTTMGLVEQAKSLLNKKADGVKEPQTTVIHNPVDGIKESSDSANTTIEDEDAKARKQEIIKTTEQLIEAVNNGDFEAYAFYFENLLAKNSKPIHTTILNPHVHVIGEDAACIAYIRLTQYIDGQGRPRTSQSEETRVWHRRDGKWQNVHFHCSGAPVAPLQ

SEQ ID NO: 2009 - DNA, 1877 bp, Homo sapiens
gcggcgcgctcctggcgaggacggagcgagcagatctcgcgtgcgctcgccgcccggcgcagcccagcccggcccccgcctggcgccgcgagccgaggtgtctcccgcgcccgcgcccgtgtcgccgccgtgcccgcgagcgggagccggagtcgccgccgcccgagcgcagccgagcgcacgccgagcccgtccgccgccgccatggccaccacggtgacctgcacccgcttcaccgacgagtaccagctctacgaggatattggcaagggggctttctctgtggtccgacgctgtgtcaagctctgcaccggccatgagtatgcagccaagatcatcaacaccaagaagctgtcagccagagatcaccagaagctggagagagaggctcggatctgccgccttctgaagcattccaacatcgtgcgtctccacgacagcatctccgaggagggcttccactacctggtcttcgatctggtcactggtggggagctctttgaagacattgtggcgagagagtactacagcgaggctgatgccagtcactgtatccagcagatcctggaggccgttctccattgtcaccaaatgggggtcgtccacagagacctcaagccggagaacctgcttctggccagcaagtgcaaaggggctgcagtgaagctggcagacttcggcctagctatcgaggtgcagggggaccagcaggcatggtttggtttcgctggcacaccaggctacctgtcccctgaggtccttcgcaaagaggcgtatggcaagcctgtggacatctgggcatgtggggtgatcctgtacatcctgctcgtgggctacccacccttctgggacgaggaccagcacaagctgtaccagcagatcaaggctggtgcctatgacttcccgtcccctgagtgggacaccgtcactcctgaagccaaaaacctcatcaaccagatgctgaccatcaaccctgccaagcgcatcacagcccatgaggccctgaagcacccgtgggtctgccaacgctccacggtagcatccatgatgcacagacaggagactgtggagtgtctgaaaaagttcaatgccaggagaaagctcaagggagccatcctcaccaccatgctggccacacggaatttctcagcagccaagagtttactcaacaagaaagcagatggagtcaaggagtcttctgacagtgccaataccaccatagaggatgaagacgctaaagcccggaagcaggagatcattaagaccacggagcagctcatcgaggccgtcaacaacggtgactttgaggcctacgcgaaaatctgtgacccagggctgacctcgtttgagcctgaagcactgggcaacctggttgaagggatggacttccacagattctacttcgagaacctgctggccaagaacagcaagccgatccacacgaccatcctgaacccacacgtgcacgtcattggagaggatgccgcctgcatcgcttacatccggctcacgcagtacattgacgggcagggccggccccgcaccagccagtctgaggagacccgcgtgtggcaccgccgcgacggcaagtggcagaacgtgcacttccactgctcgggcgcgcctgtggccccgctgcagtgaagagctgcgccctggtttcgccggacagagttggtgtttggagcccgactgccctcgggcacacggcctgcctgtcgcatgtttgtgtctgcctcgttccctcccctggtgcctgtgtctgcagaaaaacaagaccagatgtgatttgttaaaaaaaaacaaaaaaaaaaaaaaaaaaaacaagatgacgacgacaaccacaaaaaaaattgacatcagatgaaatgaaaaaa

SEQ ID NO: 2010 - protein, 479 aa, Homo sapiens
MATTVTCTRFTDEYQLYEDIGKGAFSVVRRCVKLCTGHEYAAKIINTKKLSARDHQKLEREARICRLLKHSNIVRLHDSISEEGFHYLVFDLVTGGELFEDIVAREYYSEADASHCIQQILEAVLHCHQMGVVHRDLKPENLLLASKCKGAAVKLADFGLAIEVQGDQQAWFGFAGTPGYLSPEVLRKEAYGKPVDIWACGVILYILLVGYPPFWDEDQHKLYQQIKAGAYDFPSPEWDTVTPEAKNLINQMLTINPAKRITAHEALKHPWVCQRSTVASMMHRQETVECLKKFNARRKLKGAILTTMLATRNFSAAKSLLNKKADGVKESSDSANTTIEDEDAKARKQEIIKTTEQLIEAVNNGDFEAYAKICDPGLTSFEPEALGNLVEGMDFHRFYFENLLAKNSKPIHTTILNPHVHVIGEDAACIAYIRLTQYIDGQGRPRTSQSEETRVWHRRDGKWQNVHFHCSGAPVAPLQ

SEQ ID NO: 2011 - DNA, 1787 bp, Homo sapiens
gcggcgcgctcctggcgaggacggagcgagcagatctcgcgtgcgctcgccgcccggcgcagcccagcccggcccccgcctggcgccgcgagccgaggtgtctcccgcgcccgcgcccgtgtcgccgccgtgcccgcgagcgggagccggagtcgccgccgcccgagcgcagccgagcgcacgccgagcccgtccgccgccgccatggccaccacggtgacctgcacccgcttcaccgacgagtaccagctctacgaggatattggcaagggggctttctctgtggtccgacgctgtgtcaagctctgcaccggccatgagtatgcagccaagatcatcaacaccaagaagctgtcagccagagatcaccagaagctggagagagaggctcggatctgccgccttctgaagcattccaacatcgtgcgtctccacgacagcatctccgaggagggcttccactacctggtcttcgatctggtcactggtggggagctctttgaagacattgtggcgagagagtactacagcgaggctgatgccagtcactgtatccagcagatcctggaggccgttctccattgtcaccaaatgggggtcgtccacagagacctcaagccggagaacctgcttctggccagcaagtgcaaaggggctgcagtgaagctggcagacttcggcctagctatcgaggtgcagggggaccagcaggcatggtttggtttcgctggcacaccaggctacctgtcccctgaggtccttcgcaaagaggcgtatggcaagcctgtggacatctgggcatgtggggtgatcctgtacatcctgctcgtgggctacccacccttctgggacgaggaccagcacaagctgtaccagcagatcaaggctggtgcctatgacttcccgtcccctgagtgggacaccgtcactcctgaagccaaaaacctcatcaaccagatgctgaccatcaaccctgccaagcgcatcacagcccatgaggccctgaagcacccgtgggtctgccaacgctccacggtagcatccatgatgcacagacaggagactgtggagtgtctgaaaaagttcaatgccaggagaaagctcaagggagccatcctcaccaccatgctggccacacggaatttctcagcccggaagcaggagatcattaagaccacggagcagctcatcgaggccgtcaacaacggtgactttgaggcctacgcgaaaatctgtgacccagggctgacctcgtttgagcctgaagcactgggcaacctggttgaagggatggacttccacagattctacttcgagaacctgctggccaagaacagcaagccgatccacacgaccatcctgaacccacacgtgcacgtcattggagaggatgccgcctgcatcgcttacatccggctcacgcagtacattgacgggcagggccggccccgcaccagccagtctgaggagacccgcgtgtggcaccgccgcgacggcaagtggcagaacgtgcacttccactgctcgggcgcgcctgtggccccgctgcagtgaagagctgcgccctggtttcgccggacagagttggtgtttggagcccgactgccctcgggcacacggcctgcctgtcgcatgtttgtgtctgcctcgttccctcccctggtgcctgtgtctgcagaaaaacaagaccagatgtgatttgttaaaaaaaaacaaaaaaaaaaaaaaaaaaaacaagatgacgacgacaaccacaaaaaaaattgacatcagatgaaatgaaaaaa

SEQ ID NO: 2012 - protein, 449 aa, Homo sapiens
MATTVTCTRFTDEYQLYEDIGKGAFSVVRRCVKLCTGHEYAAKIINTKKLSARDHQKLEREARICRLLKHSNIVRLHDSISEEGFHYLVFDLVTGGELFEDIVAREYYSEADASHCIQQILEAVLHCHQMGVVHRDLKPENLLLASKCKGAAVKLADFGLAIEVQGDQQAWFGFAGTPGYLSPEVLRKEAYGKPVDIWACGVILYILLVGYPPFWDEDQHKLYQQIKAGAYDFPSPEWDTVTPEAKNLINQMLTINPAKRITAHEALKHPWVCQRSTVASMMHRQETVECLKKFNARRKLKGAILTTMLATRNFSARKQEIIKTTEQLIEAVNNGDFEAYAKICDPGLTSFEPEALGNLVEGMDFHRFYFENLLAKNSKPIHTTILNPHVHVIGEDAACIAYIRLTQYIDGQGRPRTSQSEETRVWHRRDGKWQNVHFHCSGAPVAPLQ

SEQ ID NO: 2013 - DNA, 3572 bp, Homo sapiens
ctgaggcggcgctgtgtgtgtgaagcgtacctagggcgggaggcgacatggagacaggggcggccgagctgtatgaccaggcccttttgggcatcctgcagcacgtgggcaacgtccaggatttcctgcgcgttctctttggcttcctctaccgcaagacagacttctatcgcttgctgcgccacccatcggaccgcatgggcttcccgcccggggccgcgcaggccttggtgctgcaggtattcaaaacctttgaccacatggcccgtcaggatgatgagaagagaaggcaggaacttgaagagaaaatcagaagaaaggaagaggaagaggccaagactgtgtcagctgctgcagctgagaaggagccagtcccagttccagtccaggaaatagagattgactccaccacagaattggatgggcatcaggaagtagagaaagtgcagcctccaggccctgtgaaggaaatggcccatggttcacaggaggcagaagctccaggagcagttgctggtgctgctgaagtccctagggaaccaccaattcttcccaggattcaggagcagttccagaaaaatcccgacagttacaatggtgctgtccgagagaactacacctggtcacaggactatactgacctggaggtcagggtgccagtacccaagcacgtggtgaagggaaagcaggtctcagtggcccttagcagcagctccattcgtgtggccatgctggaggaaaatggggagcgcgtcctcatggaagggaagctcacccacaagatcaacactgagagttctctctggagtctcgagcccgggaagtgcgttttggtgaacctgagcaaggtgggcgagtattggtggaacgccatcctggagggagaagagcccatcgacattgacaagatcaacaaggagcgctccatggccaccgtggatgaggaggaacaggcggtgttggacaggcttacctttgactaccaccagaagctgcagggcaagccacagagccatgagctgaaagtccatgagatgctgaagaaggggtgggatgctgaaggttctcccttccgaggccagcgattcgaccctgccatgttcaacatctccccgggggctgtgcagttttaatgaccagaaggaaaggaaaccctcgccggtggggaggcagagccttatcctcggctgcccttcttggctccctgcattccagggacttgctcgtcttgtttacccctagccatcctttctttcaagggtgaaccaggccttccaccctgaccttgcatctccagactgttccagagaaggtgcggggccagctgctatgtggtggccgctgtggctgacactgagtgaaggtgtttgaaatgcaggagaggatatcccagcaaattgggatcacatgcttttgtctccacagcaaccagccactgcaggcagcatgtctttcctcccctgctctctgcttgctgttgttttgacgctattctgcttgcatgtcttctggttgggatgtggagttgttgctggactctcaggcgaagctgaagtcattgaagtgtgtgaagctctgtgcttgcatgagggcaagcaaggaatggctgtgcctgaggctgctctgggaaactccttgccccttgacctcttttgagagcattcacgtggtcttcttgctcatccccttataaatgtgctttgcctgcctcagcctcatggtcagagcagtggagactggagccctgtttgcacgttctagttgttcggagaaagcctaggttctgggctcaggtccagatgcagcggggattctgttctctgactgtggcgaccttgctttggttcttgttgaagtgaaccaagcccggccaccacgcatggcatgctgtgcttggctccccataagacgtcctctttgggtgcacggtgtcaaagtgtgggcaggagtggagagctggtgccctcaggaggagaccacagcatgtccatcagctcagcagagctcgacagccacaagtcctgagaagctttgaccttgaagggcttctgggagaggaggaatttctgcatggggcgtgaaggcacactgtcccaccacaactgaaccagaagagagtgaagactcccctcttcccatcctctgtgccaggtgccagactgtgctccttggaacttatggcccaatcttacctgttctccagggactggtcactgcctcaggacccccaagcctatgccctgagccatggctgctgactgactccagccaaggtgcaaagacgagattatgagacaggtcctcaggcctgtgttccaagtactcacaggggctctgggtgcccatcgccgggagtatggttcagctgccaccggcactgtccatttgcctgtctgtcaagctcagagcatggataagccacacagcagggcagtgcaccctggcaccatgcacggccagcaagaatcaaggcccgcagatgctaagagggcctattgtcaggggaaggtccccgctcctgcacactctctatggatacttgggttgtgggggctctcttggagagtaagtttgtggtttgtttctggtttacagtggtggctgacaccccttgtaagaaagcattcctgggaagtcttctgtgggtccaaacatgttgctccgatcatcacaggagagcaaaaggccctagataccccctttggaatgtgagagtcttgttgtctgatatttgccactgagctggtgaagcccctctaaagagatctcgaccctggggagcagaattcttgtcatctatgaggggtcctgagaaagacttgtcattttttttcctggagttcttcccattgaggtcctaggatttgcacaccactgtcccacaagagctttcctgcctaatgaaaggaggtcttgtggtgtgtgtctcctctcttctctatagttcccgagttggcccccattgcagcccccaccctgtgggtagtcttccagaagtgatgcagtggtgtgagatgccctgcaccttgttatttgggagactttgagagtcattcacttccatggtgactagtgtttgttttgcctgattttatattctgtgttgcatttctccccactccctgccctgctttaataaacagcaaaccaatatctaggaagaatgactgagggatagtattgggtattggccccatggcaggaacagccacttgcatctggtcccggtgccacactgcggtgcttggtgtggttgtggagcctgtccctgcgcgccttgctcccgttgagccacgctgtctggtgggtgattctctgccctgagccaccaccctggactggcccagtctccagagctggcacaccctgcctgttttctctttttagacacaacagccgcagtttggccagccactaagtcccaccagctgaggtccgaggaaagcggggtgactcatttcccttgtccagggcccgaggagagtgaggtgtccagcctgcaaagctattccagctccttggtgttggtttgcaataaattggtatttaagcaaaaaaaaaaaaaaaaaaaa

SEQ ID NO: 2014 - protein, 220 aa, Homo sapiens
MAHGSQEAEAPGAVAGAAEVPREPPILPRIQEQFQKNPDSYNGAVRENYTWSQDYTDLEVRVPVPKHVVKGKQVSVALSSSSIRVAMLEENGERVLMEGKLTHKINTESSLWSLEPGKCVLVNLSKVGEYWWNAILEGEEPIDIDKINKERSMATVDEEEQAVLDRLTFDYHQKLQGKPQSHELKVHEMLKKGWDAEGSPFRGQRFDPAMFNISPGAVQF

SEQ ID NO: 2015 - DNA, 1942 bp, Homo sapiens
cccacgcgtccgcccacgcgtccgggtgccactcgcgcgccggccgcgctccgggcttctcttttccctccgacgcgccacggctgcccagacattccggctgccgggtctggagagctccccgaacccctccgcggagaggagcgaggcggcgccagggtggcccccggggcgcgcttggtctcggagaagcggggacgaggccggaggatgagcgactgagggcgacgcgggcactgacgcgagttggggccgcgactaccggcagctgacagcgcgatgagcgactccccagagacgccctagcccggtgtgcgcgccaggcggagcgcgcaggtggggctgggctgttagtggtccgccccacgcgggtcgccggccggcccaggatgggcgctggcaacccgggcccgcgcccgccgctgctacccctgcgcccgctgcgagcccggcgtccggcccgcgccctgcgctcatggacggcggctcccggctggcggcggcgcgcccccgggctgtgaatgcgactcgcccctcggccgcgctccccgcccgcccgcccgccgggacgtggtaggggatgcccagctccactgcgatggcagttggcgcgctctccagttccctcctggtcacctgctgcctgatggtggctctgtgcagtccgagcatcccgctggagaagctggcccaggcaccagagcagccgggccaggagaagcgtgagcacgccactcgggacggcccggggcgggtgaacgagctcgggcgcccggcgagggacgagggcggcagcggccgggactggaagagcaagagcggccgtgggctcgccggccgtgagccgtggagcaagctgaagcaggcctgggtctcccagggcgggggcgccaaggccggggatctgcaggtccggccccgcggggacaccccgcaggcggaagccctggccgcagccgcccaggacgcgattggcccggaactcgcgcccacgcccgagccacccgaggagtacgtgtacccggactaccgtggcaagggctgcgtggacgagagcggcttcgtgtacgcgatcggggagaagttcgcgccgggcccctcggcctgcccgtgcctgtgcaccgaggaggggccgctgtgcgcgcagcccgagtgcccgaggctgcacccgcgctgcatccacgtcgacacgagccagtgctgcccgcagtgcaaggagaggaagaactactgcgagttccggggcaagacctatcagactttggaggagttcgtggtgtctccatgcgagaggtgtcgctgtgaagccaacggtgaggtgctatgcacagtgtcagcgtgtccccagacggagtgtgtggaccctgtgtacgagcctgatcagtgctgtcccatctgcaaaaatggtccaaactgctttgcagaaaccgcggtgatccctgctggcagagaagtgaagactgacgagtgcaccatatgccactgtacttatgaggaaggcacatggagaatcgagcggcaggccatgtgcacgagacatgaatgcaggcaaatgtagacgcttcccagaacacaaactctgactttttctagaacattttactgatgtgaacattctagatgactctgggaactatcagtcaaagaagacttttgatgaggaataatggaaaattgttggtacttttccttttcttgataacagttactacaacagaaggaaatggatatatttcaaaacatcaacaagaactttgggcataaaatccttctctaaataaatgtgctattttcacagtaagtacacaaaagtacactattatatatcaaatgtatttctataatccctccattagagagcttatataagtgttttctatagatgcagattaaaaatgctgtgttgtcaaccgtcaaaaaaaaaaaaaaaaaaaaaaaaaaa

SEQ ID NO: 2016 - protein, 325 aa, Homo sapiens
MPSSTAMAVGALSSSLLVTCCLMVALCSPSIPLEKLAQAPEQPGQEKREHATRDGPGRVNELGRPARDEGGSGRDWKSKSGRGLAGREPWSKLKQAWVSQGGGAKAGDLQVRPRGDTPQAEALAAAAQDAIGPELAPTPEPPEEYVYPDYRGKGCVDESGFVYAIGEKFAPGPSACPCLCTEEGPLCAQPECPRLHPRCIHVDTSQCCPQCKERKNYCEFRGKTYQTLEEFVVSPCERCRCEANGEVLCTVSACPQTECVDPVYEPDQCCPICKNGPNCFAETAVIPAGREVKTDECTICHCTYEEGTWRIERQAMCTRHECRQM

SEQ ID NO: 2017 - DNA, 1177 bp, Homo sapiens
ccgcgcggacggtgggcaggcgacggcggcgtgtggatggaggccttcgcccttggcccagcgcggcggggcaggcggcggacccgggccgccggctccctgctctctcgggccgccatcctcctctttatctccgccttcctggtgcgggtgccctcatcagttggacacttggttcgattaccaagagcttttcgcttgaccaaagattcagtgaaaatagtgggatcaacaagttttccagtgaaagcgtatgtcatgctccatcaaaagagtccacacgtgttatgtgtaacgcaacaactgcgaaatgctgaactgatagacccatcattccaatggtatgggcctaaaggaaaagttgtttcagtagaaaaccgcactgcacaaataacatccacaggaagccttgtattccaaaattttgaggagagtatgagtggaatttatacatgtttcctcgaatataaacctactgtggaagaaattgttaaacgtcttcaactaaaatatgctatatatgcttatcgtgagcctcattattattatcagttcacagctcgatatcatgcagtcccctgcaatagcatttataatatttcttttgagaagaaacttcttcagattttaagcaaactgcttcttgacctttcatgtgaaatttccttacttaagtctgaatgccatcgcgttaaaatgcaaagagctggtttgcaaaatgaattgttctttgcattttcagtttcatctctagacactgaaaaaggacccaagcgatgtacagaccataactgtgaaccttacaaaagactttttaaggctaaaaatctcatagagagattttttaatcaacaagtagaaattcttggcagacgtgcagaacaattacctcaaatatactatattgaaggtactctccaaatggtttggattaatcgctgctttccaggatatggaatgaatgtccagcaacatccaaaatgtcctgagtgctgtgtgatctgcagccctggatcatataacccccgtgatggaattcattgccttcaatgcaatagcagcctggtgtatggagcaaaaacgtgcttataagccattatcttcagttattcagtggtttattaaatgcaaagtatatatttgaaatattaacataataaattattatgccaaaatt

SEQ ID NO: 2018 - protein, 351 aa, Homo sapiens
MEAFALGPARRGRRRTRAAGSLLSRAAILLFISAFLVRVPSSVGHLVRLPRAFRLTKDSVKIVGSTSFPVKAYVMLHQKSPHVLCVTQQLRNAELIDPSFQWYGPKGKVVSVENRTAQITSTGSLVFQNFEESMSGIYTCFLEYKPTVEEIVKRLQLKYAIYAYREPHYYYQFTARYHAVPCNSIYNISFEKKLLQILSKLLLDLSCEISLLKSECHRVKMQRAGLQNELFFAFSVSSLDTEKGPKRCTDHNCEPYKRLFKAKNLIERFFNQQVEILGRRAEQLPQIYYIEGTLQMVWINRCFPGYGMNVQQHPKCPECCVICSPGSYNPRDGIHCLQCNSSLVYGAKTCL

SEQ ID NO: 2019 - DNA, 5616 bp, Homo sapiens
ccccggcgcagcgcggccgcagcagcctccgccccccgcacggtgtgagcgcccgacgcggccgaggcggccggagtcccgagctagccccggcggccgccgccgcccagaccggacgacaggccacctcgtcggcgtccgcccgagtccccgcctcgccgccaacgccacaaccaccgcgcacggccccctgactccgtccagtattgatcgggagagccggagcgagctcttcggggagcagcgatgcgaccctccgggacggccggggcagcgctcctggcgctgctggctgcgctctgcccggcgagtcgggctctggaggaaaagaaagtttgccaaggcacgagtaacaagctcacgcagttgggcacttttgaagatcattttctcagcctccagaggatgttcaataactgtgaggtggtccttgggaatttggaaattacctatgtgcagaggaattatgatctttccttcttaaagaccatccaggaggtggctggttatgtcctcattgccctcaacacagtggagcgaattcctttggaaaacctgcagatcatcagaggaaatatgtactacgaaaattcctatgccttagcagtcttatctaactatgatgcaaataaaaccggactgaaggagctgcccatgagaaatttacaggaaatcctgcatggcgccgtgcggttcagcaacaaccctgccctgtgcaacgtggagagcatccagtggcgggacatagtcagcagtgactttctcagcaacatgtcgatggacttccagaaccacctgggcagctgccaaaagtgtgatccaagctgtcccaatgggagctgctggggtgcaggagaggagaactgccagaaactgaccaaaatcatctgtgcccagcagtgctccgggcgctgccgtggcaagtcccccagtgactgctgccacaaccagtgtgctgcaggctgcacaggcccccgggagagcgactgcctggtctgccgcaaattccgagacgaagccacgtgcaaggacacctgccccccactcatgctctacaaccccaccacgtaccagatggatgtgaaccccgagggcaaatacagctttggtgccacctgcgtgaagaagtgtccccgtaattatgtggtgacagatcacggctcgtgcgtccgagcctgtggggccgacagctatgagatggaggaagacggcgtccgcaagtgtaagaagtgcgaagggccttgccgcaaagtgtgtaacggaataggtattggtgaatttaaagactcactctccataaatgctacgaatattaaacacttcaaaaactgcacctccatcagtggcgatctccacatcctgccggtggcatttaggggtgactccttcacacatactcctcctctggatccacaggaactggatattctgaaaaccgtaaaggaaatcacagggtttttgctgattcaggcttggcctgaaaacaggacggacctccatgcctttgagaacctagaaatcatacgcggcaggaccaagcaacatggtcagttttctcttgcagtcgtcagcctgaacataacatccttgggattacgctccctcaaggagataagtgatggagatgtgataatttcaggaaacaaaaatttgtgctatgcaaatacaataaactggaaaaaactgtttgggacctccggtcagaaaaccaaaattataagcaacagaggtgaaaacagctgcaaggccacaggccaggtctgccatgccttgtgctcccccgagggctgctggggcccggagcccagggactgcgtctcttgccggaatgtcagccgaggcagggaatgcgtggacaagtgcaaccttctggagggtgagccaagggagtttgtggagaactctgagtgcatacagtgccacccagagtgcctgcctcaggccatgaacatcacctgcacaggacggggaccagacaactgtatccagtgtgcccactacattgacggcccccactgcgtcaagacctgcccggcaggagtcatgggagaaaacaacaccctggtctggaagtacgcagacgccggccatgtgtgccacctgtgccatccaaactgcacctacggatgcactgggccaggtcttgaaggctgtccaacgaatgggcctaagatcccgtccatcgccactgggatggtgggggccctcctcttgctgctggtggtggccctggggatcggcctcttcatgcgaaggcgccacatcgttcggaagcgcacgctgcggaggctgctgcaggagagggagcttgtggagcctcttacacccagtggagaagctcccaaccaagctctcttgaggatcttgaaggaaactgaattcaaaaagatcaaagtgctgggctccggtgcgttcggcacggtgtataagggactctggatcccagaaggtgagaaagttaaaattcccgtcgctatcaaggaattaagagaagcaacatctccgaaagccaacaaggaaatcctcgatgaagcctacgtgatggccagcgtggacaacccccacgtgtgccgcctgctgggcatctgcctcacctccaccgtgcagctcatcacgcagctcatgcccttcggctgcctcctggactatgtccgggaacacaaagacaatattggctcccagtacctgctcaactggtgtgtgcagatcgcaaagggcatgaactacttggaggaccgtcgcttggtgcaccgcgacctggcagccaggaacgtactggtgaaaacaccgcagcatgtcaagatcacagattttgggctggccaaactgctgggtgcggaagagaaagaataccatgcagaaggaggcaaagtgcctatcaagtggatggcattggaatcaattttacacagaatctatacccaccagagtgatgtctggagctacggggtgaccgtttgggagttgatgacctttggatccaagccatatgacggaatccctgccagcgagatctcctccatcctggagaaaggagaacgcctccctcagccacccatatgtaccatcgatgtctacatgatcatggtcaagtgctggatgatagacgcagatagtcgcccaaagttccgtgagttgatcatcgaattctccaaaatggcccgagacccccagcgctaccttgtcattcagggggatgaaagaatgcatttgccaagtcctacagactccaacttctaccgtgccctgatggatgaagaagacatggacgacgtggtggatgccgacgagtacctcatcccacagcagggcttcttcagcagcccctccacgtcacggactcccctcctgagctctctgagtgcaaccagcaacaattccaccgtggcttgcattgatagaaatgggctgcaaagctgtcccatcaaggaagacagcttcttgcagcgatacagctcagaccccacaggcgccttgactgaggacagcatagacgacaccttcctcccagtgcctgaatacataaaccagtccgttcccaaaaggcccgctggctctgtgcagaatcctgtctatcacaatcagcctctgaaccccgcgcccagcagagacccacactaccaggacccccacagcactgcagtgggcaaccccgagtatctcaacactgtccagcccacctgtgtcaacagcacattcgacagccctgcccactgggcccagaaaggcagccaccaaattagcctggacaaccctgactaccagcaggacttctttcccaaggaagccaagccaaatggcatctttaagggctccacagctgaaaatgcagaatacctaagggtcgcgccacaaagcagtgaatttattggagcatgaccacggaggatagtatgagccctaaaaatccagactctttcgatacccaggaccaagccacagcaggtcctccatcccaacagccatgcccgcattagctcttagacccacagactggttttgcaacgtttacaccgactagccaggaagtacttccacctcgggcacattttgggaagttgcattcctttgtcttcaaactgtgaagcatttacagaaacgcatccagcaagaatattgtccctttgagcagaaatttatctttcaaagaggtatatttgaaaaaaaaaaaaagtatatgtgaggatttttattgattggggatcttggagtttttcattgtcgctattgatttttacttcaatgggctcttccaacaaggaagaagcttgctggtagcacttgctaccctgagttcatccaggcccaactgtgagcaaggagcacaagccacaagtcttccagaggatgcttgattccagtggttctgcttcaaggcttccactgcaaaacactaaagatccaagaaggccttcatggccccagcaggccggatcggtactgtatcaagtcatggcaggtacagtaggataagccactctgtcccttcctgggcaaagaagaaacggaggggatggaattcttccttagacttacttttgtaaaaatgtccccacggtacttactccccactgatggaccagtggtttccagtcatgagcgttagactgacttgtttgtcttccattccattgttttgaaactcagtatgctgcccctgtcttgctgtcatgaaatcagcaagagaggatgacacatcaaataataactcggattccagcccacattggattcatcagcatttggaccaatagcccacagctgagaatgtggaatacctaaggatagcaccgcttttgttctcgcaaaaacgtatctcctaatttgaggctcagatgaaatgcatcaggtcctttggggcatagatcagaagactacaaaaatgaagctgctctgaaatctcctttagccatcaccccaaccccccaaaattagtttgtgttacttatggaagatagttttctccttttacttcacttcaaaagctttttactcaaagagtatatgttccctccaggtcagctgcccccaaaccccctccttacgctttgtcacacaaaaagtgtctctgccttgagtcatctattcaagcacttacagctctggccacaacagggcattttacaggtgcgaatgacagtagcattatgagtagtgtggaattcaggtagtaaatatgaaactagggtttgaaattgataatgctttcacaacatttgcagatgttttagaaggaaaaaagttccttcctaaaataatttctctacaattggaagattggaagattcagctagttaggagcccaccttttttcctaatctgtgtgtgccctgtaacctgactggttaacagcagtcctttgtaaacagtgttttaaactctcctagtcaatatccaccccatccaatttatcaaggaagaaatggttcagaaaatattttcagcctacagttatgttcagtcacacacacatacaaaatgttccttttgcttttaaagtaatttttgactcccagatcagtcagagcccctacagcattgttaagaaagtatttgatttttgtctcaatgaaaataaaactatattcatttccactctaaaaaaaaaaaaaaaaa

SEQ ID NO: 2020 - protein, 1210 aa, Homo sapiens [sequence omitted]

SEQ ID NO: 2021 - DNA, 2239 bp, Homo sapiens
ccccggcgcagcgcggccgcagcagcctccgccccccgcacggtgtgagcgcccgacgcggccgaggcggccggagtcccgagctagccccggcggccgccgccgcccagaccggacgacaggccacctcgtcggcgtccgcccgagtccccgcctcgccgccaacgccacaaccaccgcgcacggccccctgactccgtccagtattgatcgggagagccggagcgagctcttcggggagcagcgatgcgaccctccgggacggccggggcagcgctcctggcgctgctggctgcgctctgcccggcgagtcgggctctggaggaaaagaaagtttgccaaggcacgagtaacaagctcacgcagttgggcacttttgaagatcattttctcagcctccagaggatgttcaataactgtgaggtggtccttgggaatttggaaattacctatgtgcagaggaattatgatctttccttcttaaagaccatccaggaggtggctggttatgtcctcattgccctcaacacagtggagcgaattcctttggaaaacctgcagatcatcagaggaaatatgtactacgaaaattcctatgccttagcagtcttatctaactatgatgcaaataaaaccggactgaaggagctgcccatgagaaatttacaggaaatcctgcatggcgccgtgcggttcagcaacaaccctgccctgtgcaacgtggagagcatccagtggcgggacatagtcagcagtgactttctcagcaacatgtcgatggacttccagaaccacctgggcagctgccaaaagtgtgatccaagctgtcccaatgggagctgctggggtgcaggagaggagaactgccagaaactgaccaaaatcatctgtgcccagcagtgctccgggcgctgccgtggcaagtcccccagtgactgctgccacaaccagtgtgctgcaggctgcacaggcccccgggagagcgactgcctggtctgccgcaaattccgagacgaagccacgtgcaaggacacctgccccccactcatgctctacaaccccaccacgtaccagatggatgtgaaccccgagggcaaatacagctttggtgccacctgcgtgaagaagtgtccccgtaattatgtggtgacagatcacggctcgtgcgtccgagcctgtggggccgacagctatgagatggaggaagacggcgtccgcaagtgtaagaagtgcgaagggccttgccgcaaagtgtgtaacggaataggtattggtgaatttaaagactcactctccataaatgctacgaatattaaacacttcaaaaactgcacctccatcagtggcgatctccacatcctgccggtggcatttaggggtgactccttcacacatactcctcctctggatccacaggaactggatattctgaaaaccgtaaaggaaatcacagggtttttgctgattcaggcttggcctgaaaacaggacggacctccatgcctttgagaacctagaaatcatacgcggcaggaccaagcaacatggtcagttttctcttgcagtcgtcagcctgaacataacatccttgggattacgctccctcaaggagataagtgatggagatgtgataatttcaggaaacaaaaatttgtgctatgcaaatacaataaactggaaaaaactgtttgggacctccggtcagaaaaccaaaattataagcaacagaggtgaaaacagctgcaaggccacaggccaggtctgccatgccttgtgctcccccgagggctgctggggcccggagcccagggactgcgtctcttgccggaatgtcagccgaggcagggaatgcgtggacaagtgcaaccttctggagggtgagccaagggagtttgtggagaactctgagtgcatacagtgccacccagagtgcctgcctcaggccatgaacatcacctgcacaggacggggaccagacaactgtatccagtgtgcccactacattgacggcccccactgcgtcaagacctgcccggcaggagtcatgggagaaaacaacaccctggtctggaagtacgcagacgccggccatgtgtgccacctgtgccatccaaactgcacctacgggtcctaataaatcttcactgtctgactttagtctcccactaaaactgcatttcctttctacaatttcaatttctccctttgcttcaaataaagtcctgacactattcatttga

SEQ ID NO: 2022 - protein, 628 aa, Homo sapiens
MRPSGTAGAALLALLAALCPASRALEEKKVCQGTSNKLTQLGTFEDHFLSLQRMFNNCEVVLGNLEITYVQRNYDLSFLKTIQEVAGYVLIALNTVERIPLENLQIIRGNMYYENSYALAVLSNYDANKTGLKELPMRNLQEILHGAVRFSNNPALCNVESIQWRDIVSSDFLSNMSMDFQNHLGSCQKCDPSCPNGSCWGAGEENCQKLTKIICAQQCSGRCRGKSPSDCCHNQCAAGCTGPRESDCLVCRKFRDEATCKDTCPPLMLYNPTTYQMDVNPEGKYSFGATCVKKCPRNYVVTDHGSCVRACGADSYEMEEDGVRKCKKCEGPCRKVCNGIGIGEFKDSLSINATNIKHFKNCTSISGDLHILPVAFRGDSFTHTPPLDPQELDILKTVKEITGFLLIQAWPENRTDLHAFENLEIIRGRTKQHGQFSLAVVSLNITSLGLRSLKEISDGDVIISGNKNLCYANTINWKKLFGTSGQKTKIISNRGENSCKATGQVCHALCSPEGCWGPEPRDCVSCRNVSRGRECVDKCNLLEGEPREFVENSECIQCHPECLPQAMNITCTGRGPDNCIQCAHYIDGPHCVKTCPAGVMGENNTLVWKYADAGHVCHLCHPNCTYGS

SEQ ID NO: 2023 - DNA, 1595 bp, Homo sapiens
ccccggcgcagcgcggccgcagcagcctccgccccccgcacggtgtgagcgcccgacgcggccgaggcggccggagtcccgagctagccccggcggccgccgccgcccagaccggacgacaggccacctcgtcggcgtccgcccgagtccccgcctcgccgccaacgccacaaccaccgcgcacggccccctgactccgtccagtattgatcgggagagccggagcgagctcttcggggagcagcgatgcgaccctccgggacggccggggcagcgctcctggcgctgctggctgcgctctgcccggcgagtcgggctctggaggaaaagaaagtttgccaaggcacgagtaacaagctcacgcagttgggcacttttgaagatcattttctcagcctccagaggatgttcaataactgtgaggtggtccttgggaatttggaaattacctatgtgcagaggaattatgatctttccttcttaaagaccatccaggaggtggctggttatgtcctcattgccctcaacacagtggagcgaattcctttggaaaacctgcagatcatcagaggaaatatgtactacgaaaattcctatgccttagcagtcttatctaactatgatgcaaataaaaccggactgaaggagctgcccatgagaaatttacaggaaatcctgcatggcgccgtgcggttcagcaacaaccctgccctgtgcaacgtggagagcatccagtggcgggacatagtcagcagtgactttctcagcaacatgtcgatggacttccagaaccacctgggcagctgccaaaagtgtgatccaagctgtcccaatgggagctgctggggtgcaggagaggagaactgccagaaactgaccaaaatcatctgtgcccagcagtgctccgggcgctgccgtggcaagtcccccagtgactgctgccacaaccagtgtgctgcaggctgcacaggcccccgggagagcgactgcctggtctgccgcaaattccgagacgaagccacgtgcaaggacacctgccccccactcatgctctacaaccccaccacgtaccagatggatgtgaaccccgagggcaaatacagctttggtgccacctgcgtgaagaagtgtccccgtaattatgtggtgacagatcacggctcgtgcgtccgagcctgtggggccgacagctatgagatggaggaagacggcgtccgcaagtgtaagaagtgcgaagggccttgccgcaaagtgtgtaacggaataggtattggtgaatttaaagactcactctccataaatgctacgaatattaaacacttcaaaaactgcacctccatcagtggcgatctccacatcctgccggtggcatttaggggtgactccttcacacatactcctcctctggatccacaggaactggatattctgaaaaccgtaaaggaaatcacaggtttgagctgaattatcacatgaatataaatgggaaatcagtgttttagagagagaacttttcgacatatttcctgttcccttggaataaaaacatttcttctgaaattttaccgttaaaaaaaaaaaaaaaaaaaaaaaaa

SEQ ID NO: 2024 - protein, 405 aa, Homo sapiens
MRPSGTAGAALLALLAALCPASRALEEKKVCQGTSNKLTQLGTFEDHFLSLQRMFNNCEVVLGNLEITYVQRNYDLSFLKTIQEVAGYVLIALNTVERIPLENLQIIRGNMYYENSYALAVLSNYDANKTGLKELPMRNLQEILHGAVRFSNNPALCNVESIQWRDIVSSDFLSNMSMDFQNHLGSCQKCDPSCPNGSCWGAGEENCQKLTKIICAQQCSGRCRGKSPSDCCHNQCAAGCTGPRESDCLVCRKFRDEATCKDTCPPLMLYNPTTYQMDVNPEGKYSFGATCVKKCPRNYVVTDHGSCVRACGADSYEMEEDGVRKCKKCEGPCRKVCNGIGIGEFKDSLSINATNIKHFKNCTSISGDLHILPVAFRGDSFTHTPPLDPQELDILKTVKEITGLS

SEQ ID NO: 2025 - DNA, 2865 bp, Homo sapiens
ccccggcgcagcgcggccgcagcagcctccgccccccgcacggtgtgagcgcccgacgcggccgaggcggccggagtcccgagctagccccggcggccgccgccgcccagaccggacgacaggccacctcgtcggcgtccgcccgagtccccgcctcgccgccaacgccacaaccaccgcgcacggccccctgactccgtccagtattgatcgggagagccggagcgagctcttcggggagcagcgatgcgaccctccgggacggccggggcagcgctcctggcgctgctggctgcgctctgcccggcgagtcgggctctggaggaaaagaaagtttgccaaggcacgagtaacaagctcacgcagttgggcacttttgaagatcattttctcagcctccagaggatgttcaataactgtgaggtggtccttgggaatttggaaattacctatgtgcagaggaattatgatctttccttcttaaagaccatccaggaggtggctggttatgtcctcattgccctcaacacagtggagcgaattcctttggaaaacctgcagatcatcagaggaaatatgtactacgaaaattcctatgccttagcagtcttatctaactatgatgcaaataaaaccggactgaaggagctgcccatgagaaatttacaggaaatcctgcatggcgccgtgcggttcagcaacaaccctgccctgtgcaacgtggagagcatccagtggcgggacatagtcagcagtgactttctcagcaacatgtcgatggacttccagaaccacctgggcagctgccaaaagtgtgatccaagctgtcccaatgggagctgctggggtgcaggagaggagaactgccagaaactgaccaaaatcatctgtgcccagcagtgctccgggcgctgccgtggcaagtcccccagtgactgctgccacaaccagtgtgctgcaggctgcacaggcccccgggagagcgactgcctggtctgccgcaaattccgagacgaagccacgtgcaaggacacctgccccccactcatgctctacaaccccaccacgtaccagatggatgtgaaccccgagggcaaatacagctttggtgccacctgcgtgaagaagtgtccccgtaattatgtggtgacagatcacggctcgtgcgtccgagcctgtggggccgacagctatgagatggaggaagacggcgtccgcaagtgtaagaagtgcgaagggccttgccgcaaagtgtgtaacggaataggtattggtgaatttaaagactcactctccataaatgctacgaatattaaacacttcaaaaactgcacctccatcagtggcgatctccacatcctgccggtggcatttaggggtgactccttcacacatactcctcctctggatccacaggaactggatattctgaaaaccgtaaaggaaatcacagggtttttgctgattcaggcttggcctgaaaacaggacggacctccatgcctttgagaacctagaaatcatacgcggcaggaccaagcaacatggtcagttttctcttgcagtcgtcagcctgaacataacatccttgggattacgctccctcaaggagataagtgatggagatgtgataatttcaggaaacaaaaatttgtgctatgcaaatacaataaactggaaaaaactgtttgggacctccggtcagaaaaccaaaattataagcaacagaggtgaaaacagctgcaaggccacaggccaggtctgccatgccttgtgctcccccgagggctgctggggcccggagcccagggactgcgtctcttgccggaatgtcagccgaggcagggaatgcgtggacaagtgcaaccttctggagggtgagccaagggagtttgtggagaactctgagtgcatacagtgccacccagagtgcctgcctcaggccatgaacatcacctgcacaggacggggaccagacaactgtatccagtgtgcccactacattgacggcccccactgcgtcaagacctgcccggcaggagtcatgggagaaaacaacaccctggtctggaagtacgcagacgccggccatgtgtgccacctgtgccatccaaactgcacctacgggccaggaaatgagagtctcaaagccatgttattctgcctttttaaactatcatcctgtaatcaaagtaatgatggcagcgtgtcccaccagagcgggagcccagctgctcaggagtcatgcttaggatggatcccttctcttctgccgtcagagtttcagctgggttggggtggatgcagccacctccatgcctggccttctgcatctgtgatcatcacggcctcctcctgccactgagcctcatgccttcacgtgtctgttccccccgcttttcctttctgccacccctgcacgtgggccgccaggttcccaagagtatcctacccatttccttccttccactccctttgccagtgcctctcaccccaactagtagctaaccatcacccccaggactgacctcttcctcctcgctgccagatgattgttcaaagcacagaatttgtcagaaacctgcagggactccatgctgccagccttctccgtaattagcatggccccagtccatgcttctagccttggttccttctgcccctctgtttgaaattctagagccagctgtgggacaattatctgtgtcaaaagccagatgtgaaaacatctcaataacaaactggctgctttgttcaatgctagaacaacgcctgtcacagagtagaaactcaaaaatatttgctgagtgaatgaacaaatgaataaatgcataataaataattaaccaccaatccaacatccaga

SEQ ID NO: 2026 - protein, 705 aa, Homo sapiens
MRPSGTAGAALLALLAALCPASRALEEKKVCQGTSNKLTQLGTFEDHFLSLQRMFNNCEVVLGNLEITYVQRNYDLSFLKTIQEVAGYVLIALNTVERIPLENLQIIRGNMYYENSYALAVLSNYDANKTGLKELPMRNLQEILHGAVRFSNNPALCNVESIQWRDIVSSDFLSNMSMDFQNHLGSCQKCDPSCPNGSCWGAGEENCQKLTKIICAQQCSGRCRGKSPSDCCHNQCAAGCTGPRESDCLVCRKFRDEATCKDTCPPLMLYNPTTYQMDVNPEGKYSFGATCVKKCPRNYVVTDHGSCVRACGADSYEMEEDGVRKCKKCEGPCRKVCNGIGIGEFKDSLSINATNIKHFKNCTSISGDLHILPVAFRGDSFTHTPPLDPQELDILKTVKEITGFLLIQAWPENRTDLHAFENLEIIRGRTKQHGQFSLAVVSLNITSLGLRSLKEISDGDVIISGNKNLCYANTINWKKLFGTSGQKTKIISNRGENSCKATGQVCHALCSPEGCWGPEPRDCVSCRNVSRGRECVDKCNLLEGEPREFVENSECIQCHPECLPQAMNITCTGRGPDNCIQCAHYIDGPHCVKTCPAGVMGENNTLVWKYADAGHVCHLCHPNCTYGPGNESLKAMLFCLFKLSSCNQSNDGSVSHQSGSPAAQESCLGWIPSLLPSEFQLGWGGCSHLHAWPSASVIITASSCH

SEQ ID NO: 2027 - DNA, 210 bp, Homo sapiens
atgctccttctggatcctaagcccactgacctgaccaccagtcacttggcccttgtccacatcatgatgctgctcaccattgtgttcttggtgtctccagacctttttgagtcccttcattttgacttcaagtgtaagacgcttttctacctgagcagggtgatgagggacctctgcgtctgcaccacctgcctcctgagcacgctctag

SEQ ID NO: 2028 - protein, 69 aa, Homo sapiens
MLLLDPKPTDLTTSHLALVHIMMLLTIVFLVSPDLFESLHFDFKCKTLFYLSRVMRDLCVCTTCLLSTL

SEQ ID NO: 2029 - DNA, 3934 bp, Homo sapiens
gcttctctgcgcccagagctccagtccttctcttcactgctctgcgtcctctgctcctggaggccaagcctctgtggccttgtgtcctgcaagtattcgcagatttatggctaaaagaccgggaccccctggaagccgagaaatgggactgttgacattcagagacatagctatagaattttctctggcggaatggcaatgcctggatcatgctcagcagaatttatatagagatgtgatgttagagaactacagaaacctggtctccctgggtattgctgtctctaagccagacttgatcacctgtctggagcaaaataaagagccccagaatataaagagaaatgagatggtagccaaacacccagttacatgttctcatttcacccaagaccttcagtcagagcagggcataaaagattcactccaaaaagtgatactgagaagatatggaaaatgtggacaggaggatttacaagtaaaaaaatgctgtaaaagtgtaggtgagtgtgaggtgcacaaaggaggttataattatgttaaccaatgtttgtcagctacccaaaacaaaacatttcagactcataaatgcgtcaaagtctttggtaaattttcaaattccaatagacacaagacaagacatactggaaagaaacatttcaaatgtaaaaacgatggcaaatcattttgcatgctttcacgcctaaatcaacatcagataattcatactagggagaagtcttacaaatgtgaagaatgtggcaaatcctttaactgctcttcaacccttactagacataaaagaattcatactggagagaaaccctacagatgtgaggaatgtggcaaagcttttagctggtctgcatcccttactaaacataagagaattcatactggagagaaaccttacacatgtgaagaacgtggcaaagtctttagccgctcaacacttactaactacaagagaattcatactggagagaaaccctacacatgtgaagaatgtggcaaagcctttagccgctcttcaacacttactaaccacaagagaattcatactggagagagaccctacaaatgtgaagaatgtggcaaagcctttagcttatcctcaacccttaagaaacataagatagttcatactggggagaaactctacacatgtgaagaatgtgggaaagcctttaccttctcctcaactctaaatactcataagaggattcatactggagagaaaccctacacttgtgaagaatgtggcaaagcctttagcttaccctcaaccttcacttaccacaagagaactcatactggagagaaaccctacaaatgtgaagaatgtggcaaagcctttaactgctcctcaacccttaagaaacataagataattcatactggagagaaactctacaaatgtaaagaatgtgggaaagcctttaccttctcctcaactctaaatactcataagaggattcatactggagagaaaccctacaaatgtgaagaatgtgaccaaacttttaagtggcattcaagtcttgctaatcataagaatatgcatactggagagaaaccctacaaatatgaataatgtggtaaagtccagccctcaggccttataatacataaaataatttatactggaaaaaatcactacaagtgtggagaatgtggccaattctttaaccagttccaaaccactgctgtccataagataattcatattggacaaaagtcttataaatgtaaaaaaaaaagtaacagcctgggtgacagagcaagaatccatcttaaaaaaaaaaaaaaagcgtaaatgtgattactgtaaaaagacctttcagaaaacataggcctttaaagcaaagactatttattctaaagacaaacattaaaacataaagaggattgtgtagtacctttatttgtattacggattttattgtacacattttatatcaaaggaaaaccctgaaacagatgctcaaactttgttgaacatcggagaatttatattggagagaaagtgtaaatgaatgtcaaaaaatatttgttcaaaaactacagtttagaaaacactagtttatactaaaaaaatatttttgcagatgcagtaaatggggaaaatatgtttaatcaaaaattaagtctacataaacatttgaggattcacagtagaaagaatgaaggtgctgaaacttcagacattacactaaatcagagtgttgagtgtaaaaaagatataaatctaacaatataaatttaaagaagtagatttatttggagatttataattacattcgaggtatgcttctttctttgtaaaaaaaaatatagattttctgaaaagcaaatagtaatgtaactcacatttcaaattacttcatgttgatcctttcttcccattgtttctgtgaaagtattggaccaattgttgaatcagagatatgagattgttttttataggtgtccattattcatgaactttcctatggatgagtaaggacattaagttgtaagatgcataatgaaaatctaaatggagaggttctttgtggttgacttataacattgttttagtgatgtataaggcgagcgttcagagtaatattctaaattctagtgaggaaaacctttgaacgtcagtagtaaattattttatcaattgtacctttatgtaaacaaagttgtttttaatgagctaaaactattgtgctttgaaagaagtattaagctgccattgactctatcgtgtctcatcttaaggttctgcgtaaaagatggtgacaatatactatttgttaatgtaggggaatgacatcactagtagtctcttttttgccagtgtttttgtttgtttgttttgagactaagtcttactctgtcacccagactggggtgcagtggtgcgatctcagctcactgcaacctccacctcctgggtccaagtgattctcctgcttcagcctcacaagtagctggaactagaggcaggcaccaccactcctggctaatttttgtatttttagtagagatgaggtttccccatgttggccaggctggtctcaaactcctgacctcaggtgatacacccacctcggtgtaccgaagtgctgggattacaggcatgagccaccatgcctggcctactagaggttttacacagcaaacaagttgaagaattttgttcccataggacaaatttgtacttttttaccttatttaatttttttttaatttttgtgggtagtgtgcatacacacttatggcatatatgagatatgttaacacatgcacataatatttaatgatcacaacagagtaaatgaggcattcatcaccttgagcatgtatttatcctttgtattacaaacaatcccattatacagttttagttatttcaatatgtgcaattgaattactattaaccacagggtcattttatgatcataaaaattacatgagtataattaatacccatacatttctgagtcttgattaaatatttttaaaattttgttttataaattttttgcacatgtggcatctctgctgacaaacaaaaacagacttttagtttcaatttacatagagttacatatacaaatatattactctaaagatataccagccgagcacagtggctcccagcattttgggagcctgaggtgggaggatcatttgaggttaggagttcaagaccagcctggccaacatggtgaaaccccatctctactaaaaatacaaaaaattagctgggcatggtggtgcatgcccatggtcccagttactcaggaggctgaggcaggagaattgcttgaacctcggaggtggaggtagcagtgagctgagatggtgctactgcactccagcctgggtgaaagagcgagaaaccatctcaaaaaaaaaaataaataaataaaagatatacctt

SEQ ID NO: 2030 - protein, 495 aa, Homo sapiens
MAKRPGPPGSREMGLLTFRDIAIEFSLAEWQCLDHAQQNLYRDVMLENYRNLVSLGIAVSKPDLITCLEQNKEPQNIKRNEMVAKHPVTCSHFTQDLQSEQGIKDSLQKVILRRYGKCGQEDLQVKKCCKSVGECEVHKGGYNYVNQCLSATQNKTFQTHKCVKVFGKFSNSNRHKTRHTGKKHFKCKNDGKSFCMLSRLNQHQIIHTREKSYKCEECGKSFNCSSTLTRHKRIHTGEKPYRCEECGKAFSWSASLTKHKRIHTGEKPYTCEERGKVFSRSTLTNYKRIHTGEKPYTCEECGKAFSRSSTLTNHKRIHTGERPYKCEECGKAFSLSSTLKKHKIVHTGEKLYTCEECGKAFTFSSTLNTHKRIHTGEKPYTCEECGKAFSLPSTFTYHKRTHTGEKPYKCEECGKAFNCSSTLKKHKIIHTGEKLYKCKECGKAFTFSSTLNTHKRIHTGEKPYKCEECDQTFKWHSSLANHKNMHTGEKPYKYE

SEQ ID NO: 2031 - DNA, 4802 bp, Homo sapiens
tgggaaataaagtcatttgtatgtttttctctcttgcacagcctaaaatgaccaatgtgtgatttcagtggaataaatggcgcccaaagtcacagatgctatagtctggtatcaaaagaaggagtttctctctgtggccaccaccgccccaggcccacagcaagtactgcctggctactgccagtgttcactcaaggaccaagggctcttcattcagtgtttgattggagcatatgatcaacaaatatgggaaaaatctgttgaacagagagaaatcaagtttattaaactggggctaaggaataaaccaaagaaaacagcacatgtgaaaccagacctcatagatgttgatcttgtaagagggtctgcatttgcaaaggcaaagcctgaaagtccttggacttctctgaccagaaagggaattgttcgagttgtatttttcccctttttcttccggtggtggttacaagtaacatcaaaggtcatctttttctggcttcttgtcctttatcttcttcaagttgctgcaatagtattattctgctccacttctagcccacacagcatacctctgacagaggtgattgggccgatatggctgatgctgctcctgggaactgtgcattgccagattgtttccacaagaacacccaaacctcctctaagtacagggggtaaaagaagaaggaaattaagaaaagcagcccatttggaagtacatagggaaggagatggttctagtaccacagataacacacaagagggagcagttcagaaccacggtacaagcacctctcacagcgttggcactgtcttcagagatctctggcatgctgctttctttttatcaggatcaaagaaagcaaagaattcaattgataaatcaactgaaactgacaatggctatgtatcccttgatgggaagaagactgttaaaagcggtgaagatggaatacaaaaccatgaacctcagtgtgaaactattcgaccagaagagacagcctggaacacaggaacactgaggaatggtcctagcaaagatacccaaaggacaataacaaatgtctctgatgaagtctccagtgaggaaggtcctgaaacaggatactcattacgtcgtcatgtggacaggacttctgaaggtgttcttcggaatagaaagtcacaccattataagaaacattaccctaatgaggacgcccctaaatcgggtactagttgcagctctcgctgttcaagttccagacaggattctgagagtgcaaggccagaatctgaaacagaagatgtgttatgggaagacttgttacattgtgcagaatgccattcatcttgtaccagtgagacagatgtggaaaatcatcagattaatccatgtgtgaaaaaagaatatagagatgacccttttcatcagagtcatttgccctggctccatagttcccacccaggattagaaaaaataagtgctatagtatgggaaggtaatgattgtaagaaagcagacatgtctgtacttgaaatcagtggaatgataatgaacagagtgaacagccatataccaggaataggataccagatttttggaaatgcagtctctctcatactgggtttaactccatttgttttccgactttctcaagctacagacttggaacaactcacagcacattctgcttcagaactttatgtgattgcatttggttctaatgaagatgtcatagttctttctatggttataataagttttgtggttcgcgtgtctcttgtgtggattttcttttttttgctctgtgtagcagaaagaacttataaacagcgattactttttgcaaaactctttggacatttaacatctgcaaggagggctcgaaaatctgaggttcctcatttccggttgaagaaagtacagaatataaaaatgtggctatctctccgttcctatcttaagcgtcgaggtcctcagcgatcagttgatgtaatagtttcatctgctttcttattgactatctcagttgtatttatctgttgtgcccagctacttcatgtacacgagatcttccttgattgtcactacaattgggaattggtaatctggtgcatctcgttaacactttttctcctaagatttgttacccttggatcagaaacaagtaaaaaatatagtaatacctcaatattacttactgaacagataaacctctacttgaagatggagaaaaaacctaacaaaaaggaggaactgacactagtgaataatgttttaaaactggctactaaactgctaaaggagttggacagtccttttagattatatgggcttacaatgaatccgctgctttataacatcacccaggttgttatcctgtcagctgtttctggtgttatcagtgacttgcttggatttaatttaaagctatggaagattaagtcatgacaattcaaagaaaagaagatgtagcctcttttccagaataagagtactgactaagctgcctgaaagcttgtcactgattctttgcttcaggagtctcagctagggagttgaagtgtttacatcagactgtcttgtgcaattcttatatttattttactggttcacttttttttacatttattttagtctttatatttttatttttaagcattgatgtacttagttgttgaaagggtgatgaaactgatatccagatacttgagatcctggtaattggtcataaataattggcaaaataacaaattgtgaaaatagaagccattgctcagcaccgtttctccatcaatgccgtgaacttgccttacttgaggaaaaattctttaactttggaatattgcattgaactcagctatacacataaaacattttctttggtaaatcaagatccagtcagggtttctcttgaattattttggaacaatgccaggatccaaactgattaagttacagtttaagcacccttcagtattaatatatacggtattatataacaggtcaacaagtgctctttgatgttaaaacttgtaatagagcaataattgtaaatggttaccatactgtaagatattttgataaaaattaactagtagtacttgtatttatttgaaacactgggctgtttgcacagctccaactgtgcatgctcaaaatgtgcactttttaaaattgttacttttaatgcgtatctttatatgggatctgttatagtatactagggcatgatatggtatccttttgagtgaggtatatactcatctcacaagtgaagtgcctactgatattactaaagtacattatgtttactcaagtaaataattttctccccatggtacactctagtgtaggctattcataccacactgaaatgaacaactgaagaataaggctaagaaccaataaaatatttctctaattgctagttgtaaaactgtatccaaattttcagaaaagacagcttcagcttgcaaattctatcctctaaacttatctggtgcattctccccaccccacccccattatataagggctattttagatgcttttaacctccccaacaaataatttgccaagtgtccaatgagaacttatcatgttggtgtgttaggtaaatcgggcaaatatgatagtgtcttacattgggccttgattttaagttgttatatttgtacaatcgagtattttagaaattacatgaaacatgaaacagtttttgcaatttttttttaaactgggcatctggtttctaaaaatttatttgaaacaatctagaattttcttggtgcaaagtgtatcatgtggaatatcctcatatttttaccatattttaagaactttaagacgattaattgtaaataatttatttgattggtgcagttctaatccctaaatcataatcttaaaatcaggaatgtgtggagaacagagccatgtcatatcactttgctcttaccattccttttgatcagcctcaattcagcctcattgtgtagtatgttttttctttctatgaaaaacaacagaaagcatttcattttatttgcctatgttcaaatatgtttaataatgaccaaagtgcattctgagttttttcaaggaatgtaatactggagctttaagaacatacttagtttctcatgtgaaaacttaggctttgtctgatgtttttccttcctctattgtctaatgttgaggttgtttttaggaattatgttttataaactttttcaatataaggtacatgcctatacagaacttaacattttgcacagaatatatcaaatatattttgagaaaaaaagtacggcatgagttctgttaggaataaaagatgaaactattgtatctcacaaaaaatcttatttcagaatggaaatatttttgagaaaagtagctgagcatactggtttaagaaaatgcttgttttagattgaggttaacttagagttgggagttgatttattaagtacagtatacctctcaacagtttataaataatatgttgaattatgtcagtgtgggcagcagtagaatactaaaaggaaaatgtcatgttaagcaatttcagaacattaactgaactattttcaaagcagaaaaattgacattgctgcctttaagaataccatgaatgtaagaaattgaaagaaattgtaaaatatcacataatatagaaatggcagttcaaagagaattgtggcagatgttgtgtgtgaactgttgtttctttgccacatgtgttgtatttgaaagttttacagtaagtttaaaataaaacattctgtgaccaaaaaaaaaaaaaaaaaaaaaa

SEQ ID NO: 2032 - protein, 785 aa, Homo sapiens
MAPKVTDAIVWYQKKEFLSVATTAPGPQQVLPGYCQCSLKDQGLFIQCLIGAYDQQIWEKSVEQREIKFIKLGLRNKPKKTAHVKPDLIDVDLVRGSAFAKAKPESPWTSLTRKGIVRVVFFPFFFRWWLQVTSKVIFFWLLVLYLLQVAAIVLFCSTSSPHSIPLTEVIGPIWLMLLLGTVHCQIVSTRTPKPPLSTGGKRRRKLRKAAHLEVHREGDGSSTTDNTQEGAVQNHGTSTSHSVGTVFRDLWHAAFFLSGSKKAKNSIDKSTETDNGYVSLDGKKTVKSGEDGIQNHEPQCETIRPEETAWNTGTLRNGPSKDTQRTITNVSDEVSSEEGPETGYSLRRHVDRTSEGVLRNRKSHHYKKHYPNEDAPKSGTSCSSRCSSSRQDSESARPESETEDVLWEDLLHCAECHSSCTSETDVENHQINPCVKKEYRDDPFHQSHLPWLHSSHPGLEKISAIVWEGNDCKKADMSVLEISGMIMNRVNSHIPGIGYQIFGNAVSLILGLTPFVFRLSQATDLEQLTAHSASELYVIAFGSNEDVIVLSMVIISFVVRVSLVWIFFFLLCVAERTYKQRLLFAKLFGHLTSARRARKSEVPHFRLKKVQNIKMWLSLRSYLKRRGPQRSVDVIVSSAFLLTISVVFICCAQLLHVHEIFLDCHYNWELVIWCISLTLFLLRFVTLGSETSKKYSNTSILLTEQINLYLKMEKKPNKKEELTLVNNVLKLATKLLKELDSPFRLYGLTMNPLLYNITQVVILSAVSGVISDLLGFNLKLWKIKS

SEQ ID NO: 2033 - DNA, 6880 bp, Homo sapiens
agccttgagtgtcattcaagggacagcacaacctcatccaagctctcctacctctgcccagccgtccctctcatcctccccattcctcgtccacactccatccaaagaagagggaaagcaccgaatagaggggggcgaaggcaaagtctgctgttcttccccctgggcccccttgctcctccatcctcattctctcaccaccagcccccctaaccccaaggagcccaggaactgaggcgactcgccccactgccatgtccaaaagcttgaaaaagaaaagccactggactagcaaagtccatgagagtgtcattggcaggaacccggagggccagctgggctttgaactgaaggggggcgccgagaatggacagttcccctacctgggggaggtgaagcccggcaaggtggcctatgagagcggcagcaaattggtgtcggaggagctgctgctggaggtgaacgagacccccgtggcggggctcaccatcagggacgtgctggccgtgatcaaacactgcaaggaccccctccggctcaagtgtgtcaagcaaggaggaattgttgataaagaccttcgtcactacctcaacttacgatttcaaaagggttctgtggaccatgagcttcagcaaatcattcgtgacaacctctacctccgcacggtgccatgcaccacaaggccacataaggagggtgaggtccctggagtggattatattttcatcactgttgaagattttatggaattggagaaaagtggtgctctcctagaaagtgggacttatgaagacaattactacggtaccccaaagccgccagcagaaccagcaccattattgttaaatgtaacagaccagatacttccaggagccactccaagtgctgaaggaaaacggaagaggaataaatcagtgagcaacatggagaaagccagtatagagcctcctgaggaggaagaggaagagaggcctgtggtcaatggaaatggagtagtagtaacaccagaatccagtgaacatgaagacaaaagtgcaggtgcctcaggggagatgccctcccagccttatcctgcaccagtgtacagtcagcctgaggagctgaaggagcagatggatgacacaaagccaactaaacctgaagacaatgaggaaccagacccattgcctgataactgggaaatggcctatacagagaagggcgaagtctacttcattgaccataacacaaagacaacatcatggctggatccacgacttgcgaaaaaggctaaacctccagaagagtgcaaagaaaatgagcttccatatggctgggaaaaaatcgatgatcccatttatggcacttattatgttgaccacataaatagaagaacacagtttgaaaatcctgtcctggaagcaaaaaggaagctacagcaacataacatgccccacacagaacttggaacaaagcccctgcaggccccaggtttccgagaaaaaccactcttcacccgggatgcatcccagttgaagggaacattcctcagcaccaccctaaaaaagagcaacatgggctttggatttaccatcattggtggagacgagcctgatgagtttctgcaggtgaaaagtgtgattccggatgggcctgcagcacaggatggaaaaatggaaacaggtgatgtcattgtctatattaatgaagtttgtgtccttggacacactcatgcagatgttgtcaaacttttccagtctgttcctattggtcagagtgtcaacctggtgttgtgtcgtggctaccctttgccctttgatcctgaagaccctgctaacagcatggtgccaccccttgcaataatggagaggccacctccagtgatggtcaatggaagacacaactatgaaacatatttggagtacatttctcggacctcacagtcagttccagatataacagatcggccgcctcattctctgcactccatgccaactgatggtcagctagacggcacgtatccaccgcccgtccatgatgacaatgtgtctatggcttcatctggggccacccaagctgaacttatgaccttaaccattgtgaaaggtgcccagggcttcggcttcactattgccgacagtcctacaggacagcgggtgaaacaaatacttgacattcagggatgccctggcctgtgtgaaggcgacctcattgttgagatcaaccagcagaatgtacagaacctgagccatacagaagtagtggatatacttaaggactgtcccattggaagtgaaacttctttgattatccatcgaggaggtttcttttctccatggaaaactccaaagcctataatggaccgatgggagaatcaaggcagtcctcaaacgagtttatctgctccggccataccgcagaacctgcccttcccacctgcccttcacaggagctcctttcctgactcaacagaggcctttgacccacggaagcctgatccatatgagctctacgagaaatctagggccatttatgaaagtaggcaacaagtgccacccaggaccagttttcgaatggattcctctggtccagattataaggaattggatgttcatcttcggaggatggagtctggatttggcttcagaatcctcgggggagatgagcctggacagcctattttgattggagctgtcattgccatgggctcagccgacagagatggccgccttcacccaggagatgagcttgtgtatgttgatgggattccagtagccggcaaaacccaccgctatgtcatcgacctcatgcaccacgcagcccgcaatgggcaggtcaacctcactgtgagaagaaaggtgctatgtggaggggagccctgcccagagaacgggagaagtccaggctctgtatccacccaccacagctctccacgcagtgactacgcaacctacaccaacagcaaccacgctgcccccagtagcaatgcctctccccctgaaggcttcgcctcccacagcctgcagaccagtgatgtggtcattcaccgcaaagagaatgagggcttcggctttgtcatcatcagctccctgaacaggcctgagtctggatccactataactgtgccccataaaatcggacgcatcattgatgggagtcctgcagatcgctgtgcaaaactaaaagtgggagaccggatcctagcagtgaatggccagtctatcatcaacatgcctcacgctgacatcgtgaagctcatcaaggatgcaggtcttagtgtcacccttcgcatcattcctcaggaggagctcaacagccccacctcggcacccagctcagagaagcagagtcccatggcgcagcagagtcccctggcacagcagagtcccctggcccagccaagcccagccacccccaacagccccatcgcccagccagcaccacctcaaccacttcagctgcaaggacacgaaaatagttacaggtcggaagtgaaagcaaggcaagatgtgaaaccagacatccgacagcctccattcacagactacaggcagcccccgctggattacaggcaacccccaggaggggactaccagcagcccccacccttggactacaggcagcctcccctactggactacaggcagcactcccccgacaccaggcagtaccctctgtcggactacagacaaccccaggattttgattatttcactgtggacatggagaaaggagccaaaggatttggattcagcattcgtggaggaagggaatacaaaatggatttgtatgtgttgagactggcagaagatggaccagcaataaggaatgggaggatgagggtaggagatcaaatcattgaaatcaatggggaaagcacaagggacatgacacatgccagagcaatagaactcatcaaatctggaggaagacgagtgaggctgctgctcaagagaggcacgggacaggtcccagaatatgacgaacccgccccctggagttctcccgctgccgccgccccaggtctgccggaagtaggcgtctccctggacgacggcctcgctccattctctccatcacatccagccccaccctccgacccttcccaccagataagcccaggcccaacttgggatatcaaacgggaacacgacgttaggaaaccaaaggagctttcagcctgcggccagaagaagcagcgcctcggggagcagagggagcgctcggcgagtccgcagagggccgcgcggccgaggctcgaggaggcgcccggcggccaggggcggcccgaggccggcaggcccgcctcggaggccagggcgcccgggctcgcggcggcagacgcggcggacgcggcgcgggcgggcgggaaggaggcgccccgtgcggcggcgggctccgagctctgccggcgcgaaggcccgggggctgcgccggcgtttgccggcccgggcggcggcggcagcggcgcgctggaggccgagggcagggcgggtgcgcgcgcgggtccccggccgggcccgcgacccccggggggcgccccggcgcgcaaggccgccgtcgcgccggggccctggaaggtgccgggttctgacaagctgcccagcgtcctcaaacccggcgcctcggccgccagcagatgagccgcgcggccacggccaacccgcccgccccggcgcaggcagttcttcttaggttccgtctcacggcgttttaatttattttcactgtcacacgcatagatccacgaggcaccaaggcctgggagcatcgacgtgaagtcccacgtgtccggtgtgcttgggcggcatcgcatcaacgcgcagacctaaactgatcctaaagcccccggttcccttgtgggggctttggcagctatggaagaaccaaaataacgtgaagaacatcacagagagacagtgcagtgtagctttagtttaagaaaaaaaaatattcctccccactgcatgaaggacttggatgtcatccaaactttatatcaagaaacaggacaaagttaagagcaatcacaaactggaatatcgccttaaaaatcaaactgcacggagcaagctgaaactgagacaagattatatcttttaattgatctaaagcgttgtaaataaattgttctcgacatatctagacaggggttaaagggtttctttgacacattcggaaccgttcacccatgacatgtttccatggctcacccttggcatccatcctcggtgttagcagcagcgttccctgcctcctgcaggatgacttagaaatctagtgagtttcttggtgtgatgccatttttattgccctttctgtgatcaaatcatatttctgtacattttcagtggtagaaaaaaaaggttttaaaaattgtatcctagggaacagtttgccataagtcagaattttgcagtttagctcatagatcttaattggtttttctctaaaatatgaattttataattgaaggaccacaatttgtttaatcaagataggcaacgctgcagttcctttatgaagaggcttttctgtcgtcccaggctagcagagatggatagcttctttgtcagcaatgtgatttcacttattttattgtcttattttaaaccctgtctccatgacttcatttgcactttgacagagcagaggcagagtatttgtcttatatttctcagattataatattaaaaaattacaatcaatttattttcattaaagaacgtgagtctttttagcattcctttctgcttatccttctttccttaccctttgtccttttgtttccattagttttctttcgtcttgtattccttgccactttattttgttagcaacttctagatgtttatcttcatggatctatgattgacctcctagtaaaattctaagtcttgcctttcttccctgctgttttagcatttctttgtaaaatgttagcttcaattaattagccattggtacttactgtagctacacatattaaaaggcaaagtgtttctgaaggcaatttctttttaatatgcccgaatgaatgaggcttcatcctttccatattcttactctttacaggagttcaaatgcaaataagctccacctccctgcacttgtagtctaaaaagtaaaaggggcgatcaggtccatctcaaaggtcacacgtaatagcctccctgggctgatcattccctctccttgtaattgcagtatcctgagtagcagtttaattttcatcaaacatcggagtagtttagttgtttgacaggaggagaataaggctgaaagcctcaagtgaaggatcttgcagcttgtaaaagcaatttccaaaaatgaaacccattcatcgtaaacaaaagcacaaacacttgtagcagtttataatgcttttggtttaatctcaattagtctttctcccctggactagaaatccagtatagtttgccattaatttattgaatctggttttggacaatgcttctgtagtgtagctgcacgtcctggtactgtatcctctgactttattttccatgtattacaaaaggaaaaaaaaattgagattacactggcataaactctagtttgcacagttcacagctactacttgtgcagtaattgctttatgcggctgtaatccataacctgtgaagacagcacatcatctaaatcccattccaaataatatttgtgtagtgttagctgtgaatttaccctgtacagctgtatctctataaatataattccatgtattaatagtcacagaaagactgtaagtgagcaactatttttatgaaacgtaccactatggataaattaacttttacagaaatcttgtttactgtatgatattctaaaacactgtcaaataaaatatatatccaaaaatcttttctttttccaacta

SEQ ID NO: 2034 - protein, 1455 aa, Homo sapiens
MSKSLKKKSHWTSKVHESVIGRNPEGQLGFELKGGAENGQFPYLGEVKPGKVAYESGSKLVSEELLLEVNETPVAGLTIRDVLAVIKHCKDPLRLKCVKQGGIVDKDLRHYLNLRFQKGSVDHELQQIIRDNLYLRTVPCTTRPHKEGEVPGVDYIFITVEDFMELEKSGALLESGTYEDNYYGTPKPPAEPAPLLLNVTDQILPGATPSAEGKRKRNKSVSNMEKASIEPPEEEEEERPVVNGNGVVVTPESSEHEDKSAGASGEMPSQPYPAPVYSQPEELKEQMDDTKPTKPEDNEEPDPLPDNWEMAYTEKGEVYFIDHNTKTTSWLDPRLAKKAKPPEECKENELPYGWEKIDDPIYGTYYVDHINRRTQFENPVLEAKRKLQQHNMPHTELGTKPLQAPGFREKPLFTRDASQLKGTFLSTTLKKSNMGFGFTIIGGDEPDEFLQVKSVIPDGPAAQDGKMETGDVIVYINEVCVLGHTHADVVKLFQSVPIGQSVNLVLCRGYPLPFDPEDPANSMVPPLAIMERPPPVMVNGRHNYETYLEYISRTSQSVPDITDRPPHSLHSMPTDGQLDGTYPPPVHDDNVSMASSGATQAELMTLTIVKGAQGFGFTIADSPTGQRVKQILDIQGCPGLCEGDLIVEINQQNVQNLSHTEVVDILKDCPIGSETSLIIHRGGFFSPWKTPKPIMDRWENQGSPQTSLSAPAIPQNLPFPPALHRSSFPDSTEAFDPRKPDPYELYEKSRAIYESRQQVPPRTSFRMDSSGPDYKELDVHLRRMESGFGFRILGGDEPGQPILIGAVIAMGSADRDGRLHPGDELVYVDGIPVAGKTHRYVIDLMHHAARNGQVNLTVRRKVLCGGEPCPENGRSPGSVSTHHSSPRSDYATYTNSNHAAPSSNASPPEGFASHSLQTSDVVIHRKENEGFGFVIISSLNRPESGSTITVPHKIGRIIDGSPADRCAKLKVGDRILAVNGQSIINMPHADIVKLIKDAGLSVTLRIIPQEELNSPTSAPSSEKQSPMAQQSPLAQQSPLAQPSPATPNSPIAQPAPPQPLQLQGHENSYRSEVKARQDVKPDIRQPPFTDYRQPPLDYRQPPGGDYQQPPPLDYRQPPLLDYRQHSPDTRQYPLSDYRQPQDFDYFTVDMEKGAKGFGFSIRGGREYKMDLYVLRLAEDGPAIRNGRMRVGDQIIEINGESTRDMTHARAIELIKSGGRRVRLLLKRGTGQVPEYDEPAPWSSPAAAAPGLPEVGVSLDDGLAPFSPSHPAPPSDPSHQISPGPTWDIKREHDVRKPKELSACGQKKQRLGEQRERSASPQRAARPRLEEAPGGQGRPEAGRPASEARAPGLAAADAADAARAGGKEAPRAAAGSELCRREGPGAAPAFAGPGGGGSGALEAEGRAGARAGPRPGPRPPGGAPARKAAVAPGPWKVPGSDKLPSVLKPGASAASR

SEQ ID NO: 2035 - DNA, 2820 bp, Homo sapiens
gggagttcagacctagatctttccagttaatcacacaacaaacttagctcatcgcaataaaaagcagctcagagccgactggctcttttaggcactgactccgaacaggattctttcacccaggcatctcctccagagggatccgccagcccgtccagcagcaccatgtgggtgaccaaactcctgccagccctgctgctgcagcatgtcctcctgcatctcctcctgctccccatcgccatcccctatgcagagggacaaaggaaaagaagaaatacaattcatgaattcaaaaaatcagcaaagactaccctaatcaaaatagatccagcactgaagataaaaaccaaaaaagtgaatactgcagaccaatgtgctaatagatgtactaggaataaaggacttccattcacttgcaaggcttttgtttttgataaagcaagaaaacaatgcctctggttccccttcaatagcatgtcaagtggagtgaaaaaagaatttggccatgaatttgacctctatgaaaacaaagactacattagaaactgcatcattggtaaaggacgcagctacaagggaacagtatctatcactaagagtggcatcaaatgtcagccctggagttccatgataccacacgaacacagctttttgccttcgagctatcggggtaaagacctacaggaaaactactgtcgaaatcctcgaggggaagaagggggaccctggtgtttcacaagcaatccagaggtacgctacgaagtctgtgacattcctcagtgttcagaagttgaatgcatgacctgcaatggggagagttatcgaggtctcatggatcatacagaatcaggcaagatttgtcagcgctgggatcatcagacaccacaccggcacaaattcttgcctgaaagatatcccgacaagggctttgatgataattattgccgcaatcccgatggccagccgaggccatggtgctatactcttgaccctcacacccgctgggagtactgtgcaattaaaacatgcgctgacaatactatgaatgacactgatgttcctttggaaacaactgaatgcatccaaggtcaaggagaaggctacaggggcactgtcaataccatttggaatggaattccatgtcagcgttgggattctcagtatcctcacgagcatgacatgactcctgaaaatttcaagtgcaaggacctacgagaaaattactgccgaaatccagatgggtctgaatcaccctggtgttttaccactgatccaaacatccgagttggctactgctcccaaattccaaactgtgatatgtcacatggacaagattgttatcgtgggaatggcaaaaattatatgggcaacttatcccaaacaagatctggactaacatgttcaatgtgggacaagaacatggaagacttacatcgtcatatcttctgggaaccagatgcaagtaagctgaatgagaattactgccgaaatccagatgatgatgctcatggaccctggtgctacacgggaaatccactcattccttgggattattgccctatttctcgttgtgaaggtgataccacacctacaatagtcaatttagaccatcccgtaatatcttgtgccaaaacgaaacaattgcgagttgtaaatgggattccaacacgaacaaacataggatggatggttagtttgagatacagaaataaacatatctgcggaggatcattgataaaggagagttgggttcttactgcacgacagtgtttcccttctcgagacttgaaagattatgaagcttggcttggaattcatgatgtccacggaagaggagatgagaaatgcaaacaggttctcaatgtttcccagctggtatatggccctgaaggatcagatctggttttaatgaagcttgccaggcctgctgtcctggatgattttgttagtacgattgatttacctaattatggatgcacaattcctgaaaagaccagttgcagtgtttatggctggggctacactggattgatcaactatgatggcctattacgagtggcacatctctatataatgggaaatgagaaatgcagccagcatcatcgagggaaggtgactctgaatgagtctgaaatatgtgctggggctgaaaagattggatcaggaccatgtgagggggattatggtggcccacttgtttgtgagcaacataaaatgagaatggttcttggtgtcattgttcctggtcgtggatgtgccattccaaatcgtcctggtatttttgtccgagtagcatattatgcaaaatggatacacaaaattattttaacatataaggtaccacagtcatagctgaagtaagtgtgtctgaagcacccaccaatacaactgtcttttacatgaagatttcagagaatgtggaatttaaaatgtcacttacaacaatcctaagacaactactggagagtcatgtttgttgaaattctcattaatgtttatgggtgttttctgttgttttgtttgtcagtgttattttgtcaatgttgaagtgaattaaggtacatgcaagtgtaataacatatctcctgaagatacttgaatggattaaaaaaacacacaggtatatttgctggatgataaagatttcatgggaaaaaaaatcaattaatctgtctaagctgctttctgatgttggtttcttaataatgagtaaaccacaaattaaatgttattttaacctcaccaaaacaatttataccttgtgtccctaaattgtagccctatattaaattatattacatttcaaaaaaaaaaaaaaaa

SEQ ID NO: 2036 - protein, 728 aa, Homo sapiens
MWVTKLLPALLLQHVLLHLLLLPIAIPYAEGQRKRRNTIHEFKKSAKTTLIKIDPALKIKTKKVNTADQCANRCTRNKGLPFTCKAFVFDKARKQCLWFPFNSMSSGVKKEFGHEFDLYENKDYIRNCIIGKGRSYKGTVSITKSGIKCQPWSSMIPHEHSFLPSSYRGKDLQENYCRNPRGEEGGPWCFTSNPEVRYEVCDIPQCSEVECMTCNGESYRGLMDHTESGKICQRWDHQTPHRHKFLPERYPDKGFDDNYCRNPDGQPRPWCYTLDPHTRWEYCAIKTCADNTMNDTDVPLETTECIQGQGEGYRGTVNTIWNGIPCQRWDSQYPHEHDMTPENFKCKDLRENYCRNPDGSESPWCFTTDPNIRVGYCSQIPNCDMSHGQDCYRGNGKNYMGNLSQTRSGLTCSMWDKNMEDLHRHIFWEPDASKLNENYCRNPDDDAHGPWCYTGNPLIPWDYCPISRCEGDTTPTIVNLDHPVISCAKTKQLRVVNGIPTRTNIGWMVSLRYRNKHICGGSLIKESWVLTARQCFPSRDLKDYEAWLGIHDVHGRGDEKCKQVLNVSQLVYGPEGSDLVLMKLARPAVLDDFVSTIDLPNYGCTIPEKTSCSVYGWGYTGLINYDGLLRVAHLYIMGNEKCSQHHRGKVTLNESEICAGAEKIGSGPCEGDYGGPLVCEQHKMRMVLGVIVPGRGCAIPNRPGIFVRVAYYAKWIHKIILTYKVPQS

SEQ ID NO: 2037 - DNA, 1307 bp, Homo sapiens
gggagttcagacctagatctttccagttaatcacacaacaaacttagctcatcgcaataaaaagcagctcagagccgactggctcttttaggcactgactccgaacaggattctttcacccaggcatctcctccagagggatccgccagcccgtccagcagcaccatgtgggtgaccaaactcctgccagccctgctgctgcagcatgtcctcctgcatctcctcctgctccccatcgccatcccctatgcagagggacaaaggaaaagaagaaatacaattcatgaattcaaaaaatcagcaaagactaccctaatcaaaatagatccagcactgaagataaaaaccaaaaaagtgaatactgcagaccaatgtgctaatagatgtactaggaataaaggacttccattcacttgcaaggcttttgtttttgataaagcaagaaaacaatgcctctggttccccttcaatagcatgtcaagtggagtgaaaaaagaatttggccatgaatttgacctctatgaaaacaaagactacattagaaactgcatcattggtaaaggacgcagctacaagggaacagtatctatcactaagagtggcatcaaatgtcagccctggagttccatgataccacacgaacacagctttttgccttcgagctatcggggtaaagacctacaggaaaactactgtcgaaatcctcgaggggaagaagggggaccctggtgtttcacaagcaatccagaggtacgctacgaagtctgtgacattcctcagtgttcagaagttgaatgcatgacctgcaatggggagagttatcgaggtctcatggatcatacagaatcaggcaagatttgtcagcgctgggatcatcagacaccacaccggcacaaattcttgcctgaaagatatcccgacaagggctttgatgataattattgccgcaatcccgatggccagccgaggccatggtgctatactcttgaccctcacacccgctgggagtactgtgcaattaaaacatgcgagacataacatgggctctcaactgatggtgaacttcttctggtgagtgacagaggctgcagtgaagaataatgagtctaatagaagtttatcacagatgtctctaatctttatagctgatccctacctctctcgctgtctttgtacccagcctgcattctgtttcgatctgtcttttagcagtccatacaatcatttttctacatgctggcccttacctagcttttctgaatttacaataaaaactattttttaacgtgaaaaaaaaaaaaaaaaaa

SEQ ID NO: 2038 - protein, 290 aa, Homo sapiens
MWVTKLLPALLLQHVLLHLLLLPIAIPYAEGQRKRRNTIHEFKKSAKTTLIKIDPALKIKTKKVNTADQCANRCTRNKGLPFTCKAFVFDKARKQCLWFPFNSMSSGVKKEFGHEFDLYENKDYIRNCIIGKGRSYKGTVSITKSGIKCQPWSSMIPHEHSFLPSSYRGKDLQENYCRNPRGEEGGPWCFTSNPEVRYEVCDIPQCSEVECMTCNGESYRGLMDHTESGKICQRWDHQTPHRHKFLPERYPDKGFDDNYCRNPDGQPRPWCYTLDPHTRWEYCAIKTCET

SEQ ID NO: 2039 - DNA, 2805 bp, Homo sapiens
gggagttcagacctagatctttccagttaatcacacaacaaacttagctcatcgcaataaaaagcagctcagagccgactggctcttttaggcactgactccgaacaggattctttcacccaggcatctcctccagagggatccgccagcccgtccagcagcaccatgtgggtgaccaaactcctgccagccctgctgctgcagcatgtcctcctgcatctcctcctgctccccatcgccatcccctatgcagagggacaaaggaaaagaagaaatacaattcatgaattcaaaaaatcagcaaagactaccctaatcaaaatagatccagcactgaagataaaaaccaaaaaagtgaatactgcagaccaatgtgctaatagatgtactaggaataaaggacttccattcacttgcaaggcttttgtttttgataaagcaagaaaacaatgcctctggttccccttcaatagcatgtcaagtggagtgaaaaaagaatttggccatgaatttgacctctatgaaaacaaagactacattagaaactgcatcattggtaaaggacgcagctacaagggaacagtatctatcactaagagtggcatcaaatgtcagccctggagttccatgataccacacgaacacagctatcggggtaaagacctacaggaaaactactgtcgaaatcctcgaggggaagaagggggaccctggtgtttcacaagcaatccagaggtacgctacgaagtctgtgacattcctcagtgttcagaagttgaatgcatgacctgcaatggggagagttatcgaggtctcatggatcatacagaatcaggcaagatttgtcagcgctgggatcatcagacaccacaccggcacaaattcttgcctgaaagatatcccgacaagggctttgatgataattattgccgcaatcccgatggccagccgaggccatggtgctatactcttgaccctcacacccgctgggagtactgtgcaattaaaacatgcgctgacaatactatgaatgacactgatgttcctttggaaacaactgaatgcatccaaggtcaaggagaaggctacaggggcactgtcaataccatttggaatggaattccatgtcagcgttgggattctcagtatcctcacgagcatgacatgactcctgaaaatttcaagtgcaaggacctacgagaaaattactgccgaaatccagatgggtctgaatcaccctggtgttttaccactgatccaaacatccgagttggctactgctcccaaattccaaactgtgatatgtcacatggacaagattgttatcgtgggaatggcaaaaattatatgggcaacttatcccaaacaagatctggactaacatgttcaatgtgggacaagaacatggaagacttacatcgtcatatcttctgggaaccagatgcaagtaagctgaatgagaattactgccgaaatccagatgatgatgctcatggaccctggtgctacacgggaaatccactcattccttgggattattgccctatttctcgttgtgaaggtgataccacacctacaatagtcaatttagaccatcccgtaatatcttgtgccaaaacgaaacaattgcgagttgtaaatgggattccaacacgaacaaacataggatggatggttagtttgagatacagaaataaacatatctgcggaggatcattgataaaggagagttgggttcttactgcacgacagtgtttcccttctcgagacttgaaagattatgaagcttggcttggaattcatgatgtccacggaagaggagatgagaaatgcaaacaggttctcaatgtttcccagctggtatatggccctgaaggatcagatctggttttaatgaagcttgccaggcctgctgtcctggatgattttgttagtacgattgatttacctaattatggatgcacaattcctgaaaagaccagttgcagtgtttatggctggggctacactggattgatcaactatgatggcctattacgagtggcacatctctatataatgggaaatgagaaatgcagccagcatcatcgagggaaggtgactctgaatgagtctgaaatatgtgctggggctgaaaagattggatcaggaccatgtgagggggattatggtggcccacttgtttgtgagcaacataaaatgagaatggttcttggtgtcattgttcctggtcgtggatgtgccattccaaatcgtcctggtatttttgtccgagtagcatattatgcaaaatggatacacaaaattattttaacatataaggtaccacagtcatagctgaagtaagtgtgtctgaagcacccaccaatacaactgtcttttacatgaagatttcagagaatgtggaatttaaaatgtcacttacaacaatcctaagacaactactggagagtcatgtttgttgaaattctcattaatgtttatgggtgttttctgttgttttgtttgtcagtgttattttgtcaatgttgaagtgaattaaggtacatgcaagtgtaataacatatctcctgaagatacttgaatggattaaaaaaacacacaggtatatttgctggatgataaagatttcatgggaaaaaaaatcaattaatctgtctaagctgctttctgatgttggtttcttaataatgagtaaaccacaaattaaatgttattttaacctcaccaaaacaatttataccttgtgtccctaaattgtagccctatattaaattatattacatttcaaaaaaaaaaaaaaaa

SEQ ID NO: 2040 - protein, 723 aa, Homo sapiens
MWVTKLLPALLLQHVLLHLLLLPIAIPYAEGQRKRRNTIHEFKKSAKTTLIKIDPALKIKTKKVNTADQCANRCTRNKGLPFTCKAFVFDKARKQCLWFPFNSMSSGVKKEFGHEFDLYENKDYIRNCIIGKGRSYKGTVSITKSGIKCQPWSSMIPHEHSYRGKDLQENYCRNPRGEEGGPWCFTSNPEVRYEVCDIPQCSEVECMTCNGESYRGLMDHTESGKICQRWDHQTPHRHKFLPERYPDKGFDDNYCRNPDGQPRPWCYTLDPHTRWEYCAIKTCADNTMNDTDVPLETTECIQGQGEGYRGTVNTIWNGIPCQRWDSQYPHEHDMTPENFKCKDLRENYCRNPDGSESPWCFTTDPNIRVGYCSQIPNCDMSHGQDCYRGNGKNYMGNLSQTRSGLTCSMWDKNMEDLHRHIFWEPDASKLNENYCRNPDDDAHGPWCYTGNPLIPWDYCPISRCEGDTTPTIVNLDHPVISCAKTKQLRVVNGIPTRTNIGWMVSLRYRNKHICGGSLIKESWVLTARQCFPSRDLKDYEAWLGIHDVHGRGDEKCKQVLNVSQLVYGPEGSDLVLMKLARPAVLDDFVSTIDLPNYGCTIPEKTSCSVYGWGYTGLINYDGLLRVAHLYIMGNEKCSQHHRGKVTLNESEICAGAEKIGSGPCEGDYGGPLVCEQHKMRMVLGVIVPGRGCAIPNRPGIFVRVAYYAKWIHKIILTYKVPQS

SEQ ID NO: 2041 - DNA, 1292 bp, Homo sapiens
gggagttcagacctagatctttccagttaatcacacaacaaacttagctcatcgcaataaaaagcagctcagagccgactggctcttttaggcactgactccgaacaggattctttcacccaggcatctcctccagagggatccgccagcccgtccagcagcaccatgtgggtgaccaaactcctgccagccctgctgctgcagcatgtcctcctgcatctcctcctgctccccatcgccatcccctatgcagagggacaaaggaaaagaagaaatacaattcatgaattcaaaaaatcagcaaagactaccctaatcaaaatagatccagcactgaagataaaaaccaaaaaagtgaatactgcagaccaatgtgctaatagatgtactaggaataaaggacttccattcacttgcaaggcttttgtttttgataaagcaagaaaacaatgcctctggttccccttcaatagcatgtcaagtggagtgaaaaaagaatttggccatgaatttgacctctatgaaaacaaagactacattagaaactgcatcattggtaaaggacgcagctacaagggaacagtatctatcactaagagtggcatcaaatgtcagccctggagttccatgataccacacgaacacagctatcggggtaaagacctacaggaaaactactgtcgaaatcctcgaggggaagaagggggaccctggtgtttcacaagcaatccagaggtacgctacgaagtctgtgacattcctcagtgttcagaagttgaatgcatgacctgcaatggggagagttatcgaggtctcatggatcatacagaatcaggcaagatttgtcagcgctgggatcatcagacaccacaccggcacaaattcttgcctgaaagatatcccgacaagggctttgatgataattattgccgcaatcccgatggccagccgaggccatggtgctatactcttgaccctcacacccgctgggagtactgtgcaattaaaacatgcgagacataacatgggctctcaactgatggtgaacttcttctggtgagtgacagaggctgcagtgaagaataatgagtctaatagaagtttatcacagatgtctctaatctttatagctgatccctacctctctcgctgtctttgtacccagcctgcattctgtttcgatctgtcttttagcagtccatacaatcatttttctacatgctggcccttacctagcttttctgaatttacaataaaaactattttttaacgtgaaaaaaaaaaaaaaaaaa

SEQ ID NO: 2042 - protein, 285 aa, Homo sapiens
MWVTKLLPALLLQHVLLHLLLLPIAIPYAEGQRKRRNTIHEFKKSAKTTLIKIDPALKIKTKKVNTADQCANRCTRNKGLPFTCKAFVFDKARKQCLWFPFNSMSSGVKKEFGHEFDLYENKDYIRNCIIGKGRSYKGTVSITKSGIKCQPWSSMIPHEHSYRGKDLQENYCRNPRGEEGGPWCFTSNPEVRYEVCDIPQCSEVECMTCNGESYRGLMDHTESGKICQRWDHQTPHRHKFLPERYPDKGFDDNYCRNPDGQPRPWCYTLDPHTRWEYCAIKTCET

SEQ ID NO: 2043 - DNA, 2079 bp, Homo sapiens
gggagttcagacctagatctttccagttaatcacacaacaaacttagctcatcgcaataaaaagcagctcagagccgactggctcttttaggcactgactccgaacaggattctttcacccaggcatctcctccagagggatccgccagcccgtccagcagcaccatgtgggtgaccaaactcctgccagccctgctgctgcagcatgtcctcctgcatctcctcctgctccccatcgccatcccctatgcagagggacaaaggaaaagaagaaatacaattcatgaattcaaaaaatcagcaaagactaccctaatcaaaatagatccagcactgaagataaaaaccaaaaaagtgaatactgcagaccaatgtgctaatagatgtactaggaataaaggacttccattcacttgcaaggcttttgtttttgataaagcaagaaaacaatgcctctggttccccttcaatagcatgtcaagtggagtgaaaaaagaatttggccatgaatttgacctctatgaaaacaaagactacattagaaactgcatcattggtaaaggacgcagctacaagggaacagtatctatcactaagagtggcatcaaatgtcagccctggagttccatgataccacacgaacacagctttttgccttcgagctatcggggtaaagacctacaggaaaactactgtcgaaatcctcgaggggaagaagggggaccctggtgtttcacaagcaatccagaggtacgctacgaagtctgtgacattcctcagtgttcagaaggtaaataaacctgaatgccatgtgggccattctattccccctatgtgtagaactgtaactcacattaaaggttaacagcaacgaatcaatcataacaaatatgttgttcgtgcaaatgcaactacaaataattatttaaacatttttatacaatgtttttaaaactgttggattatcaccagattaatgcaaaataacagagcgagttatcagtttgaatttcaacactgcctgagacatccctctggggaaagtgaaagagagggtttacttacctactgtcttgagctcacatacctcaaaatctactactgtgtggcacctgaaaggagttgaatgaagcttagcctttcattagcaatgttaattctattcaaccagcacctgcttccacagaaattctgtccaaactatcatgaagtggtgtgacaagggtatatggacccagaagataatacaatataagaagggatcactggaagcttgaccccatgcacattttggtgaaaatgtgcctagaatcaaatgtgacacgtaggctggaactgagtaccattcagaataggatctgaagagatcaaagcaatggagaccaccaaactgtcttgaaggcatgtctatggaccttaagtccatgtctatgttttcagctcttctcacagcataaaagggcattgtccttacttttgcagtggaaaactgaatggctgacaagatggaagagtaaccatttcagcattgtatgtggtttcatttttcttagttatctggctactgaatagccggatttttcagttctgtcagaaactctaaatttccaaaaatctaagtgaaacatggatgaaactctgttagaaaattgttaggattttggagtatttggggagggggactactggaatgctgtccaagttttatactaagatatcttacctgtttgttattaaccaaatatttttaaaaatatttcctccataaatattcatttaatattaggttgatatttatcacataaaaagtaaaggctactgttagctaattgtcacagagaaggatttgttttctgttgttagtgaatttgaaatccttgactttatgtgctacagccagttccatctctgtttgtaaattcttactttccattccatatcatattctgttccctataacctcttcattgttttcttttcttttaaaaataataaacttttctatgatcaaaaaaaaaaaaaaaaaaaaaaaaaaaaaaaaaaaaaaaaaaaaaaaaaaaaaaaaaaaaaaaaaaaaaa

SEQ ID NO: 2044 - protein, 210 aa, Homo sapiens
MWVTKLLPALLLQHVLLHLLLLPIAIPYAEGQRKRRNTIHEFKKSAKTTLIKIDPALKIKTKKVNTADQCANRCTRNKGLPFTCKAFVFDKARKQCLWFPFNSMSSGVKKEFGHEFDLYENKDYIRNCIIGKGRSYKGTVSITKSGIKCQPWSSMIPHEHSFLPSSYRGKDLQENYCRNPRGEEGGPWCFTSNPEVRYEVCDIPQCSEGK

SEQ ID NO: 2045 - DNA, 4953 bp, Homo sapiens
gcatccccttgattaaatgtttttcctcctatgcaatcaccattagctgtttggctcccattctgtattcttctgaagcagccctgcattgcaaatcaatatctttctgaaaagacagtgtgttgtgaattgccttgacagcatatgcacggttactttggctgcaatgctgctgcagagcccggttactctgccttcgtgggaactccacagatatgtgtcacaaagatgtctacacggaactgccagggaatggactcagtgatcaaacccctggacacaattcctgaggataaaaaagtcagagttcagaggacacagagcacttttgacccatttgagaaaccagctaatcaagtaaagagggtgcattctgagaacaatgcttgcattaactttaagacctcctccactggcaaagagtcacctaaagttaggcggcactccagccccagctcgccaacaagtcccaaatttggaaaagctgactcatatgaaaagctggaaaaactaggggaaggatcttatgctacagtatacaaagggaaaagcaaggtaaatgggaagttggtagctctgaaggtgatcaggctgcaggaagaagaagggacacctttcacagctatcagggaagcttctcttttaaaaggactaaaacatgctaacatagtgctacttcatgacatcatccataccaaggagacgctgacacttgtgtttgaatatgtgcacactgatttatgtcagtacatggacaagcaccctggggggctgcatccagataatgtgaagttgtttttatttcagttgctgcgaggtctgtcttacatccaccagcgttatattttgcacagagacctgaaaccacagaaccttctgatcagtgacacgggggagttaaagctggcagatttcggtcttgcaagagcaaaatccgtccctagccacacatactccaacgaagtggttaccttgtggtacagacctccagatgtccttctaggctcaacagaatattccacctgccttgacatgtggggagtaggttgcatctttgttgaaatgatccaaggagttgctgcttttccaggaatgaaagacattcaggatcaacttgaacgaatatttctggttcttggaacaccaaatgaggacacatggcctggagttcattctttaccacattttaagccagaacgctttaccctgtacagctctaaaaaccttagacaagcatggaataagctcagctatgtgaaccatgcagaggacctggcctccaagctcctacaatgttccccaaagaacagactgtcggcacaggctgccttgagccacgagtattttagtgacctgccgccacggctatgggaactcaccgacatgtcttctatttttactgtcccaaatgtgagattgcaaccagaagctggagaaagcatgcgggcctttgggaaaaacaatagttatggcaaaagtctatcaaacagcaagcactgacaagcagcacattctcaagagcacacaggattaagttgtcatcattctgggaagaaaaaaaaaacattaatgaagaggccaataatatgaagggaatcatggatcagttttctttcgctccctgtggtggatttcacttacaagaaaattgaagctggcaagaccctgttttctctgcaatttatttaaaaccttgcacgcatttggataccttgtgatttccaagaactacgtgaagattaagctttgcttactgatacatggcatgtattcttttcagtcttttgtgtttgattttgtttgatttccctctgcagcacagcgtctctgtaaaggtttttatgctttcaccagccatgtcttaaatacattaagacaacacatttggtgttcacacttcttcagtaatgtctgaacttgaaagccacagagtggcataaaacaatgtgtgttttctttgagagcagtgcacattttgcaaccactaggaaggaaattttctgctaaagcaaacccctgttctctgacttgacaacttggccccggactgtggggccccacctgttgcttaccttttgaggtaattttgcaaatgtggtttttttacttggaaataactgcacatttatatataggatattggactctgcttagcattttcaagccacatagcatgactgttttttgaataggttggaattgaaaaaacaattatcaaacgttaagaacaaagacagggataaattgcttacatttcaacctctagagattgaggtaactttttgtgtctgggtcttgtcaacatctaatttttttccatccattctgttacactttgtattttctaactggagaaaagagtgaggaacagaatgttttaaatctggtgcaaaagaactatatctgctggatgagccttgaaagcagtcttggcctgttagggcttacaaagtaaattacaaagtgatccagttcaaagtttgcttagttacaacaaagcacctttaaaaaaaatacattttaaaaaaacattccaagccaattggaagacatcattgggttcttactttaagacatctcctggaataactgttcaaatgcaggttttagaaacaatgcaggaatcttgctttaaagatgaaaaagggaatgggccagcttcccttactcaaggagttgagggaccttggaggatgaaggcgagtatgtgacactggagaaaagtggaccaggcatgtcttttgctttgatctggagggagggctgcctgatgcaggccggctcccagtggggcaggcctcgctgcagaatgcccagtagtactgcggccaaggggacagttaggagacttcatctaaagcatgaaacctagctcctctacacacaaattcctatggaaatacctttgtgtacagtgtcttacattttcctattagtcagaaagaaggagagaatgagtgagtgcttgaaatgtgtcatactgttttaggatcaagactaggaattaggagccaggttgacaaggactttttctgagagttgggtgagggtaaagcttttctataatcaagctcaatacaccaaggaaactggatccagaattcctaaactttaaaatggtactgtctgcggagtggagtatggatggttatgtcaaagtcatagttcatcctatccagatgtagcattcatggtaaacttttaagtgctaagcaaggaattatttactgattggttttaaagagagcagaaaacacccaagtgtagaatgtctactgtttgctacctagaaatcttttccattcctctttcatacattccaacccactggaagtctttagaggtattttgatttaaagtatacttaaattaggatttcttaaagaaaacatagggagaaaactttacatgcaattaaaaatggactttcctgtgatttgtttttaatcattcatttggagaagaggcatgacctttgtatttcactaagtttaaagcaagagcaactgatgattaaatgttgctttttaataaggtttttaacttgaaaatttgaaaatatttaatgttgaaagacttcaattagggctattagagttatatctccctgtcgtaggcagcttcttcggagaagtgaaatataacattactcagtggacggagaagtctgttttgttacagagacatgcctctcagaaggtcaggaggttttgagtacctatccttgccacccatacaggaaatccaaagtttggtgtctctctctctctgtctctttctttctctttctccccccaaacccctctcactccctccctccctctctccttcccctatttgcaatcatattctccctctgcttcttttctcttctgccctccttgtgggcagtcatgaaaatcaattcagactgtgttcattagcagatttattattctattgagaaagcactggaatgttttgtgagattatttttatatgaaggaatagcctgaactcaaacagatggtaagaatagtacaaacaccttagcacatcactgcacacacagtattctgaaaggagatttgacacttaattcccattttcttaaaataacagttttgttgacttaaaaatatgagatacataggatgtgaaaaaaaatgtttgcagtactcagcaaaaaatagggtacataaagcagggtggctgtccatccactgattctggggtgagaagcgatttctacctcgcaagagtgactagaaagtttctaggagcacctccaggcttgcaaagaaagtgaggcctcttggtatcctttcctcagtgtgtatatgacagccagtataatcaataccctaggttatgcgtctatatgatactcatctgtgaatattattggttttgtaatctttgttatataagaggatgtttaggctgtatatactggggtagattattgcctgccccttatacataggaatatgctgcataattgcgcataacttccatctcccttactggcttgtaggcagaggaaactgtatatgttactgccttgtacttttctcatacaccaaaaacacaccaaaaaaatcaataaaataagcaatcttctattctcattccttttcccacagcagcatattttagaggcacatacaaaacctacattctctagttgggagtggatttttaaagttttccttttatcttttatttttttttgtatgatgcactgagatgtgtactttctaacaggggattggtacctaagaaatgtggtagcattattcagaaaactattatactttcaaatgacacatagtaaggagaatggaataatacatgttgcatatttgttaccagttgtaatttgtctgtattatgaaagatgtaatggtttgtcagctgtcactgttgttttcttgtaacatgatatggaataaagtatagcagaatctccgt

SEQ ID NO: 2046 - protein, 451 aa, Homo sapiens
MHGYFGCNAAAEPGYSAFVGTPQICVTKMSTRNCQGMDSVIKPLDTIPEDKKVRVQRTQSTFDPFEKPANQVKRVHSENNACINFKTSSTGKESPKVRRHSSPSSPTSPKFGKADSYEKLEKLGEGSYATVYKGKSKVNGKLVALKVIRLQEEEGTPFTAIREASLLKGLKHANIVLLHDIIHTKETLTLVFEYVHTDLCQYMDKHPGGLHPDNVKLFLFQLLRGLSYIHQRYILHRDLKPQNLLISDTGELKLADFGLARAKSVPSHTYSNEVVTLWYRPPDVLLGSTEYSTCLDMWGVGCIFVEMIQGVAAFPGMKDIQDQLERIFLVLGTPNEDTWPGVHSLPHFKPERFTLYSSKNLRQAWNKLSYVNHAEDLASKLLQCSPKNRLSAQAALSHEYFSDLPPRLWELTDMSSIFTVPNVRLQPEAGESMRAFGKNNSYGKSLSNSKH

SEQ ID NO: 2047 - DNA, 2163 bp, Homo sapiens
agaggcggaagtaaaagcgaactacagtggatgggtgcagttcaggagatagctgttctccagcctttctggagggatgcagagcctttccttaggacaaacaagcatttcaaaaggtttgaactacctaaccattatggcaccaggaaacctctggcatatgagaaataactttctctttggttcaagatgttggatgactcgattttcagcagaaaacatcttcaaatcagtttcatttaggctttttggtgtgaagtgtcataatacagacagtgagcctttgaaaaatgaggacctactgaaaaacttacttactatgggagtagatattgacatggcaaggaaacgacagcctggagtttttcataggatgattaccaatgagcaggacctgaagatgttccttctttccaaaggagctagcaaagaagtgatcgctagcatcatatcaagatatccacgagcaataacacgtactcccgagaatctttcaaaacggtgggatctgtggagaaagattgtgacatcagaccttgaaattgtaaatattttggaacgttctcctgaatccttttttcggtccaataacaacctaaacttagagaataatataaagttcctctactcagttggattgacccgtaaatgcctttgtcgattgttgaccaatgcccctcgtaccttctccaatagtcttgatctgaataaacagatggttgaatttttgcaggcagccggtttgtcattgggtcacaatgatcccgcagattttgtcagaaagataatttttaaaaacccttttatcttaattcagagcaccaagcgggtgaaagctaacattgaattcttacggtcaactttcaatttgaacagtgaggaactgctggttctgatatgtggtccaggagctgaaatcctagacctttccaatgactatgccagaagaagctacgcaaacatcaaagagaagctgttttctcttggatgtactgaagaagaggtacagaagtttgtcttaagctatccagatgtgatcttcttggcagagaaaaagtttaatgataaaatagactgcctcatggaagaaaacattagcatttcacaaataatcgaaaatcctcgggttctggattcaagcataagtactttaaaaagtcgaatcaaagaattggtaaatgctggctgtaacttgagtactttaaacatcactcttctatcttggagtaaaaaaagatatgaagctaaattgaaaaagttaagcagatttgcctaaggatgccaatgtttttaattctcaggaactgtgaatatgttatgccacattgcaaaagaattttgcagaagtgattaatttaaaatgttattaagggccttgagatggggagattatcctgaattactttggagggcctaatataattgtagggatctttaaaagttgaagagggaggcaaaagaggaggtcagagtgatcctgtataagaaagacaactacttttgaaggaagttaaaaggtggctttgaaggaggaagacaccttgagccaaggaatgaagggggcctgtaaaaaaagattgaaaaggcaaggaaacagattctccattagagtccccagaaaggaatgcagccttgctggcacctttttagcccagtgagatcaatgtcaaacttctgacccacagaaccataagatggtaaatttgtgttgttttaaaccactgagtcagtgataatttgctgaagaagcaaatagattaacatagcaactaagtagatgattagttgcattataggtgaagtcaaaaatacagtcctttagtaaagtctctatttcttccttttataagagtaattatatttaaaaaatctacctacccttctggaattgctaatgttagtgtttataaagtcttaaatgtgtgcataaaaaactaaatgtgaatataaaatctaaataaaggaatatgtttgcctaatatagtttaaggaaatgataatcatttctgtgcattttgttggcatttcagctaatattaaagagtaattttcagaggcattgacttaaaaaatggcaaatcagataatgtcggtattttcaagatacaatctagctctgacataaactgaaagacgtgagacaaattatatgaccttaatttt

SEQ ID NO: 2048 - protein, 399 aa, Homo sapiens
MQSLSLGQTSISKGLNYLTIMAPGNLWHMRNNFLFGSRCWMTRFSAENIFKSVSFRLFGVKCHNTDSEPLKNEDLLKNLLTMGVDIDMARKRQPGVFHRMITNEQDLKMFLLSKGASKEVIASIISRYPRAITRTPENLSKRWDLWRKIVTSDLEIVNILERSPESFFRSNNNLNLENNIKFLYSVGLTRKCLCRLLTNAPRTFSNSLDLNKQMVEFLQAAGLSLGHNDPADFVRKIIFKNPFILIQSTKRVKANIEFLRSTFNLNSEELLVLICGPGAEILDLSNDYARRSYANIKEKLFSLGCTEEEVQKFVLSYPDVIFLAEKKFNDKIDCLMEENISISQIIENPRVLDSSISTLKSRIKELVNAGCNLSTLNITLLSWSKKRYEAKLKKLSRFA

SEQ ID NO: 2049 - DNA, 2175 bp, Homo sapiens
atatacttgcgcgccgacgccgccgctcgcttgtgaaactggaaggctgccatggctagcccagccgcctcctcggtgcgaccaccgaggcccaagaaagagccgcagacgctcgtcatccccaagaatgcggcggaggagcagaagctcaagctggagcggctcatgaagaacccggacaaagcagttccaattccagagaaaatgagtgaatgggcacctcgacctcccccagaatttgtccgagatgtcatgggttcaagtgctggggccggcagtggagagttccacgtgtacagacatctgcgccggagagaatatcagcgacaggactacatggatgccatggctgagaagcaaaaattggatgcagagtttcagaaaagactggaaaagaataaaattgctgcagaggagcagaccgcaaagcgccggaagaagcgccagaagttaaaagagaagaaattactggcaaagaagatgaaacttgaacagaagaaacaagaaggacccggtcagcccaaggagcaggggtccagcagctctgcggaggcatctggaacagaggaggaggaggaagtgcccagtttcaccatggggcgatgacaatgtttgccacagcctctgcctggaacctggctcgtgctgtgaccagaagggaaaggcggctgtttggctctttctcccccgcaaggacccgctgacccgctggatggagagcaaaggagacccctcccgagccgctcacagtcctgtatttggcaggtttgggagcctgaggggccatctccctgacactcagaggcactgccttgcagacaccatccgtgctcctggtaaagggggacagagagcctcaccttgccacatatttgaacagtgatgagtttggggctggtttctgggaagggaacgtttatttagtaaagagcagaacacccttgcgttttgttgggacatgtggaccgtgagtcgcaaacactctggagaaggctgagatgccaccattcccacggggactgaagacacattacgtggacctggtcccaggctcagtgaggagatggcctcagctgtggggctggtccatgttgcccactcactccagtgggaagtggggaccacgccatagagggtctgctcccactgcagctcccggtgctctcgtgttctgggaaggcctgggtgtgtgcacaaggaggcccgggccagggacttcaccaggggctgggtcacaagggcacagggtgtgtggaaagcgctgtgggggaagagccggtcaccggagagtgagcaggcggagactccaagctgggctgagccagagcagaaggcgagggattcccagccggacgggggttctctcaccaacagctgtgatttcatcccgaagtggaagggggtctaaacagaacaggctgagagaggcgggactgggtcaagtgggtggagctcctccttgcatgactgcaactgtcggggctttccgccggctcacagcagttggggccagcggggagaagagaggcggaactgctgtgtcctcacgtggcgcagcctcaaactggcatccaggcactgggcccgtgcagagaaggcacctgcagagagcagggcagcccggcgcaggggcatgcgcctagaatcccagctactcggaaggccaaggcaggaggaccgcttgagtccagggattcaaggccaacctgggcaatagagcgagaccctgtctcttaaaaaacgatgatgatgaacacagaggacggggcactgtgctgggagccagggggcctgggaggagccgagaccagccttttacctcggggttttgaggccaacagggacgacagagacagtttctagttagagccttggctccatttttggatgatttagccccgagttcctgagtctattttatgccccttacgtactttgatagaactaaggaaatagtggttttgagtgaagggaaaggaaacccagaaacattttacgttgcttttacttctgtagtgtagattgccccggcccctctctgagccctgtagcatctgtgatagcttctgtcccttcatcggttcatgtcacagggattttctttcccaggaagcggacacggagagtcagccctaataaatgagcacatgccctggctgtacattttgaaacctg

SEQ ID NO: 2050 - protein, 184 aa, Homo sapiens
MASPAASSVRPPRPKKEPQTLVIPKNAAEEQKLKLERLMKNPDKAVPIPEKMSEWAPRPPPEFVRDVMGSSAGAGSGEFHVYRHLRRREYQRQDYMDAMAEKQKLDAEFQKRLEKNKIAAEEQTAKRRKKRQKLKEKKLLAKKMKLEQKKQEGPGQPKEQGSSSSAEASGTEEEEEVPSFTMGR

SEQ ID NO: 2051 - DNA, 2527 bp, Homo sapiens
gcgccccggccgggccactgggccacaggccacgcggccacgcagtccgagcgggagccgagccgggcggggcgagggcagctccgcctggctcccaccatgagtgctgagcttaacgtgcctatcgacccctctgctcctgcctgccctgagcccggccataagggcatggattaccgggactgggtccgccgcagctacctggaactggtcacctctaaccaccactcggtacaggccctgtcgtggcggaagctctacctgagcagggccaagctgaaggcctccagcaggacctccgccctcctctccggctttgccatggtggccatggtggaggtgcagctggagacgcagtaccagtacccgcggccgctgctgattgccttcagcgcctgcaccacggtgctggtggccgtgcacctgttcgccctcctcatcagcacctgcatcctgcccaatgtggaggccgtgagcaacatccacaacctgaactccatcagcgagtccccgcatgagcgcatgcacccctacatcgagctggcctggggcttctccaccgtgcttggcatcctactcttcctggccgaggtggtgctgctctgctggatcaagttcctccccgtggatgcccggcgccagcctggccccccacctggccctgggagtcacacgggctggcaggccgccctggtgtccaccatcatcatggtgcccgtgggcctcatcttcgtggtcttcaccatccacttctaccgctccctggtgcgccacaaaacggagcgccacaaccgcgagatcgaggagctccacaagctcaaggtccagctggacgggcatgagcgcagcctgcaggtcttgtgaggggccgagggccggggctgggagcggccctgtgcccgggagtccgcagaggcggggatttgtcagatgcagacattttgcaaggctgccgggtagttcaagaccaaagttttcctcttgtcttaataccataaggactggatgacttctcctgagatagaaccgtttggttcaatgagggactgtgttgctaagagcgttgggggcaaagccaggctggttccttggcctcggggtttcctgggtcggggacacggtgaagaggctccagcgggacctgcccatcagtcctgggccaggaggggctccaagcagcacccagcggtccgggggagtctcagacccggcatgcgtggctggcagacctgggagagccagggcagggttttgcgttcagagaaggattgccccagagacccgtggtggacttcatgggtgctgagtggcccgtgtgacagtgatgacacgaaggcttcggcgtttgagtgggtgcaggtgcacgccagggcttggtgcttccctgcctggccctggagggagctgggtggcctggcttcaggggaagacaggagccaggactcacgtcagcccagcaggtgtggggggtgctgcagccctcggcagtggggtcaggccctgggggatgtttccaatggtgggcagcctggccaggccggagaagacatgttcacgggcatctatcagatgcccccttgaggaggctgagttatttgagggctgctgcaaagtacgctaggctcaaattctcttttcccagccagagccctggccacacggactcagaggggccaccggggtggggaaaggacccctccccgacccccgcagccactggcctccagctctcggccacagaatggcctctaaggctgactcagccgctcccttgggctgtggcagcaggaggcgggggctctggctcaggccccggagcctgtgcagcttgcccatggccctaggcagcgaggggacagcctgggggacttcctgcctaggcaaggtcattggccgggcctggcctgtggatagtggggccaggggccggcccaggccaaatgagtgccctccttgttatgacaccaagtgactacaagggaggcaagacccctccaggcctcccagccgacactgggtcccaccacacacagtgactgtgccgtgcagtgcaggttctggccttttccttgaaggcatctggtaaacccgaagccacgctctcgggccgcacatgcacgccgcagcaccagctgccctgagctgcttgtacaaccaaacacctttcccctcttctccagctgtaacctggagagtcagccatgccttgtcttttgttctcatgaatagtcactggggccgggcgcagtgactcacgcctgtaatcccagcactttgggaggcctaggtgggcggatcacttgaggtcaggagttcgagaccagcctggccaacatggtgaaaccctgtctctactaaaaaaatacagaaaattagctgggcgtggtggcgggcgcctgtagccccagctacttgggaggctgaggcgggagaatggcaatggcgtgaacccgggaggcagagcttgcagtgagctgagatggcgccactgcactccagcctgggcgacagagccagactcaatctc

SEQ ID NO: 2052 - protein, 254 aa, Homo sapiens
MSAELNVPIDPSAPACPEPGHKGMDYRDWVRRSYLELVTSNHHSVQALSWRKLYLSRAKLKASSRTSALLSGFAMVAMVEVQLETQYQYPRPLLIAFSACTTVLVAVHLFALLISTCILPNVEAVSNIHNLNSISESPHERMHPYIELAWGFSTVLGILLFLAEVVLLCWIKFLPVDARRQPGPPPGPGSHTGWQAALVSTIIMVPVGLIFVVFTIHFYRSLVRHKTERHNREIEELHKLKVQLDGHERSLQVL

SEQ ID NO: 2053 - DNA, 2081 bp, Homo sapiens
gcgcgatggcggcggctgccgccgagacccccgaagtccttcgggaatgcggttgcaagggcatccggacctgtctgatctgcgagcggcagcgcggcagtgacccgccctgggagctgcccccagcgaaaacataccgtttcatttactgctccgacaccggctgggccgtgggcacagaggagtctgactttgagggctgggccttccccttcccaggagtgatgctgatcgaggactttgtgacccgggaggaagaagccgagttggtgcggctcatggaccgtgacccctggaagctctcccagtctggacggaggaagcaggactatggccccaaagtcaactttcggaaacagaagctaaagaccgagggcttctgcggcctccccagcttcagccgggaggtggtgcggaggatgggcctctacccggggctggagggcttccggcccgtcgagcagtgcaacctggactactgccccgagcggggctctgccattgacccccacctggacgacgcctggctgtggggggagcggctggtcagcctcaacctcctgtcccccaccgtgctgtccatgtgtcgggaggcgcccgggagcctgctcctctgctcggccccgtcggctgccccggaggccttggtggacagcgtgatagcacccagccggtcggtgctatgccaggaggtggaggtggccatccccttacccgcccgctccctgctggtcctcaccggggcggcacggcaccagtggaagcatgccatccaccgcagacacatcgaggcccgccgcgtctgcgtcactttccgggagctgtcggctgagtttggccctggagggaggcagcaagagctgggccaggaactgctgcggatcgccctctccttccagggaagacccgtgtgaaccgcctccttggctccagacttgactgatcccgggattgaaatgaggagcacagaacagggcctcctgcaactcacggggtttcaagagaagatggctgacccctgatgctgtgagcagtgtgagccctgcccaggagcaggttttgatgggaacgtacctccaggcagcccccttccacctggaccgtggccacacttttttggttatttagtttgtcacagtcttggggacatgggatcatttgagcttaaaaaatactgggggccgggcacagtggctcacacctgtaatcctaacactttgggaggctgaggtgggcggatcacttgatgccaggagttcgagaccagcctggccaacacggtgaaaacccgtctctacaaaaactacaaaaattagccgggtgtggtgactcacagccgtaatcccagctactcgggaggctaaggtgggagaattgcttgaacctgggaggcggaggttgcagtgagccaagatcacgccactgcactccagcctcggtgacagagcaagactgttttgaaaaaaaaaaaaaatgggaacattttaaatgattttcacctttattatgcatctattttcatggggtttcccgatatctcactgtccagtcccttcatttggggaatgtgttggattagggaacagggttgaagatttgaagtttagactaaagagctgggaacagcttcagagtcaggctcagcctgactcatgcttgacacccccacgcccagggagggttgggggatgtgaggagggcagggaaatctgagagcctccttccagccccataacgctgttaacaagtaggaaaaattaaagctcccggccaggcgcggtgactcacacctgtaatccgagtactttgcggggctcaggtgggaggattgcttgaggccagcctgggcaacatagtgagacccccatctctacaaaaaatacaaacattagctgggcgtctgggcatggtggcacacacctgtagtcccagctactcgaaaggctgaggcgggaggatggctttaccaccatgtcaaggctgcagtgagctcatgatcataccactgcacttaacttggcaacagagcaagaccctgtccctaaaataaataaaaggaaaacaaaaaaaaaaaaaaaaaa

SEQ ID NO: 2054 - protein, 302 aa, Homo sapiens
MAAAAAETPEVLRECGCKGIRTCLICERQRGSDPPWELPPAKTYRFIYCSDTGWAVGTEESDFEGWAFPFPGVMLIEDFVTREEEAELVRLMDRDPWKLSQSGRRKQDYGPKVNFRKQKLKTEGFCGLPSFSREVVRRMGLYPGLEGFRPVEQCNLDYCPERGSAIDPHLDDAWLWGERLVSLNLLSPTVLSMCREAPGSLLLCSAPSAAPEALVDSVIAPSRSVLCQEVEVAIPLPARSLLVLTGAARHQWKHAIHRRHIEARRVCVTFRELSAEFGPGGRQQELGQELLRIALSFQGRPV

SEQ ID NO: 2055 - DNA, 2220 bp, Homo sapiens
gttaacgcccacgggctcgcgcggcgccgcctcctgggctcagttaccgcggacgccagtgccgggctccaggagacgcagggcgacgccacacgccggggtggccgactgggtcagcgcgggctgcgcctcctcgccatgggccccctctcggcgcggctgctaatgcagcgcgggcgccccaagagcgaccggctggggaagatccggagtctggacctgtcaggattggagctgctttccgagcacctggaccccaaactcctgtgccgcctgacgcagctgcaggagcttgacctgtctaacaaccacctggagacgctgccggacaacctgggcctgtcccacctgcgtgtcctccgctgcgccaacaaccagctgggggatgttactgccttgtgccagttccccaagctcgaggaactcagcctggagggcaaccccttcctgacggtcaatgacaacctgaaagtctcctttctcctgcccacgctccgtaaggtcaatggcaaggatgcgtcctcaacttactctcaggtggagaacctgaatcgggagctgaccagcagggtcacagctcactgggagaagttcatggccacactgggtcctgaagaggaggctgagaaggcccaggcggactttgtgaagtcggctgtcagggatgtccgctacgggcccgagtccctcagcgagttcacccagtggcgggtgcggatgatctctgaggagctggtggccgccagtaggacccaggtgcaaaaggctaacagcccagagaagcccccagaagctggagctgcccacaagcccagggccagactggcggccttgaaacggccagacgacgtcccactcagcctctctcccagcaagcgggcgtgtgcctccccgtcggcccaggtggagggcagccctgtggcaggctccgatggcagccagcctgctgtgaagctggagcccctgcacttcctgcagtgccacagcaagaacaacagcccccaggacctcgagacccagctgtgggcctgtgccttcgagccggcctgggaggagggggccacatcccagaccgtggccacgtgcggcggggaggctgtgtgcgtaattgattgccagacgggcatcgtgctccacaagtacaaggcacccggcgaggagttcttttctgtggcctggaccgctctgatggtggtcacacaggctggccacaagaagcgctggagtgtgctggcggctgcaggcctacggggcctggtccggctgctgcacgtgcgtgccggcttctgctgcggggtcatccgagcccacaagaaggccatcgccaccctgtgcttcagccccgcccacgagacccatctcttcacggcctcctatgacaagcggatcatcctctgggacatcggggtgcccaaccaggactacgaattccaggccagccagctgctcacactggacaccacctctatccccctgcgcctctgccctgtcgcctcctgcccggacgcccgcctgctggccggctgcgagggcggctgctgctgctgggacgtgcggctggaccagccccaaaagaggagggtgtgtgaagtggaattcgtcttctctgagggctccgaggcatctggacggagagtggatgggctggcatttgtgaatgaggacatcgtggcctccaaggggagcggcctgggcaccatctgcctgtggagctggaggcagacgtgggggggccggggcagccagtccacggtggcagtggtggtcctggcgcggctgcaatggtcgtccaccgagttggcctacttctcgctcagcgcctgccctgataaggggattgtgctctgtggggatgaggagggcaacgtgtggctctacgacgtcagcaacatcctgaagcagccacccctgctgccggcagccctgcaggcccccacacagatcctgaagtggccccagccctgggcccttggccaggtggtgaccaagaccatggtgaacacagtggtggccaatgcctccttcacctacctcaccgccctgacggactccaacatcgtagccatctgggggaggatgtagcctcacaccatcgcaaaggaccagggacacagctaactaacttattcagctttgggccgatgggggtgggggggggtctttcagtgaatatttttattaaactctactgtggacaaaaaaaaaaaaaaaaaaaaaaaa

SEQ ID NO: 2056 - protein, 647 aa, Homo sapiens
MGPLSARLLMQRGRPKSDRLGKIRSLDLSGLELLSEHLDPKLLCRLTQLQELDLSNNHLETLPDNLGLSHLRVLRCANNQLGDVTALCQFPKLEELSLEGNPFLTVNDNLKVSFLLPTLRKVNGKDASSTYSQVENLNRELTSRVTAHWEKFMATLGPEEEAEKAQADFVKSAVRDVRYGPESLSEFTQWRVRMISEELVAASRTQVQKANSPEKPPEAGAAHKPRARLAALKRPDDVPLSLSPSKRACASPSAQVEGSPVAGSDGSQPAVKLEPLHFLQCHSKNNSPQDLETQLWACAFEPAWEEGATSQTVATCGGEAVCVIDCQTGIVLHKYKAPGEEFFSVAWTALMVVTQAGHKKRWSVLAAAGLRGLVRLLHVRAGFCCGVIRAHKKAIATLCFSPAHETHLFTASYDKRIILWDIGVPNQDYEFQASQLLTLDTTSIPLRLCPVASCPDARLLAGCEGGCCCWDVRLDQPQKRRVCEVEFVFSEGSEASGRRVDGLAFVNEDIVASKGSGLGTICLWSWRQTWGGRGSQSTVAVVVLARLQWSSTELAYFSLSACPDKGIVLCGDEEGNVWLYDVSNILKQPPLLPAALQAPTQILKWPQPWALGQVVTKTMVNTVVANASFTYLTALTDSNIVAIWGRM

SEQ ID NO: 2057 - DNA, 991 bp, Homo sapiens
aagaggcctcttattagggctctggtggcggcggcggcggacccttggggtctggacgcaacggcggcgggagcatgaacgcccctccagccttcgagtcgttcttgctcttcgagggcgagaagaagatcaccattaacaaggacaccaaggtacccaatgcctgtttattcaccatcaacaaagaagaccacacactgggaaacatcattaaatcacaactcctaaaagacccgcaagtgctatttgctggctacaaagtcccccaccccttggagcacaagatcatcatccgagtgcagaccacgccggactacagcccccaggaagcctttaccaacgccatcaccgacctcatcagtgagctgtccctgctggaggagcgctttcgggtggccataaaagacaagcaggaaggaattgagtaggggccagagggggctctgctcggcctgtgagccccgttcctacctgtgcctgaccctccgctccaggtaccacaccgaggagagcggccggtcccagccatggcccgccttgtggccacccctcaccctgacaccgacgtgtcctgtacatagattaggttttatattcctaataaagtatagcgggagagacctggatgtggacttgagcagcggtgacttcgcaagcaaatggattgtcaggcttgatgcaggcagatgacctgtttcaggggcgtccggctggcagggatgaattcattctggaccaaagatccggggtccaggggctgctgcgggggctgtgctgagccggagagaagtgtgcaaacccatgagctcccaagagtctctgctctagaagcctcaactcctgggcctgcctgtcagtcaaagcaggaacacttcttcctgcataactcgaaacacctttccacaggcttcttgtccacagtagagtttaataaaaatattcactgaaagacccccccccacccccatcggcccaaaaaaaaaaaaaaaaa

SEQ ID NO: 2058 - protein, 117 aa, Homo sapiens
MNAPPAFESFLLFEGEKKITINKDTKVPNACLFTINKEDHTLGNIIKSQLLKDPQVLFAGYKVPHPLEHKIIIRVQTTPDYSPQEAFTNAITDLISELSLLEERFRVAIKDKQEGIE

SEQ ID NO: 2059 - DNA, 918 bp, Homo sapiens
ggggggagaggtagagatgagacaagaggtagaggggagaggtagaggtagccacgagctgataattacagacaagagatgcggagtatgtgggggctcattatcctgcatagtctatctttgtatatctttgaacttttcaagaataaaaaagcttaaaaagtatacatggcctggtcctaccagagactcacccaatgccagcctccagccagggagagccaagtttgcattttcacacgcatctcacactcctctgcactctcaacttggagagctccaaacagggaaaccccaagccttgctggcttctgccaaccccctgagcagaagcatgggtccccctgatcaccacctcaccaccctcatcctgatctcactgtacactccctttcctggtctgctaagtagcgggtgttttccttgacactaacgctacagctagaccacggtgggcttggcaacaggtgtcttcccagatgctggcgttaccgctagaccaaggagccctctggtggccccgtccgggcataacagaaagctcgcactcttgtcttctggtcactcctcactgtccccttcagcctcctatctctgtatggcctggtgtttcctaggttatgattgtagagcgaggattattataatattggaataaagaataattactacaaactaatgattaatgattcatatataatcatatctaagatctatatctagtataactattcttattttatatattttattatactggaacagctcgtgccctcggtctcttgcctcggcacctgggtggcttgctgcccacatccaccaagtgcactttgggaggctgaggctggaggactgctggaggccaggagttcaataccagcctgggcaacatagggagaccccccccccaccatctcc

SEQ ID NO: 2060 - protein, 136 aa, Homo sapiens [sequence omitted]

SEQ ID NO: 2061 - DNA, 1221 bp, Homo sapiens
gggaggatggagagtggtttggggttttgggtcgggctctagtgtgatcaactgcagaagcattacaccgtggcctggtttctttactcagcccctgggttagatcccagccccccgcataggtccttttgctggaaaaggaagatggagtggtgggacgaatctgaggagtcgttggaggaggagccacggaaggtgctcgcccctgagcctgaggagatctgggtggcggagatgctgtgtggcctcaagatgaagctgaagcgacggcgagtgtcgctcgtgctccctgagcaccacgaggccttcaacaggctgcttgaggatcctgtcattaaaagattcttggcctgggacaaagatctgagggtgtcggacaagtatctcctggctatggtcatagcgtatttcagccgggccggcttcccctcctggcaataccaacgcattcatttcttcctggctctctacctggccaatgacatggaggaggacgacgaggactccaaacaaaacatcttccacttcctgtataggaagaaccgctctcgcatacccttgctccgtaagcgttggttccagttaggccattccatgaacccgagggccaggaagaaccgctctcgcatacccttgctccgtaagcgtcggttccagttataccgttccacgaacccgagggccaggaagaaccgctctcgcatacccttgctccgtaagcgtcggttccagttataccgttccatgaactcgagggccaggaagaaccgctctcagatagtcctgttccagaaacgacggttccacttcttctgttccatgagctgcagggcttgggtttccccagaggagttggaggagatccaggcttatgacccagagcactgggtgtgggcgcgagatcgcgctcacctttcctagagctccagggaccggggaggcctgaggtcatcggcctgagagaagaacaccggacccaggggagatgtggattttcagcaggaactttattccaatgctaatggcagacaccaggcaggaggagaggaaccatttgtgcagatcatctagaagaacctggaccattcttgatggagctgaatacagtgatcacgttgtcctcctaggagcaggggtggggggaggggggtggggtccttctaggagtccttggagaaaagtaagaaaccaggagcgtttccagttccaccctttcctggg

SEQ ID NO: 2062 - protein, 258 aa, Homo sapiens
MEWWDESEESLEEEPRKVLAPEPEEIWVAEMLCGLKMKLKRRRVSLVLPEHHEAFNRLLEDPVIKRFLAWDKDLRVSDKYLLAMVIAYFSRAGFPSWQYQRIHFFLALYLANDMEEDDEDSKQNIFHFLYRKNRSRIPLLRKRWFQLGHSMNPRARKNRSRIPLLRKRRFQLYRSTNPRARKNRSRIPLLRKRRFQLYRSMNSRARKNRSQIVLFQKRRFHFFCSMSCRAWVSPEELEEIQAYDPEHWVWARDRAHLS

SEQ ID NO: 2063 - DNA, 5579 bp, Homo sapiens
ggaccccggtgtctggcttcccccgagccgggaccccgcgatggccaagcgcagctcgctgtacatccgcatcgtggaggggaagaaccttcccgccaaggacatcactggcagcagcgacccctactgcatcgtgaaggtggacaatgagcccatcatcaggacagccacagtgtggaagaccctgtgccccttctggggtgaggagtaccaagtgcacctgccgcccaccttccacgctgtggctttctatgtcatggatgaggatgccctcagccgggacgacgttatcggaaaggtctgccttacaagggacaccatagcctctcaccctaagggtttcagcgggtgggcccacctgacggaggtcgaccccgacgaggaggtgcagggcgagatccacctgcggctggaagtgtggccaggggcccgggcctgccggctacgctgctctgtgctggaggccagggatctggccccaaaggaccgcaatggcacatctgaccccttcgtccgagtgcgctacaagggccggacacgggagacctcgatcgtgaagaagtcatgctacccacgctggaatgagacgtttgaatttgagctgcaggagggggccatggaggcactgtgcgtggaggcctgggactgggaccttgtcagccgaaacgacttcctgggcaaagtggtgattgatgtccagagactgcgggtggtgcagcaggaggagggctggttccggctgcagcccgaccagtccaagagccggcggcatgacgagggcaacctgggctccttgcagctggaggtgcggctgcgggacgagacggtgctgccctccagctactaccagccactggtgcacctgctgtgccacgaggtcaagctgggcatgcagggcccagggcagctgatcccactcatcgaggagacaaccagcaccgagtgtcgccaggacgtggccacgaacctgctcaagctcttcctggggcaggggctggccaaggacttcctggacctgctcttccagctggagctgagtcgcaccagtgagaccaacaccctgttccggagcaactctctggcctcaaagtccatggagtcttttctgaaggtggccgggatgcagtacctgcacggcgtcctgggccccatcatcaacaaggtgtttgaggagaagaagtacgtggagctggaccccagcaaagtggaagttaaggatgtagggtgctccgggctgcaccgcccgcagaccgaggccgaggtgctggagcagagcgcgcagacgctgcgcgcccacctgggggccctgctgagcgcgctcagccgctcggttcgcgcgtgccccgccgtggtgcgcgccaccttccgccagctcttccggcgcgtgcgcgagcgcttccccggcgcccagcacgagaatgtaccgttcatcgccgtcaccagcttcctgtgcctgcgcttcttctctcccgccatcatgtcgcccaagctcttccacctgcgggagcgccacgcggacgcccgcaccagccgcaccctgctcctgttggccaaggcagtccagaacgtgggcaacatggacacgccggcttccagggccaaggaggcttggatggagccgctgcagcccaccgtgcgccagggcgtggcgcagctgaaggacttcatcaccaagctcgtggacatcgaggagaaggacgagctggacctgcagcggacgctgagtttgcaggcgccacctgtgaaggaggggccactcttcatccacaggaccaagggcaagggccccctcatgtcctcctccttcaagaagctctacttctccctcactaccgaggccctcagcttcgcgaagatgcccagctccaagaaaagcgccctcatcaagttagccaacatccgggcagcggaaaaggttgaggaaaagagctttggcggctcgcacgtcatgcaggtcatctacacggacgacgccggcaggccccagactgcctacctgcagtgcaagtgtgtgaatgagcttaaccagtggctgtctgcgctgcggaaggtgagcatcaacaacaccggactgctgggctcctaccaccctggcgtcttccgtggggacaagtggagctgctgccaccaaaaagagaagacaggtcagggctgcgataagacccggtcacgggtgaccctgcaggagtggaatgaccctcttgaccatgaccttgaggcccagctcatctaccggcacctgctgggcgtggaggccatgctgtgggagaggcaccgggagctgagcgggggcacagaggcaggcacggtgcccacgagccctggcaaagtccccgaggactcattggcccggctgctccgggtgctgcaggacctccgcgaggcccatagctccagcccggccggctccccaccctcagagcccaactgcctcctggagctgcagacgtgaggcccgccctacgctccccttgctgagtcccctgccaagcgctcggagcccccccaggacactctgcaccccctcaccccggtcctcctcattagggtgcagggcctaggtctcttccaggtgggggaggggggagagtcaggaataaggggatccccagaagtgcagagctgagcaggcttgggcctgtcatggctggccggaagtgtccccagctccctacagacgctgtagccatcactgcctctccagggaccctcctctcctgcccaggacagacccagccagaaccactgctaggatgggccgcacccaggggtctggcctccagggacctagagaatgggagggagaacggggccccaggagacccggccgccaccccacccgctacccttgggtgccacagggctgtgctgttgccaacagtaaacctgctcttactgtccaggctctggggtcttgtgatgagggtctggggagaaagtgggcccggggggaccccggaggctgtcggtggatgtgccgatgatggggctgacagtatgggctctgggcatccctgttcccccccctttcttccccccactcttctggggtcgggggttcctttcccttcccagttgctgtccctgggtcccctctttcatgtcccacaggccacagagcccagtgtgtccaaccagctgttctctcctcaaagcagcccccaagcaagtcccttctctagggtgtccctgaggacagcacagaggcgggactcagagaccccattcctcttcacgcagcccttaccccaagccctctagctgtgtggctggcagtgttggccacgtaggggctcccatccccccaccattgtgtcacatgggctgccaggctcagctcccagctgcgtccacagtgacctggatcagggtggggacaaggactggaccctccttctccagaaggccttcagctcttgccttgccatgcagtcacctccttccccctctgaccccagatcccaaaggtgcaccgttgccccagcccctttctggccccatggggtttctctgatgccttcatcatagaggcccggggctggtccgatggttggcaaaacttgactccggcccagtccccactcttggggacttagaacccctgctgtcctgggatctggcctgcctttctttggtcagtccctgtggtcccccaccagctccccctcccatagggctgcccaccaagccctgcccccagcccaagaggagcccccactgcctgcggggcagtgatgtctggccaccggctcacaccaatgacttggtcctggggtggcagaagcagcaggtgacaggagcagggcccctgtccctctcttctggccctgtggtacccaggccacacgttgtgcccgctcttggggctgaccggctgtagggaccaccagccgctgctactgtgggccgccccggggcagggtgggcagggcttttgtgggttatgaggacacagaagtccctgaggcccccagacctggctcagccaacctccttcctcccccggttgccccccactctaaagcctcctccctcccagcgtccactggctccaggctcctcacaacagcagctcatagacacggggcgtctccaggtggtcccagccctccagatgtttctagctctccaggtgggcgctgttttcacgtctgcctgcatccattcattccttcattcctcacctttatcctgttatctctatttttttaagctaccaggaaggaaagggaagaagagatcacgaaactgggacccccagaagggaggagtgggctttgaacttagacatctacctcagagctcaaataggttgtttaaaatcacattcaattttcagatgaaggggaactttatagttttttttttttttttttttttttttggggcggagtctcactgtgttgcccaggctggagtgcaaatggcttgatcttggttcactgcaacctctgcctcccaggttcaagcaattctcttgcctcggcctcccgagtagctgggactggaggcgtgtgccaccatgcccagctaattcttgtatttttagtagagacggagtttctccatgttggccagactggtctcgaactcctgacctcaggtgatctgaccgccttggcctccgaaagtgctgagattacagttgcgagccactgtgcgtggccagaactttataataagagacttgaagctgggtgtgacggtgcacgcctctggtcccagctgctcgggaggccgggacagaaggatcaccttgaggccaggagtttaaggccagcctgggcaacatagcaaaacctagtccctaaaattaaaaaaaaaaaaaaaaaaaaaggaaaataaaggagacttgaaatttttgaactaaatagtggtgatggctacacattgtgaatgtaattaacaccactgagttaaacacttaaaatggttaaaatggcaaattgtatgttatacctattttactacaataaaaagtataaaaaagagaagatatttaggtgacttacagcaaccaattgcaacaaaacaaaatgttaagaaatgatctttttatgaggcaattggaaatttgaacactgatcaactataggatgattggaattattaatttttaaaggtgtgataagatgctgcacttggctgggcacagtggcacatgcctgtaatcccagctacttggcaggctgaggtgggagaatcgcttgagctcaggagttcgagaccagcctgggcaacgtggcgaaatccccgtctttacaaaaacaaacaaacaaacaaaaaagatattgcagttgtgttgtaagcgtccttatctttcagagctacatagtggaatgtttatggaatatttaggataaatgatataggcatttgggatttgctgcaaaatgacccagaggcaggggtcagggggagaggtagagatgagacaagaggtagaggggagaggtagaggtagccacgagctgataattacagacaagagatgcggagtatgtgggggctcattatcctgcatagtctatctttgtatatctttgaacttttcaagaataaaaaagcttaaaaagtat

SEQ ID NO: 2064 - protein, 803 aa, Homo sapiens
MAKRSSLYIRIVEGKNLPAKDITGSSDPYCIVKVDNEPIIRTATVWKTLCPFWGEEYQVHLPPTFHAVAFYVMDEDALSRDDVIGKVCLTRDTIASHPKGFSGWAHLTEVDPDEEVQGEIHLRLEVWPGARACRLRCSVLEARDLAPKDRNGTSDPFVRVRYKGRTRETSIVKKSCYPRWNETFEFELQEGAMEALCVEAWDWDLVSRNDFLGKVVIDVQRLRVVQQEEGWFRLQPDQSKSRRHDEGNLGSLQLEVRLRDETVLPSSYYQPLVHLLCHEVKLGMQGPGQLIPLIEETTSTECRQDVATNLLKLFLGQGLAKDFLDLLFQLELSRTSETNTLFRSNSLASKSMESFLKVAGMQYLHGVLGPIINKVFEEKKYVELDPSKVEVKDVGCSGLHRPQTEAEVLEQSAQTLRAHLGALLSALSRSVRACPAVVRATFRQLFRRVRERFPGAQHENVPFIAVTSFLCLRFFSPAIMSPKLFHLRERHADARTSRTLLLLAKAVQNVGNMDTPASRAKEAWMEPLQPTVRQGVAQLKDFITKLVDIEEKDELDLQRTLSLQAPPVKEGPLFIHRTKGKGPLMSSSFKKLYFSLTTEALSFAKMPSSKKSALIKLANIRAAEKVEEKSFGGSHVMQVIYTDDAGRPQTAYLQCKCVNELNQWLSALRKVSINNTGLLGSYHPGVFRGDKWSCCHQKEKTGQGCDKTRSRVTLQEWNDPLDHDLEAQLIYRHLLGVEAMLWERHRELSGGTEAGTVPTSPGKVPEDSLARLLRVLQDLREAHSSSPAGSPPSEPNCLLELQT

SEQ ID NO: 2065 - DNA, 1552 bp, Homo sapiens
acggggggcgatgagccgatccttgggcgggtttgccccgccggagtaatccggaagaggcctcttattagggctctggtggcggcggtggcggacacttggggtctggacgcaacggcggcgggagcatgaacgcccctccagccttcgagtcgttcttgctcttcgagggcgagaagatcaccattaacaaggacaccaaggtacccaaggcctgcttattcaccatcaacaaagaagaccacacactgggaaacatcattaaatcacgtgcctgcttccccttcgccttctgccgtgattgtcagtttcctgaggcctccccagccacgcttcctgtacagcctgcagaactctgccccagagcacatcagctatgtgccccagctctcaaacgacaccttggcggggaggctcaccctgtccaccttcacgctggagcagcctctaggccagttcagcagccacaacatctctgacttggataccatctggctggtggtggccctcagcaacgccacccagagcttcacggccccacggacaaaccaggacatccctgctcctgccaacttctcccagaggggctactatctcacactgagggccaaccgggtgctgtaccagaccagaggccagctccatgtcctccgcgtcggcaatgatacccactgccaaccaacaaaaattggctgcaaccatcccctaccaggacccggcccctacagggtgaagttcctggtgatgaatgacgaaggacccgtggctgaaaccaagtggtccagcgacactcgcctgcagcaagcccaggcacttcgggctgtccccggcccccagagcccgggcaccgtggtcatcatcgccatcctgtctatcctcctggccgtcctcctcacggtcctcctggctgtgctcatatacacctgcttcaacagctgcaggagcacttccctatcaggcccagaggaggcagggagtgtgagaagatacaccacgcacctcgcgttcagcactcctgccgagggggcttcctgaggggttccagaggggcccacgtgtccctccacctcctccctggcccaggctgcagagcctgagctgggacacgccctgaagcttctggaccctgagagagattgtttcttttctttactatttttttttttttttttgagacggagtctcactctgtcgccaggctggcgcgatcttggctcactgcaacctctgcctcacgggttcaagcgattttcctgcttcagcctcctgagtagctgggactacaggcacacgccaccatgcccagctcatttttgtatttttagtagagatggggtttcaccatgttggccaggatggcctccatctcttgaccttgtgatccgcccgactcggcctcccaaaatgctgggattacaggcgtgagccatcaagtctggcgagagagattgtttctagatgagggtgggggcgggtgtccttagcccaaagcttgtgccagtctctatcagaaataaatgcccccaaaacctcaaaaaaaaaaaaaaaaaaa

SEQ ID NO: 2066 - protein, 116 aa, Homo sapiens
MNAPPAFESFLLFEGEKITINKDTKVPKACLFTINKEDHTLGNIIKSRACFPFAFCRDCQFPEASPATLPVQPAELCPRAHQLCAPALKRHLGGEAHPVHLHAGAASRPVQQPQHL

SEQ ID NO: 2067 - DNA, 1727 bp, Homo sapiens
acggggggcgatgagccgatccttgggcgggtttgccccgccggagtaatccggaagaggcctcttattagggctctggtggcggcggtggcggacacttggggtctggacgcaacggcggcgggagcatgaacgcccctccagccttcgagtcgttcttgctcttcgagggcgagaagatcaccattaacaaggacaccaaggtacccaaggcctgcttattcaccatcaacaaagaagaccacacactgggaaacatcattaaatcacaactcctaaaagacccgcaagtgctatttgctggctacaaagtcccccaccccttggagcacaagatcatcatccgagtgcagaccacgccggactacagcccccaggaagcctttaccaacgccatcaccgacctcatcagtgagctgtccctgctggaggagcgcttccggacgtgcctgcttccccttcgccttctgccgtgattgtcagtttcctgaggcctccccagccacgcttcctgtacagcctgcagaactctgccccagagcacatcagctatgtgccccagctctcaaacgacaccttggcggggaggctcaccctgtccaccttcacgctggagcagcctctaggccagttcagcagccacaacatctctgacttggataccatctggctggtggtggccctcagcaacgccacccagagcttcacggccccacggacaaaccaggacatccctgctcctgccaacttctcccagaggggctactatctcacactgagggccaaccgggtgctgtaccagaccagaggccagctccatgtcctccgcgtcggcaatgatacccactgccaaccaacaaaaattggctgcaaccatcccctaccaggacccggcccctacagggtgaagttcctggtgatgaatgacgaaggacccgtggctgaaaccaagtggtccagcgacactcgcctgcagcaagcccaggcacttcgggctgtccccggcccccagagcccgggcaccgtggtcatcatcgccatcctgtctatcctcctggccgtcctcctcacggtcctcctggctgtgctcatatacacctgcttcaacagctgcaggagcacttccctatcaggcccagaggaggcagggagtgtgagaagatacaccacgcacctcgcgttcagcactcctgccgagggggcttcctgaggggttccagaggggcccacgtgtccctccacctcctccctggcccaggctgcagagcctgagctgggacacgccctgaagcttctggaccctgagagagattgtttcttttctttactatttttttttttttttttgagacggagtctcactctgtcgccaggctggcgcgatcttggctcactgcaacctctgcctcacgggttcaagcgattttcctgcttcggcctcctgagtagctgggactacaggcacacgccaccatgcccagctcatttttgtatttttagtagagatggggtttcaccatgttggccaggatggcctccatctcttgaccttgtgatccgcccgactcggcctcccaagatgctgggattacaggcgtgagccatcaagtctggcgagagagattgtttctagatgagggtgggggtgggtgtccttagcccaaagcttgtgccagtctctatcagaaataaatgcccccaaaacctcaaaaaaaaaaaaaaaaaaa

SEQ ID NO: 2068 - protein, 115 aa, Homo sapiens
MNAPPAFESFLLFEGEKITINKDTKVPKACLFTINKEDHTLGNIIKSQLLKDPQVLFAGYKVPHPLEHKIIIRVQTTPDYSPQEAFTNAITDLISELSLLEERFRTCLLPLRLLP

SEQ ID NO: 2069 - DNA, 991 bp, Homo sapiens
acggggggcgatgagccgatccttgggcgggtttgccccgccggagtaatccggaagaggcctcttattagggctctggtggcggcggtggcggacacttggggtctggacgcaacggcggcgggagcatgaacgcccctccagccttcgagtcgttcttgctcttcgagggcgagaagatcaccattaacaaggacaccaaggtacccaaggcctgcttattcaccatcaacaaagaagaccacacactgggaaacatcattaaatcacaactcctaaaagacccgcaagtgctatttgctggctacaaagtcccccaccccttggagcacaagatcatcatccgagtgcagaccacgccggactacagcccccaggaagcctttaccaacgccatcaccgacctcatcagtgagctgtccctgctggaggagcgcttccgggtgagggcggggcctggaggggcagacggggtgggctggacactggcccgtgtgcccaggcctgggacagccctggcctgtttcttcggaggtcctcagggagaggcggcggtgatggaagaacagggacttccaccacaggctccaggacatgtggactgaggggctgtggagtctgggcctgtggctcccgtctgccccatgggacttctgtagtgctgcagggtccctcgggtgctgtgggccagatccgggcggggacctactgtcctttgggggtgctcttctacgtcccttgtcggtgattggcaaggcctggtccttccaggcctctgggaggcagctcaccccagggtggcccacacctgttcctagcagggcgcctgggaatctagaacagtttagaggggaaagagccacagcaaagaaaagccgaggcagggtgatcacgaggtcaggagttcaagaccagcctggcaaacatggtgaagccctgtttctactaaaaatacaaaaattagctaggcatggtggcatgtgctgtagtc

SEQ ID NO: 2070 - protein, 158 aa, Homo sapiens
MNAPPAFESFLLFEGEKITINKDTKVPKACLFTINKEDHTLGNIIKSQLLKDPQVLFAGYKVPHPLEHKIIIRVQTTPDYSPQEAFTNAITDLISELSLLEERFRVRAGPGGADGVGWTLARVPRPGTALACFFGGPQGEAAVMEEQGLPPQAPGHVD

SEQ ID NO: 2071 - DNA, 2255 bp, Homo sapiens
cttaggcaaggggtccaggtcagagtttagagctttcaaatcccaacttgcccctggggattgcgcggctgatgtttagaacgcctagtcaagccaaccggctcgctcttgtttcagcaaaccctgacttacgtctcctatttgacttgaggcggcacagtggccaagtcgattggccgtggcaagtgaccctccctgtggctgaagtgttctgaggactggcgagagaggcgcgccatgcttgccccctgctcaggttgggagcttggctgcttccgtctctgtctccgtcaggtccgactgtgggctggcgctgggcgctgggcttgctgggcttgccaagccaggccgtacagctcaggtgggagcgagcgctggcccggatcggagactgaggtccctccgcctggcccggcgcgccgaactctgaaggagtggacactgcaggtgagcccgtttggtcggctgcgggcgcggctcccgtgccacctggccgtgaggcccctggaccccctcacctacccggatggcgaccgcgtgctggtcgcggtgtgcggcgtggagggcggcgtgcggggcctggacggcctgcaggtgaagtacgacgaggatctggaggagatggccattgtgtctgatactatccacccccaggcgtccgtggaggtttagatatcaagtcatcagggtctggctgtgtaaaagttcaaagtattgagggtgataattgcaaaattgaaacagagcatgggactagtatcttgcagtctgttaagggtcaaaaattgcatgttcaaacaaaaggaggcaaagtgatctgtctgggaacagtttatggaaatatagatattcatgcatcagataaaagtgctgtgaccatagataaactgcagggaagttctgttactgtatctaccgaagatggtttgctgaaagccaagtatctttatacagaatcatcatttctgtcttctgctgctggggatattacattaggaagtgttcatggtaatataacattacaaagcaagatgggtaacatcacagtagattcgtcttctggatgtctaaaagcctcaactaatcagggtgccatagatgtttatgtcagccaactggggaaagtggaattgaaatcccataaaggttctattattgtcaaggtcccatcttcacttcaagctcatttacagttatcagggaaagaggttgatgtgaactcagaagtccatgttcaggaaatggctgaagttcgtaaagatgatgttgtaacagtgactggactcatgaatcaagcaagcaaacgtgaaaaatggattaaggctgatgccccaaaaggcactgtaagttttagaaggcaaagttggtttcagtccctgaaactgcaggactaaaactgatttgagttggatttatgatttttaacaatgattcgcagatctgtgactacaaaaatgtaaatcccaccattcatataaaggttgaaaacaacaaattgagaatgaatactggtgaactgttttgggaggctttttcaaaatttgtgctttgctattgtattcattttctactgctctgtaacaaattaccacaaatttagcagcataaaataatactcatttacagctatgtctaggttctccgctcagggaatcacaaggctagaaatcaagattttggccaggctgagttctcatctggagtctctgggaagaaatctacttccaacttcattcagattattgggaaaatccagttccttgtgactggatgactgaggtctccattttcttgctggctgtcagccagcaatcactctaagcttctagaggccacccacatgccttctcatgttgcccctccatcttcaagccagcagtgatgcgctgagttcttctcatgctttgaatatctgacttcttctgcagccagctggaagaatatatacttttaaagggctcacttgattaggtcaggcccacccaggataacctttgttttgccatataatgtaacattcataggagtgatggcccatcacattcagttttcactcccactcaaggaaaggagattatacaaaggcatccatcatgtggggacaattagcttagaattctttataatgtagctctcacatgacaggttttctacttagtaccttttatggcatcaatgtaaatttaagctgtaaataaaaaacaaatatgtgaagcaaaaaaaaaaaaaaaaaaaaaaaaaaaaaaaaaaaaaaa

SEQ ID NO: 2072 - protein, 144 aa, Homo sapiens
MLAPCSGWELGCFRLCLRQVRLWAGAGRWACWACQARPYSSGGSERWPGSETEVPPPGPARRTLKEWTLQVSPFGRLRARLPCHLAVRPLDPLTYPDGDRVLVAVCGVEGGVRGLDGLQVKYDEDLEEMAIVSDTIHPQASVEV

SEQ ID NO: 2073 - DNA, 2744 bp, Homo sapiens
agaatgcgagaaagtgaagtcaaattcggacttgtaggcgatcagggctgaagacgctgattagagagaaaacagagggtgatggtggctgcacgtggggaatgggtgacatctcccagggggaatgagcacaaggcccagatcggaaaccccaaactcagattttaaggtttggacaagaagtacctgaggagtggaggagtgagaaagaagtgccagagagcctgaggaggaaaatcagcagactggcattatgaagaatgttgtcagaagtagggagtaggcactagtcacctaagataaggagctggattctgcccaaggcactgttatgtggtatacttgttacatgtcctgaggatccgctgaggtatttagagggaatgatcatggttataatcaaaagtggtcttcagaatcttctttgatgactccggaattgatgataaaagcctgtagcttttatactggacatttagtaaagactcatttttgcacttggagagacatagctcgtacaaatgaaaatgtcgtcctggctgaaaaaatgaacagagcagtgacatgctacaatttcagacttcaaaaatctgtatttcatcactggcactcttatatggaagaccagaaagaaaaacttaaaaatatgctattgcggatacaacagatcatctattgtcacaagctaaccattatcctaacaaaatggcggaatacagcaagacataagagtaaaaagaaagaagatgagctgatattaaaacatgaacttcaattgaaaaaatggaaaaataggttaatactcaaaagagctgctgcagaagaatccaattttcctgaacgaagttcttctgaagtctttcttgtagatgagactctaaaatgtgacatttcactgttacctgaaagagcaatattacagattttcttctacctcagtttaaaagatgtgataatatgtggtcaagttaatcatgcctggatgttgatgacacaactaaactcactgtggaatgctattgatttttcctcagtgaaaaatgtgattccagataaatatatagtgtctactttgcaaaggtggcgtttaaatgtgctgcgtttgaattttcgtggttgtcttctccgacccaaaactttcagatctgtcagccactgtaggaacttgcaagagttgaatgtctctgactgcccaacattcacagatgaatcaatgagacacatttctgagggctgcccgggggtcctgtgtctcaatctgtctaacacaactatcaccaacaggacgatgcgactcctgccgaggcacttccacaacttacagaatcttagtttggcttattgcagacggttcacagacaaaggcttacagtacctgaacttggggaatggatgccacaagctcatctatctggacctctctggctgcacccagatttcagtccaaggcttcaggtacattgcaaacagctgcactggaattatgcatcttaccattaatgacatgccaactctgacggacaactgtgtaaaagctttagttgaaaaatgctctcgtattacatcgctggttttcactggtgcaccgcatatctccgattgtactttcagagctctttctgcttgtaaactcagaaagatccgatttgaaggaaataaaagggttactgatgcatccttcaaatttatagacaagaattatccaaatctcagtcacatttatatggctgactgcaagggaataacagacagcagcctcagatccctttcacctttgaagcaactgactgtgttgaatttggcaaattgtgtaagaattggtgatatgggactaaagcaatttcttgatggtcctgcaagcatgaggataagagagctaaatttaagcaactgtgtgcggctaagtgatgcctctgttatgaaactatctgagcgctgccctaatttaaactacttgagtttacgaaattgtgaacatttgactgcccaaggaattggatatattgtaaacatcttttccttggtatcaatagatctctctggaacagacatctctaatgagggtttgaatgtgctttccagacataaaaaattgaaggaactttctgtatctgaatgttatagaatcactgatgatggaattcaggcattctgcaaaagctcactgatcttggaacatttggatgtctcttattgctcccagctgtcagatatgattatcaaagcactggccatttactgcattaacctcacatctctcagcattgctggctgtccaaagattactgactcagcaatggagatgttatcggcaaaatgccattacctgcacattttggatatctctggttgtgtcttgcttactgaccaaatccttgaggaccttcagataggctgcaaacaactccggatccttaagatgcaatactgcacaaatatttccaagaaggcagctcaaagaatgtcatctaaagttcagcagcaggaatacaacactaatgaccctccacgttggtttggctatgatagggaaggaaaccctgttacagagcttgacaacataacatcatctaaaggagccttagaattaacagtgaaaaagtcaacatacagcagtgaagaccaagcagcgtgaccttcagcctcaagcaggaagaacaaaaaatcaagaacttggcaagttttctccatttgttgcaagtatgtttactagctgaatctcaataacaatgtaaacaagcaac

SEQ ID NO: 2074 - protein, 735 aa, Homo sapiens
MTPELMIKACSFYTGHLVKTHFCTWRDIARTNENVVLAEKMNRAVTCYNFRLQKSVFHHWHSYMEDQKEKLKNMLLRIQQIIYCHKLTIILTKWRNTARHKSKKKEDELILKHELQLKKWKNRLILKRAAAEESNFPERSSSEVFLVDETLKCDISLLPERAILQIFFYLSLKDVIICGQVNHAWMLMTQLNSLWNAIDFSSVKNVIPDKYIVSTLQRWRLNVLRLNFRGCLLRPKTFRSVSHCRNLQELNVSDCPTFTDESMRHISEGCPGVLCLNLSNTTITNRTMRLLPRHFHNLQNLSLAYCRRFTDKGLQYLNLGNGCHKLIYLDLSGCTQISVQGFRYIANSCTGIMHLTINDMPTLTDNCVKALVEKCSRITSLVFTGAPHISDCTFRALSACKLRKIRFEGNKRVTDASFKFIDKNYPNLSHIYMADCKGITDSSLRSLSPLKQLTVLNLANCVRIGDMGLKQFLDGPASMRIRELNLSNCVRLSDASVMKLSERCPNLNYLSLRNCEHLTAQGIGYIVNIFSLVSIDLSGTDISNEGLNVLSRHKKLKELSVSECYRITDDGIQAFCKSSLILEHLDVSYCSQLSDMIIKALAIYCINLTSLSIAGCPKITDSAMEMLSAKCHYLHILDISGCVLLTDQILEDLQIGCKQLRILKMQYCTNISKKAAQRMSSKVQQQEYNTNDPPRWFGYDREGNPVTELDNITSSKGALELTVKKSTYSSEDQAA

SEQ ID NO: 2075 - DNA, 1997 bp, Homo sapiens
tgaatgcagcccattctctggagaacttcctcacacaccacagcaaagagaagactgaaagacaaacctgggtgcagccagagaggtccagatagatgagcttgtggcatccattccccaagttcagcctagggactccacgtaccccagctgggtctcattgttccagaactgcattagttaagattacccagacttggatttcaaaggaatactttcattgttccgtctgtaacacgaagtaattggggccagctggatgtcaggatgcgtgtggttaccattgtaatcttgctctgcttttgcaaagcggctgagctgcgcaaagcaagcccaggcagtgtgagaagccgagtgaatcatggccgggcgggtggaggccggagaggctccaacccggtcaaacgctacgcaccaggcctcccgtgtgacgtgtacacatatctccatgagaaatacttagattgtcaagaaagaaaattagtttatgtgctgcctggttggcctcaggatttgctgcacatgctgctagcaagaaacaagatccgcacattgaagaacaacatgttttccaagtttaaaaagctgaaaagcctggatctgcagcagaatgagatctctaaaattgagagtgaggcgttctttggtttaaacaaactcaccaccctcttactgcagcacaaccagatcaaagtcttgacggaggaagtgttcatttacacacctctcttgagctacctgcgtctttatgacaacccctggcactgtacttgtgagatagaaacgcttatttcaatgttgcagattcccaggaaccggaatttggggaactacgccaagtgtgaaagtccacaagaacaaaaaaataaaaaactgcggcagataaaatctgaacagttgtgtaatgaagaagaaaaggaacaattggacccgaaaccccaagtgtcagggagacccccagtcatcaagcctgaggtggactcaactttttgccacaattatgtgtttcccatacaaacactggactgcaaaaggaaagagttgaaaaaagtgccaaacaacatccctccagatattgttaaacttgacttgtcatacaataaaatcaaccaacttcgacccaaggaatttgaagatgttcatgagctgaagaaattaaacctcagcagcaatggcattgaattcatcgatcctgccgcttttttagggctcacacatttagaagaattagatttatcaaacaacagtctgcaaaactttgactatggcgtattagaagacttgtattttttgaaactcttgtggctcagagataacccttggagatgtgactacaacattcactacctctactactggttaaagcaccactacaatgtccattttaatggcctggaatgcaaaacgcctgaagaatacaaaggatggtctgtgggaaaatatattagaagttactatgaagaatgccccaaagacaagttaccagcatatcctgagtcatttgaccaagacacagaagatgatgaatgggaaaaaaaacatagagatcacaccgcaaagaagcaaagcgtaataattactatagtaggataaggtagaaattgttctgattgtaattagttttgtattttctatactggtgttagaaaacatatgtttacatttgattaactgtgttgcctatttatgcagggtaatccagctaaaggaagctttctttaattataagtattattgtgactattatagtaatcaagagaatgctatcatcctgcttgcctgtccatttgtggaacagcatctggtgatatgcaattccacactggtaacctgcagcagttgggtcctaatgatggcattagactttcataatgtcctgtataaatgtttttactgcttttagaaaataaagaaaaaaaacttggttcaaaaaaaaaaaaaaaaaaaaaaaaaaaaaaaaaaaaaaaaaaaaaaaaaaaaaaaaaaaaaaaaaaaaa

SEQ ID NO: 2076 - protein, 441 aa, Homo sapiens
MRVVTIVILLCFCKAAELRKASPGSVRSRVNHGRAGGGRRGSNPVKRYAPGLPCDVYTYLHEKYLDCQERKLVYVLPGWPQDLLHMLLARNKIRTLKNNMFSKFKKLKSLDLQQNEISKIESEAFFGLNKLTTLLLQHNQIKVLTEEVFIYTPLLSYLRLYDNPWHCTCEIETLISMLQIPRNRNLGNYAKCESPQEQKNKKLRQIKSEQLCNEEEKEQLDPKPQVSGRPPVIKPEVDSTFCHNYVFPIQTLDCKRKELKKVPNNIPPDIVKLDLSYNKINQLRPKEFEDVHELKKLNLSSNGIEFIDPAAFLGLTHLEELDLSNNSLQNFDYGVLEDLYFLKLLWLRDNPWRCDYNIHYLYYWLKHHYNVHFNGLECKTPEEYKGWSVGKYIRSYYEECPKDKLPAYPESFDQDTEDDEWEKKHRDHTAKKQSVIITIVG

SEQ ID NO: 2077 - DNA, 2002 bp, Homo sapiens
tataacgtgagggctgaatgcagcccattctctggagaacttcctcacacaccgcagcaaagagaagactgaaagacaaacctgggtgcagccagagaggtccagatagatgagcttgtggcatccattccccaagttcagcctagggactccacgtaccccagctgggtctcattgttccagaactgcattagttaagattacccagacttggatttcaaaggaatactttcattgttccgtctgtaacacgaagtaattggggccagctggatgtcaggatgcgtgtggttaccattgtaatcttgctctgcttttgcaaagcggctgagctgcgcaaagcaagcccaggcagtgtgagaagccgagtgaatcatggccgggcgggtggaggccggagaggctccaacccggtcaaacgctacgcaccaggcctcccgtgtgacgtgtacacatatctccatgagaaatacttagattgtcaagaaagaaaattagtttatgtgctgcctggttggcctcaggatttgctgcacatgctgctagcaagaaacaagatccgcacattgaagaacaacatgttttccaagtttaaaaagctgaaaagcctggatctgcagcagaatgagatctctaaaattgagagtgaggcgttctttggtttaaacaaactcaccaccctcttactgcagcacaaccagatcaaagtcttgacggaggaagtgttcatttacacacctctcttgagctacctgcgtctttatgacaacccctggcactgtacttgtgagatagaaacgcttatttcaatgttgcagattcccaggaaccggaatttggcgaactacgccaagtgtgaaagtccacaagaacaaaaaaataaaaaactgcggcagataaaatctgaacagttgtgtaatgaagaagaaaaggaacaattggacccgaaaccccaagtgtcagggagacccccagtcatcaagcctgaggtggactcaactttttgccacaattatgtgtttcccatacaaacactggactgcaaaaggaaagagttgaaaaaagtgccaaacaacatccctccagatattgttaaacttgacttgtcatacaataaaatcaaccaacttcgacccaaggaatttgaagatgttcatgagctgaagaaattaaacctcagcagcaatggcattgaattcatcgatcctgggtctttgagatgaaaccctgcaagtagacttacgtgaatgatttttgctgtgccgcttttttagggctcacacatttagaagaattagatttatcaaacaacagtctgcaaaactttgactatggcgtattagaagacttgtattttttgaaactcttgtggctcagagataacccttggagatgtgactacaacattcactacctctactactggttaaagcaccactacaatgtccattttaatggcctggaatgcaaaacgcctgaagaatacaaaggatggtctgtgggaaaatatattagaagttactatgaagaatgccccaaagacaagttaccagcatatcctgagtcatttgaccaagacacagaagatgatgaatgggaaaaaaaacatagagatcacaccgcaaagaagcaaagcgtaataattactatagtaggataaggtagaaattgttctgattgtaattagttttgtattttctatactggtgttagaaaacatatgtttacatttgattaactgtgttgcctatttatgcagggtaatccagctaaaggaagctttctttaattataagtattattgtgactattatagtaatcaagagaatgctatcatcctgcttgcctgtccatttgtggaacagcatctggtgatatgcaattccacactggtaacctgcagcagttgggtcctaatgatggcattagactttcataatgtcctgtataaatgtttttactgcttttagaaaataaagaaaaaaaacttggttcatgttta

SEQ ID NO: 2078 - protein, 313 aa, Homo sapiens
MRVVTIVILLCFCKAAELRKASPGSVRSRVNHGRAGGGRRGSNPVKRYAPGLPCDVYTYLHEKYLDCQERKLVYVLPGWPQDLLHMLLARNKIRTLKNNMFSKFKKLKSLDLQQNEISKIESEAFFGLNKLTTLLLQHNQIKVLTEEVFIYTPLLSYLRLYDNPWHCTCEIETLISMLQIPRNRNLANYAKCESPQEQKNKKLRQIKSEQLCNEEEKEQLDPKPQVSGRPPVIKPEVDSTFCHNYVFPIQTLDCKRKELKKVPNNIPPDIVKLDLSYNKINQLRPKEFEDVHELKKLNLSSNGIEFIDPGSLR

SEQ ID NO: 2079 - DNA, 2629 bp, Homo sapiens
accgccccgcgctccgctgccaggggcgggagggaggaatggttgcttcacgccccgggggaagagacgggaagctcggctctgggttgcgggccccggcgtctccgcgtggggcgcaccgtccgacccccccctcccggtgtgcagcgccccgcaccgccccgcctcgcctgggagaagccgccgggacgcgccgggctggagtgggcggttataggctttgagctaggccgtttccgggaggcggagctcagaccccatttcctttctccacatccaggtcaggtggcgtttgctgtggcggctaggcccgcgtgcgctggagacctccgcgctggcccccgcgagcctcctgccctggcccggcgctgcggctctgccgcggcggcagcatgggtggcccccggggcgcgggctgggtggcggcgggcctgctgctcggcgcgggcgcctgctactgcatttacaggctgacccggggtcggcggcggggcgaccgcgagctcgggatacgctcttcgaagtccgcaggtgccctggaagaagggacgtcagagggtcagttgtgcgggcgctcggcccggcctcagacgggaggtacctgggagtcacagtggtccaagacctcgcagcctgaagacttaactgatggttcatatgatgatgttctaaatgctgaacaacttcagaaactcctttacctgctggagtcaacggaggatcctgtaattattgaaagagctttgattactttgggtaacaatgcagccttttcagttaaccaagctattattcgtgaattgggtggtattccaattgttgcaaacaaaatcaaccattccaaccagagtattaaagagaaagctttaaatgcactaaataacctgagtgtgaatgttgaaaatcaaatcaagataaagatatacatcagtcaagtatgtgaggatgtcttctctggtcctctgaactctgctgtgcagctggctggactgacattgttgacaaacatgactgttaccaatgaccaccagcacatgcttcacagttacattacagacctgttccaggtgttacttactggaaatggaaacacgaaggtgcaagttttgaaactgcttttgaatttgtctgaaaatccagccatgacagaaggacttctccgtgcccaagtggattcatcattcctttccctttatgacagccacgtagcaaaggagattcttcttcgagtacttacgctatttcagaatataaagaactgcctcaaaatagaaggccatttagctgtgcagcctactttcactgaaggttcattgtttttcctgttacatggagaagaatgtgcccagaaaataagagctttagttgatcaccatgatgcagaggtgaaggaaaaggttgtaacaataatacccaaaatctgattggtcatatttttccaaagagtaatgcagtctggatataaatgtattttctgtcttccttataaggggattctcccagctgctaaatttaaacagtaaatatcacattttgtcattaacacagctataacttgccgtggttctcagatttattttggactattttgatgccaagtgaatataagagtttgtactgaaaccatttatttctttctattttgctatttgcaaatgcttgttatcttccctacatgaagtggcagtaacctttttcacatttaagctacccttctaccttttgaagtgatttgcagttactcatctgagacagcatcagtatttgactaaatcattgtttcacaactgaatagtcttgttcttttagtagcaatgaaatcctaagctcttgaggccattcacctgccaacctgaccatactgctttcaaaagtcttttctcatcagtagaatctattttggtcacttctagtcaatgaaaaatgtaaacttttaggagagaatgtttcctaggactcacccactccattcaatgttacatataaaatagtgtgatcaatcacaatgtccatctttagacagttggttaaataaattatctggtctttgaaaagaccgtgctgggcgcggtggctcttgcctgtaatcccagcactttgggaggctgaggcgggcagatcacctgagatcgggagtttgagaccaagcctgaccaatatggagaaaccctgtctctactaagaatacaaaattagctgggcatggtggtgcatgcctgtaatcccagctacttgggaggccgaggcaggagaattgcttgaacccgggaggcagaggttgcagtgaggtgagatagcgccattgcactccagcctgggcaacaagagcaaaactctgtctcaaaaaaaaaaaaaaatgatggagctccgaatgtgcttaagtggaaagatatctatgaaatatggtggttttttaaaacacaaaaattatagaatatgggatcccgtgtgtgtgtgtgtgtgtttgaatgaaaaatgcttatgtattgacagaacacttctagaatgatacccaaactcctggagtgggagtggggaatgccttctacgtacacactgttctactgtttgaattttttaatatgagcccaaattgtataatctttttttaataaaggggagaaaaatc

SEQ ID NO: 2080 - protein, 343 aa, Homo sapiens
MGGPRGAGWVAAGLLLGAGACYCIYRLTRGRRRGDRELGIRSSKSAGALEEGTSEGQLCGRSARPQTGGTWESQWSKTSQPEDLTDGSYDDVLNAEQLQKLLYLLESTEDPVIIERALITLGNNAAFSVNQAIIRELGGIPIVANKINHSNQSIKEKALNALNNLSVNVENQIKIKIYISQVCEDVFSGPLNSAVQLAGLTLLTNMTVTNDHQHMLHSYITDLFQVLLTGNGNTKVQVLKLLLNLSENPAMTEGLLRAQVDSSFLSLYDSHVAKEILLRVLTLFQNIKNCLKIEGHLAVQPTFTEGSLFFLLHGEECAQKIRALVDHHDAEVKEKVVTIIPKI

SEQ ID NO: 2081 - DNA, 4841 bp, Homo sapiens
tcatcgctgtcgggaacagcgatgactcgagcgggccgagagtgggtttcccgtccccgagccctccctcatctcggagatgccgcacttgtgagcgacagggcttcatttgaattttcgcacctcgcgagttgcggagcctgcatctctgaagctgcctcggtgaagagccacagcattattttttttctctttgggagagtagctgtctgggatttgagatcctatcttccctgcaaattaccaggttgcatcttcactgataggaatacatttcttcaccaaaggacatggatgaaaatgaaagcaaccagtctctgatgacaagcagccaatatcctaaagaagcagtaagaaaacgtcaaaattcagcacggaattccggagcaagtgattcttctaggttttctaggaaaagcttcaaactggattatagactagaagaagatgtaactaaatccaagaaaggaaaagatgggagatttgtgaatccgtggccaacatggaaaaacccctctattccaaatgttctcagatggctgataatggagaaagatcacagcagtgttccaagttctaaagaggaactagacaaagaactcccagtgcttaagccatattttatcactaaccctgaagaagctggagtgagggaagctggcttaagagtcacatggctgggacatgccacggtaatggtggaaatggatgagctcatatttctcacggatcccatctttagctctcgtgcttcaccatcgcagtacatgggtccaaagcgatttcgtcgttccccgtgcacaataagtgaactccctccaatagatgcggtccttatcagtcacaaccactatgaccatctggactacaattctgtcattgctttgaatgagcgatttggtaatgagttgagatggtttgtgcctttgggtctccttgactggatgcaaaaatgtggctgtgagaatgtgattgagttggactggtgggaggagaattgtgtccccggacatgataaggtcacttttgtctttacaccttcccagcactggtgtaaaaggactctaatggatgacaacaaggtgctatggggcagctggtctgtcttggggccttggaatcgattttttttcgcaggagatactggttattgccctgcttttgaagagataggaaaaagatttggaccttttgaccttgcagctattcccatcggagcttatgaaccgaggtggtttatgaaataccagcatgtagacccagaagaagctgtaaggattcacactgatgtccaaacaaagaaatctatggcaattcactggggaacttttgccttagcaaatgagcattacttagagcctccagtgaagctgaatgaagctctagagagatacggacttaacgctgaagatttttttgtcttgaagcatggagaatcaagatacctaaataataatgatgaaaacttttaataaataatttcctgaggtgaaaaaccgatattgaagattcatttttcttttttccattcttcaggaccttcggcaaggtgagtcaaggctctctacctacctagatgtttttcagaggcctacaaatacaagtatctttcttatatgcacattctaataaatgatgaaattcagtccaacatgcttattataaacatagcaattcttgctctatcaaattagcttatatgccaaatattaaatatggtttatttaggtaagcataaaaacataggggctatcatttttaaagacttgattttctctattgtggtaaaatatataaatacatatttgccattttaaacatttaccgttttaaccatttttaagtgtacagttctttcgcattaatgcacccatgaccaccattcacttaaatttttaaaagaacagtatattctttttttcctagagccttcagatgagagggaacagtatattctattgcacgtctacaattcccaaaagacctcttactttgggaggccaaggtgggtgggtcacttgaacccaggagtttgacatcaacctgggcaacatggtgacctcccgtctctctcggaaaaaaaaaaaagaaaaaagaaaaagccgggtgaggtggtgtgtacctgtagtcacaggtacttgggaggctgaggtgggaggatcacttgagcccaggagatagaggctgcagtgagctgtgatcgtaccactgcactccagcctgggcgacaaaatgagaccctgtctcaaaagaaagccctctccttagctgagcagaggaagggaaggagtgtggctatgagaatatgatttatgccattttctgtttttaaatctagaagatcttctaagcacaaatacagctacaatgaaatattttacagacaaaatgttaatagaccatattctttgaattaaatttgtttttaattttctctacacattttttttttcctggagtctcttagctctaaatatatcaatcagatttatatttttttttacctgattcagatgtcttacatttttatattaaatgaaccttaagcatgattcttttggtaagccagtatgaatgccagtggttggggggcgggggggggagtcagttgacataagatttagtcctaataaggactctgtattcacttgattattctgacccttcctaagggagggaggtggattagataccactggaggcccattctgtattcctaatccagtctcagcactttattcatacaaaataatcaaaataggttttctacaccaaatgctacccaggcagtgctctataatttatttgcacacctgtatgtgtggtgccatgttagccactaaatctgaacttttaccctgctttcatcatggatttttttgtgtaacctgaaacaagtcaccaatgctcactgtgcctgtttcctcatttgcaacaagaggataattccgacctacctctgaaaaatgtgtagattaaatgagtttttaaagcactttagaaaatataagggagaaaatgatttcttaagatatcactgcctaatatagacaggtatatttgaaagctaaatacaggttaatgcttttgataatgtattgttcctgttgcaaatttaagcattatatattaggagactaaacattgaaaactttcactgatttttaaattggagtaatagcctaaataagtgtaaataatctttatcaaaatttagtgtttatctacaaagatgcgaatcagtcaaggggaaatgtgtatgcaatgtgtgtgtatatgatgtatgcgaacatatgtgattttggggtactaaagcacaaaaaaatcccccataaaataaaccttcctgaaaagactgatcataaactttttcactccaagcagatgtgaatcaagatgttaggtttatggtgagttagctttgaggtgtgttgccctaatactagccagcgttgttgtagccatattccctgctgctgcacgccgaattgaaaatccatctcttacctcttctctatgaagcaagccaggtatgtcttgcttaagtatttcttctccatgaatggccttaacattattttgtattcacgtgtactgtttaactgagggtctcaaagcactttaaactgttgtgttctatttccactcgtctggcctgcctcatttttctaggcccttttgtaagctgtaattttttattaccactcatgttctttctacactgacactattcattaagaacatcaagcttcatctctgcttacagaatctcaccttattgagtgggttccactttatttttcatttgttatctacattttgaagggtttatgtgcaaagtgaaaacaaattttgaaaaataagacaaatccattctcttcttcaattcagtctaatatgcattgtagtgtcttttaatcagtcttatcctctaagtcaacttcattttcctctttgtgaatacccatagcaatatgtaagattttattgaagtttcctgtgataactgaggaacactttgctatgcctcactgcccaatagggtgggtcatcaattaggagaaatcccaaattataaaagccaacatatgccgtgacctacgtaggaaaagatgtatttgtgcatcttctttctgggtagttaaaaattactccctcttttctctagcattttgacatttcagactcaatgctctgatctctagggagtgtgattattcaaactaatgagaggacaagaagacacagttttagaatctactgctgctaaagcacattaaaaacaaatcctggtttttaatgtatgcatagtttcatatttaatgaatatgctttcattaaatagggaggtagatttgaaaaaactgttataaagaaatgtgccctttggggaatgaatacttttgttcatgtctagcccactgggaattttgttttcaccttatactgagtcctttttctaatgtaaaaatatttcttccaagtttgatttctgtatcagggtaacattgagaacacacatatttctgtttgaggatttgtgacttcctatggaaacagtcttgcatctatgtatttacaaatgaaatttaaagtattcttaaagctttgccttaaatactgcttgcatactgatttacttaatgctaagcatggcaggggttataaatttaaatactataagacctggctgaatcccagatgtatcaataaattgttatagtagcttatggaaaatgctattaaagataaattttcatacattgtatttttagtcaagtaaaatatggatgaaaattaataaagtactgtcaagggaaaaaataaaaaaaaaaaaaaaa

SEQ ID NO: 2082 - protein, 393 aa, Homo sapiens
MDENESNQSLMTSSQYPKEAVRKRQNSARNSGASDSSRFSRKSFKLDYRLEEDVTKSKKGKDGRFVNPWPTWKNPSIPNVLRWLIMEKDHSSVPSSKEELDKELPVLKPYFITNPEEAGVREAGLRVTWLGHATVMVEMDELIFLTDPIFSSRASPSQYMGPKRFRRSPCTISELPPIDAVLISHNHYDHLDYNSVIALNERFGNELRWFVPLGLLDWMQKCGCENVIELDWWEENCVPGHDKVTFVFTPSQHWCKRTLMDDNKVLWGSWSVLGPWNRFFFAGDTGYCPAFEEIGKRFGPFDLAAIPIGAYEPRWFMKYQHVDPEEAVRIHTDVQTKKSMAIHWGTFALANEHYLEPPVKLNEALERYGLNAEDFFVLKHGESRYLNNNDENF

SEQ ID NO: 2083 - DNA, 3677 bp, Homo sapiens
gctgcgcgcgctggggagcacgtggggggacacgcagggactgcccgcgcgaatggcttccaacgcatgcgccccaccctacatttcacagtcgccatgacgaccaggaggtccgctagtcaacggctcgtcaacggctgcggggacaagtccgttgaggctgccaggcgagtcaggcctttctggacctcgcctgactcggctgggctgtgcctgaaattgacccagctccactaggaattatgaagaaacaaggactccgggaagaggtgcacgaactgcaggcgcggtggttccccagcagaaccactctgcatcggggaattgaaaacaaggaattccccaaccaaacaggggcacaggctgtgtttgcagctcctgtaaaagctccatacccagagccgtgtctcccagctcccagccgtctttgtggcaattctacattggttacatttagtaacactttttgaaaatgatcatcatttctctcacctctcatctttggaacgggagatgactttttgcattgaaacggttaggtttcttcttctaacgaattaatttgtggtttaagaatagccagaccgagaggtgacagcatgctggcagtcctcagagcccttgcttgctctcggcacctcccctgcctgggctcccgctttggtggcatttgaggagcccttcagtcccccactgcactgtgggagcccctttctgggctggccaaggccggagcccactccctcagcttgcagggaggtgtggagggagagacacgagcgggaaccggggctgtgtgctgcacttgcgggccatctggagttccgggtgggcgtgggcttggtgggccccgcactcagagcagccagccagccctgctggccccgggcaatgggggacttagcacctgggccagtggctgcggagggtgtactgagtcccccagcagtgctggcccaccggcgctgcgctcgatttctcgctgggccttggctgccttcccacggggcagggctcgggacctgcagcccgccatgcctgagcctcctacccaatccatgggctcctgtgcggcctgagcctccccgacgagcaccaccccctgctccacggcgcccagtcccatcgaccacgcaagggctgaggaatgcgagcgcccggcacaggactggcaggcagctccacctgcagccccagtgcaggatccactaggtgaagccagctgggctcctgagtctggtggggacgtggagagtctttatatctagctcagggattgtaaatacaccaatcagcaccctgtgtttagctcaaggtttgtgagtgcaccagtcaacactctgtatctagctgctctggtgagggcgtggagagtctttatgtctagctcaaggattgtaaatacaccaatcagcactctgtgtctagctcaaggattgtaaatacaccaatcggcactctgtatctagctcaaggtttgtaaacacaccaatcagcaccctgtgtttagctcaaggtttgtgagtgcaccagtcgacactctgtatctagctgccctgatggggacgtggagaacctttgtatctagctcagggattgtaaacgcaccaatcagcgccctgacgaaacaggccactcggctctaccaatcagcaggatgtaggtggggccagataagagaataaaagcgggctgcccgagccagcattggcaacccgctcgggtccccttccacactgtggaagctttgttctttcgctctttgcaataaatcttgctactgctcactctttgggtccacgctgcttttgtgagctgtaacactcaccatgaagatctgcagcttcactcctgagcccagcgagaccacgagcccaccgggaggaacgaacaactccagacacgccaccttaagagctgtaacactcaccgcgagggtccaccgcttcattcttgaagtcagtgagaccaagaacccaccaattccggacacaagactatgagggactttattattcttacttcaagaccattattgaagcaccttcatttttgggaggactgtggatgattatgaatgacaggcttactgaatatcctcttgtaattaatgcagtaaaacgcttccatatttatccagagaattctggagtccaaggaagaccaagatcaaggcgccagcagatttggtgtctggtgaaggctgctctccgcttccaagatggtgccttgatgttgcatcttcctgaaggagaggaacactgtgtcctcacatggcagacagtaggagagtaatcatagcctcctggtatcgcacattcatgggaatagtgaatttatttggactagaaactaagacctgctggaatgtcaccagaatagaacctcttaatgaagttcaaagctgtgaaggattgcgagatcctgcttgcttttatgttggtgtaatctttattttaaatggactaatgatgggattgttcttcatatatggaacatacctaagtggtactgaactgggaggtcttattacagtactgtgcttctttttcaaccatggagaggccacctgtgtgatgtggacaccacctctccgtgaaagtttttcctatcctttccttgtacttcagatgtatgttttaactttgattctcaggacctcaagcaatgatagaaggcccttcattgcactctgtctttccaatgttgcttttatgcttccctggcaatttgctcagtttatactttttacacagatagcatcattatttcccatgtatgttgtgggatacattgaaccaagcaaatttcagaagatcatttatatgaacatgatttcagttacccttagtttcattttgatgtttggaaattcaatgtacttatcttcttattattcttcatctttgttaatgacatgggcaataattctaaagagaaatgaaattcaaaaactgggagtatctaaactcaactgctggctaattcaaggtagtgcctggtggtgtggaacaatcattttgaaatttctgacatctaaaatcttaggcgtttcagaccatatttgcctgagtgatcttatagcagccggaatcttaaggtatacagattttgatactttaaaatacacctgttctcccgaatttgacttcatggaaaaagcgactctgctgatatacacaaagacattattgcttccagttgttatggtgattacatgttttatctttaaaaagactgttggtgatatttcgcgtgttttagctacaaacgtttatctaagatgctgtctttgcaggtgccatgcctacaatggcaagtgtcaagctgtctacacttcatcccattgtgaatcatccacattacgaagatgcagacttgaggcctggttgcagcatgcttgaaatctgggatgtggaagacccttccaatgcagctaaccctcccttatgtagcgtcctccttgagccgagattgtgccactgcactccagcctgggcgacaaatcaagaccccgtctccaaaaaaaaaaaaaaaaaaacttgattgggatccaaaatcatacaactatacactaaaatcagtgaatattaccttatgtaaattaaaaattaggaaatcaaaagaaaagcatacatataaaaaacagttttttctaagcaaaaaaaaaaaaaaaa

SEQ ID NO: 2084 - protein, 376 aa, Homo sapiens
MADSRRVIIASWYRTFMGIVNLFGLETKTCWNVTRIEPLNEVQSCEGLRDPACFYVGVIFILNGLMMGLFFIYGTYLSGTELGGLITVLCFFFNHGEATCVMWTPPLRESFSYPFLVLQMYVLTLILRTSSNDRRPFIALCLSNVAFMLPWQFAQFILFTQIASLFPMYVVGYIEPSKFQKIIYMNMISVTLSFILMFGNSMYLSSYYSSSLLMTWAIILKRNEIQKLGVSKLNCWLIQGSAWWCGTIILKFLTSKILGVSDHICLSDLIAAGILRYTDFDTLKYTCSPEFDFMEKATLLIYTKTLLLPVVMVITCFIFKKTVGDISRVLATNVYLRCCLCRCHAYNGKCQAVYTSSHCESSTLRRCRLEAWLQHA

SEQ ID NO: 2085 - DNA, 3939 bp, Homo sapiens
acatccttcatcctctaccttccttctagcagaaatggcggctgcggcggctcgagtggtgttgtcatccgcggcgcggcggcggctctggggtttcagcgagagtcttctaatccgaggcgctgcgggacggtcattatattttggagagaacagattaagaagtacacaggctgctacccaagttgttctgaatgttcctgaaacaagagtaacatgtttagaaagtggactcagagtagcttcggaagactctgggctctcaacatgcacagttggactctggattgatgctggaagtagatacgaaaatgagaagaacaatggaacagcacactttctggagcatatggctttcaagggcaccaagaagagatcccagttagatctggaacttgagattgaaaatatgggtgctcatctcaatgcctatacctccagagagcagactgtatactatgccaaagcattctctaaagacttgccaagagctgtagaaattcttgctgatataatacaaaacagcacattgggagaagcagagattgaacgtgagcgtggagtaatccttagagagatgcaggaagttgaaaccaatttacaagaagttgtttttgattatcttcatgccacagcttatcaaaatactgcacttggacggacaattttgggaccaactgaaaatatcaaatctataagtcgtaaggacttagtggattatataaccacacattataaggggccaagaatagtgcttgctgctgctggaggtgtttcccatgatgaattgcttgacttagcaaagtttcatttcggtgactctttatgcacacacaaaggagaaataccagctctgcctccctgcaaattcacaggaagtgagattcgtgtgagggatgacaagatgcctttggcgcaccttgcaatagctgttgaagctgttggttgggcacatccagatacaatctgtctcatggttgcaaacacgctgattggcaactgggatcgctcttttgggggaggaatgaatttatctagcaagctggcccagctcacttgtcatggcaatctttgccatagctttcagtctttcaacacttcctacacagatacaggattatggggactgtatatggtttgtgaatcatccactgttgcagacatgctacatgttgttcaaaaagaatggatgcgactctgtacaagtgtcacagaaagtgaggttgcacgagccagaaatcttctgaaaacaaacatgttgttgcagcttgatggttcaactccaatttgtgaagatattggtaggcaaatgttatgctataatagaaggattcccatccctgagcttgaagcaagaattgatgctgtgaatgctgagacaattcgagaagtatgtaccaaatacatttataataggagtccagctattgctgctgttggtcccattaagcaactaccagattttaaacagatacgcagtaacatgtgttggcttcgtgattaaaatgctcctaatcaagattgtttgaacacatgtatttataaaacagagctagagaaaaataaaaatgaacatgtatatacatttggaaatttgaattaaatactgtatcatactttcaaaggataaaaagactacccctctgaaggttgttttgtattaatggtcagtctttgttctctgagaaattatgttggaagcagcatactttcaaattattaccatgagtataattttaagaatgaaaatgtttacagtattttcagttttattataaaaatgcacacacaacaaagattgtcatttcttggctctacttgcattcagcacttgttcttgagcagctttctttgcttttaccatctcgacaagttcctaggaagggagaaaggtgtgatttaagaagttgcgatttaaaaacagacattttaatctagtgtttggtgtaaagaattcaagcaactaagatagatagtactaaatatactgatttcattatctgccagggcctagaaagtttctaaggttgctcatttcttcctcataatattgaccccataactactggttttgaaataagcactatattattaaccacttaatagacataaaatatgagctatatcacccaagctacaatttaaaatacaacaatctataaacgcttaagtctgcaaccttgtatcgtttcatgcagtccttctttgtcctgccaggcaccgcttctgctattttttcccatctttcaggtgtatttactgggtatgttttcaaagcttgttccaaaagcttctgttcttctgttgtccaaggggtgaagtctgtatatggacctgattaagaaaaatttttatttgaaaactgtctttgaacatgttctcagacaagtcttgtggtccacaagtattcgctaagtgcccatttcaatctgggatgtgtcattttgaaaataaacttgtagagatgagagatacatatagccctctgagtgttaataagagaaaaaatttcagatagctcacatcccagaaaataaaatctcaaaggcttttaaaacacaatagtaaagatctaccttgtactgtttatctcttaaaaatcaatgtaatacactcaccagactggtaaaaagccatatttaaatttatagtactgttggactcttggactcaaaaacacaaccacaattcattaagagttctgataaatctacttccttacagaataggtaaaagagcttcctcacagttaaacttttgctggatagaaaccctggaaatcattcttgttttacactgaaggaaacaaacctagcaaaattaagccaagtgcccaaggtaccagtgctggagaggcaagctgagattagattgtgttgtagtgtggtgttctcttcgtcacatctgctaaaatcttgggagccgatgctgaacacttccaataactgctattgtggttcttcaactaaaccttgtatatttcagaaaacatctaagatgtgtgtcagaaacaaatatgtttcttaaggatgttaagtattacacagtccacttgtgtaggtaaaagtagaatgttaagtggtagaaagctgatttggttaagttaatggacttctggcaatttagttatttcagactatgcagtgacaacacagactaatactaccagtagcctgactactactagaaactgcggcctgtgagatctgttaaaagttaagcctagaaaccaaagttccttcccaattaaagaaggaaaaacaaaacaaaacaaaacaaaaccaccacctattcaaaacaaagcagagaatttgtataatatttgatggtacctaaggtgcctaagaagcttttttgaaggtagcttttaagttctaggaagtcttttgttgaatttccttgtattggtttaaagccctaaataccatagattttatttcctctcttggaaaaaagatggaagtgacatggcagtatttcctgctgttctccagttacttcacaataccaaaataaattaaacgtactgttgcaaaactcctatgagaaatcactattcaaaaaatggtgccagcttgctgtttaatggtacaactgaagaggaaggagccttcccatttccataaaagaggcaaaggagtcatacccacatagcactactgccagtcactcttgccttcacagggtcacctctcctcacagaaagcagactggacaaatatcagggcccacctccctccaacatggaaacaagtccccctaagaaagagctgagactagtgtgctaatacctgttgtattttgtggagataaaggtgcaggagaataaactcctttataaagaagtgtctttcaggtgttctgaaaccctgccttgttacttacctttattaaaagaaccgaaataatgcctaactcaaaaaaaaaaaaaaaaaaaaa

SEQ ID NO: 2086 - protein, 489 aa, Homo sapiens
MAAAAARVVLSSAARRRLWGFSESLLIRGAAGRSLYFGENRLRSTQAATQVVLNVPETRVTCLESGLRVASEDSGLSTCTVGLWIDAGSRYENEKNNGTAHFLEHMAFKGTKKRSQLDLELEIENMGAHLNAYTSREQTVYYAKAFSKDLPRAVEILADIIQNSTLGEAEIERERGVILREMQEVETNLQEVVFDYLHATAYQNTALGRTILGPTENIKSISRKDLVDYITTHYKGPRIVLAAAGGVSHDELLDLAKFHFGDSLCTHKGEIPALPPCKFTGSEIRVRDDKMPLAHLAIAVEAVGWAHPDTICLMVANTLIGNWDRSFGGGMNLSSKLAQLTCHGNLCHSFQSFNTSYTDTGLWGLYMVCESSTVADMLHVVQKEWMRLCTSVTESEVARARNLLKTNMLLQLDGSTPICEDIGRQMLCYNRRIPIPELEARIDAVNAETIREVCTKYIYNRSPAIAAVGPIKQLPDFKQIRSNMCWLRD

SEQ ID NO: 2087 - DNA, 1545 bp, Homo sapiens
gaagacaccaccggaagcaaggaaggtgctgtgtaatcattaaggagcggaggcttttggagctgctaaaatgccggattacctcggtgccgatcagcggaagaccaaagaggatgagaaggacgacaagcccatccgagctctggatgagggggatattgccttgttgaaaacttatggtcagagcacttactctaggcagatcaagcaagttgaagatgacattcagcaacttctcaagaaaattaatgagctcactggtattaaagaatctgacactggcctggccccaccagcactctgggatttggctgcagataagcagacactccagagtgaacagcctttacaggttgccaggtgtacaaagataatcaatgctgattcggaggacccaaaatacattatcaacgtaaagcagtttgccaagtttgtggtggaccttagtgatcaggtggcacctactgacattgaagaagggatgagagtgggcgtggatagaaataaatatcaaattcacattccattgcctcctaagattgacccaacagttaccatgatgcaggtggaagagaaacctgatgtcacatacagtgatgttggtggctgtaaggaacagattgagaaactgcgagaagtagttgaaaccccattacttcatccagagaggtttgtgaaccttggcattgagcctcccaagggcgtgctgctctttggtccacccggtacaggcaagacactctgtgcgcgggcagttgctaatcggactgatgcgtgcttcattcgagttattggatctgagcttgtacagaaatacgtcggtgagggggctcgaatggttcgtgaactctttgaaatggccagaacaaaaaaagcctgccttatcttctttgatgaaattgatgctattggaggggctcgttttgatgatggtgctggaggtgacaatgaagtgcagagaacaatgttggaactgatcaatcagcttgatggttttgatcctcgaggcaatattaaagtgctgatggccactaacagacctgatactttggatccagcactgatgaggccagggagattggatagaaaaattgaatttagcttgcccgatctagagggtcggacccacatatttaagattcacgctcgttcaatgagtgttgaaagagatatcagatttgaactgttagcacgactgtgtccaaatagcactggtgctgagattagaagcgtctgcacagaggctggtatgtttgccatcagagcacggcgaaaaattgctaccgagaaggatttcttggaagctgtaaataaggtcattaagtcttatgccaaattcagtgctactcctcgttacatgacatacaactgaaccctgaaggctttcaagtgaaaactttaaattggaatcctaaccttatatagacttgttaataaccaattcataaacaaataaatggcttcaaaattgtatgcttttttccatatctcttcttgtaatataataaaaggtgatttctaatgttaaaaaaaaaaaaaaaaaaa

SEQ ID NO: 2088 - protein, 433 aa, Homo sapiens
MPDYLGADQRKTKEDEKDDKPIRALDEGDIALLKTYGQSTYSRQIKQVEDDIQQLLKKINELTGIKESDTGLAPPALWDLAADKQTLQSEQPLQVARCTKIINADSEDPKYIINVKQFAKFVVDLSDQVAPTDIEEGMRVGVDRNKYQIHIPLPPKIDPTVTMMQVEEKPDVTYSDVGGCKEQIEKLREVVETPLLHPERFVNLGIEPPKGVLLFGPPGTGKTLCARAVANRTDACFIRVIGSELVQKYVGEGARMVRELFEMARTKKACLIFFDEIDAIGGARFDDGAGGDNEVQRTMLELINQLDGFDPRGNIKVLMATNRPDTLDPALMRPGRLDRKIEFSLPDLEGRTHIFKIHARSMSVERDIRFELLARLCPNSTGAEIRSVCTEAGMFAIRARRKIATEKDFLEAVNKVIKSYAKFSATPRYMTYN

SEQ ID NO: 2089 - DNA, 2671 bp, Homo sapiens
aggcagcggctgtggagcgcggcggggcggctccgcccagggcagcccgggctgggccaaggagcgagctctcccttctcctgctctcagcctcagtgatcaaggcttcagtgaactgcactggagctcccagcgggggatcttgtcccctgtcccgacttttgtgctgcacattggatctggtgacactcaggaaatgcttgtctccggctgttaaggaataatttcagagtactatggatcatgctgaagaaaatgaaatccttgcagcaacccagaggtactatgtggaaaggcctatctttagtcatccggtcctccaggaaagactacacacaaaggacaaggttcctgattccattgcggataagctgaaacaggcattcacatgtactcctaaaaaaataagaaatatcatttatatgttcctacccataactaaatggctgccagcatacaaattcaaggaatatgtgttgggtgacttggtctcaggcataagcacaggggtgcttcagcttcctcaaggcttagcctttgcaatgctggcagctgtgcctccaatatttggcctgtactcttcattttaccctgttatcatgtattgttttcttggaacctccagacacatatccataggtccttttgctgttattagcctgatgattggtggtgtagctgttcgattagtaccagatgatatagtcattccaggaggagtaaatgcaaccaatggcacagaggccagagatgccttgagagtgaaagtcgccatgtctgtgaccttactttcaggaatcattcagttttgcctaggtgtctgtaggtttggatttgtggccatatatctcacagagcctctggtccgtgggtttaccaccgcagcagctgtgcatgtcttcacctccatgttaaaatatctgtttggagttaaaacaaagcggtacagtggaatcttttccgtggtgtatagtacagttgctgtgttgcagaatgttaaaaacctcaacgtgtgttccctaggcgtcgggctgatggtttttggtttgctgttgggtggcaaggagtttaatgagagatttaaagagaaattgccggcgcctattcctttagagttctttgcggtcgtaatgggaactggcatttcagctgggtttaacttgaaagaatcatacaatgtggatgtcgttggaacacttcctctagggctgctacctccagccaatccggacaccagcctcttccaccttgtgtacgtagatgccattgccatagccatcgttggattttcagtgaccatctccatggccaagaccttagcaaataaacatggctaccaggttgacggcaatcaggagctcattgccctgggactgtgcaattccattggctcactcttccagaccttttcaatttcatgctccttgtctcgaagccttgttcaggagggaaccggtgggaagacacagcttgcaggttgtttggcctcattaatgattctgctggtcatattagcaactggattcctctttgaatcattgccccaggctgtgctgtcggccattgtgattgtcaacctgaagggaatgtttatgcagttctcagatctcccctttttctggagaaccagcaaaatagagctgaccatctggcttaccacttttgtgtcctccttgttcctgggattggactatggtttgatcactgctgtgatcattgctctgctgactgtgatttacagaacacagagtccaagctacaaagtccttggaaagcttcctgaaactgatgtgtatattgatatagacgcatatgaggaggtgaaagaaattcctggaataaaaatatttcaaataaatgcaccaatttactatgcaaatagcgacttgtatagcaatgcattaaaacgaaagactggagtgaacccagcagtcatcatgggagcaaggagaaaggccatgcggaagtacgctaaggaagtcggaaatgcaaatatggccaacgcaactgttgtcaaagcagatgcagaagtagatggagaggatgctaccaagcctgaagaagaggatggtgaagtaaaatatcccccaatagtgatcaaaagcacatttcctgaggaaatgcaaagatttatgcccccaggggataacgtccacactgtcattttggatttcactcaagtcaattttattgattctgttggagtgaaaactctggcagggattgtaaaagaatatggagacgtcggtatatatgtatacttagcaggatgcagtgcacaagttgtgaatgacctcactcggaatagattttttgaaaatcctgccctatgggagctgctgttccacagcattcatgatgcagttttaggcagccaacttagagaggcacttgctgaacaggaagcctcggctcccccttcccaggaggacttggagcccaatgccactcctgccactcctgaggcatagatgaggacctcaccctaggatggggttataagcctctcatgaagttcataatttacacgttttaaatactagacgctagatttttttttctaagggtgaatactagtagtccaggcttgatttggagggtgaatgacgcctagcaagatgtattgtacttgtgtttttttaattgaatacttcaaagataaaaaaaaaaa

SEQ ID NO: 2090 - protein, 744 aa, Homo sapiens
MDHAEENEILAATQRYYVERPIFSHPVLQERLHTKDKVPDSIADKLKQAFTCTPKKIRNIIYMFLPITKWLPAYKFKEYVLGDLVSGISTGVLQLPQGLAFAMLAAVPPIFGLYSSFYPVIMYCFLGTSRHISIGPFAVISLMIGGVAVRLVPDDIVIPGGVNATNGTEARDALRVKVAMSVTLLSGIIQFCLGVCRFGFVAIYLTEPLVRGFTTAAAVHVFTSMLKYLFGVKTKRYSGIFSVVYSTVAVLQNVKNLNVCSLGVGLMVFGLLLGGKEFNERFKEKLPAPIPLEFFAVVMGTGISAGFNLKESYNVDVVGTLPLGLLPPANPDTSLFHLVYVDAIAIAIVGFSVTISMAKTLANKHGYQVDGNQELIALGLCNSIGSLFQTFSISCSLSRSLVQEGTGGKTQLAGCLASLMILLVILATGFLFESLPQAVLSAIVIVNLKGMFMQFSDLPFFWRTSKIELTIWLTTFVSSLFLGLDYGLITAVIIALLTVIYRTQSPSYKVLGKLPETDVYIDIDAYEEVKEIPGIKIFQINAPIYYANSDLYSNALKRKTGVNPAVIMGARRKAMRKYAKEVGNANMANATVVKADAEVDGEDATKPEEEDGEVKYPPIVIKSTFPEEMQRFMPPGDNVHTVILDFTQVNFIDSVGVKTLAGIVKEYGDVGIYVYLAGCSAQVVNDLTRNRFFENPALWELLFHSIHDAVLGSQLREALAEQEASAPPSQEDLEPNATPATPEA

SEQ ID NO: 2091 - DNA, 2492 bp, Homo sapiens
aggcagcggctgtggagcgcggcggggcggctccgcccagggcagcccgggctgggccaaggagcgagctctcccttctcctgctctcagcctcagtgatcaaggcttcagtgaactgcactggagctcccagcgggggatcttgtcccctgtcccgacttttgtgctgcacattggatctggtgacactcaggaaatgcttgtctccggctgttaaggaataatttcagagtactatggatcatgctgaagaaaatgaaatccttgcagcaacccagaggtactatgtggaaaggcctatctttagtcatccggtcctccaggaaagactacacacaaaggacaaggttcctgattccattgcggataagctgaaacaggcattcacatgtactcctaaaaaaataagaaatatcatttatatgttcctacccataactaaatggctgccagcatacaaattcaaggaatatgtgttgggtgacttggtctcaggcataagcacaggggtgcttcagcttcctcaaggcttagcctttgcaatgctggcagctgtgcctccaatatttggcctgtactcttcattttaccctgttatcatgtattgttttcttggaacctccagacacatatccataggtccttttgctgttattagcctgatgattggtggtgtagctgttcgattagtaccagatgatatagtcattccaggaggagtaaatgcaaccaatggcacagaggccagagatgccttgagagtgaaagtcgccatgtctgtgaccttactttcaggaatcattcagttttgcctaggtgtctgtaggtttggatttgtggccatatatctcacagagcctctggtccgtgggtttaccaccgcagcagctgtgcatgtcttcacctccatgttaaaatatctgtttggagttaaaacaaagcggtacagtggaatcttttccgtggtgtatagtacagttgctgtgttgcagaatgttaaaaacctcaacgtgtgttccctaggcgtcgggctgatggtttttggtttgctgttgggtggcaaggagtttaatgagagatttaaagagaaattgccggcgcctattcctttagagttctttgcggtcgtaatgggaactggcatttcagctgggtttaacttgaaagaatcatacaatgtggatgtcgttggaacacttcctctagggctgctacctccagccaatccggacaccagcctcttccaccttgtgtacgtagatgccattgccatagccatcgttggattttcagtgaccatctccatggccaagaccttagcaaataaacatggctaccaggttgacggcaatcaggagctcattgccctgggactgtgcaattccattggctcactcttccagaccttttcaatttcatgctccttgtctcgaagccttgttcaggagggaaccggtgggaagacacagcttgcaggttgtttggcctcattaatgattctgctggtcatattagcaactggattcctctttgaatcattgccccaggctgtgctgtcggccattgtgattgtcaacctgaagggaatgtttatgcagttctcagatctcccctttttctggagaaccagcaaaatagagctgaccatctggcttaccacttttgtgtcctccttgttcctgggattggactatggtttgatcactgctgtgatcattgctctgctgactgtgatttacagaacacagagtccaagctacaaagtccttggaaagcttcctgaaactgatgtgtatattgatatagacgcatatgaggaggtgaaagaaattcctggaataaaaatatttcaaataaatgcaccaatttactatgcaaatagcgacttgtatagcaatgcattaaaacgaaagactggagtgaacccagcagtcatcatgggagcaaggagaaaggccatgcggaagtacgctaaggaagtcggaaatgcaaatatggccaacgcaactgttgtcaaagcagatgcagaagtagatggagaggatgctaccaagcctgaagaagaggatggtgaagtaaaatatcccccaatagtgatcaaaagcacatttcctgaggaaatgcaaagatttatgcccccaggggataacgtccacactgtcattttggatttcactcaagtcaattttattgattctgttggagtgaaaactctggcagggattgtaaaagaatatggagacgtcggtatatatgtatacttagcaggatgcagtgctttcatacagagatgaccagaagatggagaccgtaggggaaatgccgtgtaatccaagcagttcaggctttggggccaggtggacagggtttgaatgccagctctggaatctgttagtggggtgacctcagccaagtcacttaacacttctgaactttgttttctcttttgtgaaataaagaaaaaatgaatctacaaaaaaaaaaaaaaaaaa

SEQ ID NO: 2092 - protein, 685 aa, Homo sapiens
MDHAEENEILAATQRYYVERPIFSHPVLQERLHTKDKVPDSIADKLKQAFTCTPKKIRNIIYMFLPITKWLPAYKFKEYVLGDLVSGISTGVLQLPQGLAFAMLAAVPPIFGLYSSFYPVIMYCFLGTSRHISIGPFAVISLMIGGVAVRLVPDDIVIPGGVNATNGTEARDALRVKVAMSVTLLSGIIQFCLGVCRFGFVAIYLTEPLVRGFTTAAAVHVFTSMLKYLFGVKTKRYSGIFSVVYSTVAVLQNVKNLNVCSLGVGLMVFGLLLGGKEFNERFKEKLPAPIPLEFFAVVMGTGISAGFNLKESYNVDVVGTLPLGLLPPANPDTSLFHLVYVDAIAIAIVGFSVTISMAKTLANKHGYQVDGNQELIALGLCNSIGSLFQTFSISCSLSRSLVQEGTGGKTQLAGCLASLMILLVILATGFLFESLPQAVLSAIVIVNLKGMFMQFSDLPFFWRTSKIELTIWLTTFVSSLFLGLDYGLITAVIIALLTVIYRTQSPSYKVLGKLPETDVYIDIDAYEEVKEIPGIKIFQINAPIYYANSDLYSNALKRKTGVNPAVIMGARRKAMRKYAKEVGNANMANATVVKADAEVDGEDATKPEEEDGEVKYPPIVIKSTFPEEMQRFMPPGDNVHTVILDFTQVNFIDSVGVKTLAGIVKEYGDVGIYVYLAGCSAFIQR

SEQ ID NO: 2093 - DNA, 1965 bp, Homo sapiens
aggcagcggctgtggagcgcggcggggcggctccgcccagggcagcccgggctgggccaaggagcgagctctcccttctcctgctctcagcctcagtgatcaaggcttcagtgaactgcactggagctcccagcgggggatcttgtcccctgtcccgacttttgtgctgcacattggatctggtgacactcaggaaatgcttgtctccggctgttaaggaataatttcagagtactatggatcatgctgaagaaaatgaaatccttgcagcaacccagaggtactatgtggaaaggcctatctttagtcatccggtcctccaggaaagactacacacaaaggacaaggttcctgattccattgcggataagctgaaacaggcattcacatgtactcctaaaaaaataagaaatatcatttatatgttcctacccataactaaatggctgccagcatacaaattcaaggaatatgtgttgggtgacttggtctcaggcataagcacaggggtgcttcagcttcctcaaggcttagcctttgcaatgctggcagctgtgcctccaatatttggcctgtactcttcattttaccctgttatcatgtattgttttcttggaacctccagacacatatccataggtccttttgctgttattagcctgatgattggtggtgtagctgttcgattagtaccagatgatatagtcattccaggaggagtaaatgcaaccaatggcacagaggccagagatgccttgagagtgaaagtcgccatgtctgtgaccttactttcaggaatcattcagttttgcctaggtgtctgtaggtttggatttgtggccatatatctcacagagcctctggtccgtgggtttaccaccgcagcagctgtgcatgtcttcacctccatgttaaaatatctgtttggagttaaaacaaagcggtacagtggaatcttttccgtggtgtatagtacagttgctgtgttgcagaatgttaaaaacctcaacgtgtgttccctaggcgtcgggctgatggtttttggtttgctgttgggtggcaaggagtttaatgagagatttaaagagaaattgccggcgcctattcctttagagttctttgcggtcgtaatgggaactggcatttcagctgggtttaacttgaaagaatcatacaatgtggatgtcgttggaacacttcctctagggctgctacctccagccaatccggacaccagcctcttccaccttgtgtacgtagatgccattgccatagccatcgttggattttcagtgaccatctccatggccaagaccttagcaaataaacatggctaccaggttgacggcaatcaggagctcattgccctgggactgtgcaattccattggctcactcttccagaccttttcaatttcatgctccttgtctcgaagccttgttcaggagggaaccggtgggaagacacagcttgcaggttgtttggcctcattaatgattctgctggtcatattagcaactggattcctctttgaatcattgccccaggctgtgctgtcggccattgtgattgtcaacctgaagggaatgtttatgcagttctcagatctcccctttttctggagaaccagcaaaatagagctgaccatctggcttaccacttttgtgtcctccttgttcctgggattggactatggtttgatcactgctgtgatcattgctctgctgactgtgatttacagaacacagagctttcatacagagatgaccagaagatggagaccgtaggggaaatgccgtgtaatccaagcagttcaggctttggggccaggtggacagggtttgaatgccagctctggaatctgttagtggggtgacctcagccaagtcacttaacacttctgaactttgttttctcttttgtgaaataaagaaaaaatgaatctacaaaaaaaaaaaaaaaaaa

SEQ ID NO: 2094 - protein, 516 aa, Homo sapiens
MDHAEENEILAATQRYYVERPIFSHPVLQERLHTKDKVPDSIADKLKQAFTCTPKKIRNIIYMFLPITKWLPAYKFKEYVLGDLVSGISTGVLQLPQGLAFAMLAAVPPIFGLYSSFYPVIMYCFLGTSRHISIGPFAVISLMIGGVAVRLVPDDIVIPGGVNATNGTEARDALRVKVAMSVTLLSGIIQFCLGVCRFGFVAIYLTEPLVRGFTTAAAVHVFTSMLKYLFGVKTKRYSGIFSVVYSTVAVLQNVKNLNVCSLGVGLMVFGLLLGGKEFNERFKEKLPAPIPLEFFAVVMGTGISAGFNLKESYNVDVVGTLPLGLLPPANPDTSLFHLVYVDAIAIAIVGFSVTISMAKTLANKHGYQVDGNQELIALGLCNSIGSLFQTFSISCSLSRSLVQEGTGGKTQLAGCLASLMILLVILATGFLFESLPQAVLSAIVIVNLKGMFMQFSDLPFFWRTSKIELTIWLTTFVSSLFLGLDYGLITAVIIALLTVIYRTQSFHTEMTRRWRP

SEQ ID NO: 2095 - DNA, 1422 bp, Homo sapiens
aggcagcggctgtggagcgcggcggggcggctccgcccagggcagcccgggctgggccaaggagcgagctctcccttctcctgctctcagcctcagtgatcaaggcttcagtgaactgcactggagctcccagcgggggatcttgtcccctgtcccgacttttgtgctgcacattggatctggtgacactcaggaaatgcttgtctccggctgttaaggaataatttcagagtactatggatcatgctgaagaaaatgaaatccttgcagcaacccagaggtactatgtggaaaggcctatctttagtcatccggtcctccaggaaagactacacacaaaggacaaggttcctgattccattgcggataagctgaaacaggcattcacatgtactcctaaaaaaataagaaatatcatttatatgttcctacccataactaaatggctgccagcatacaaattcaaggaatatgtgttgggtgacttggtctcaggcataagcacaggggtgcttcagcttcctcaaggcttagcctttgcaatgctggcagctgtgcctccaatatttggcctgtactcttcattttaccctgttatcatgtattgttttcttggaacctccagacacatatccataggtccttttgctgttattagcctgatgattggtggtgtagctgttcgattagtaccagatgatatagtcattccaggaggagtaaatgcaaccaatggcacagaggccagagatgccttgagagtgaaagtcgccatgtctgtgaccttactttcaggaatcattcagttttgcctaggtgtctgtaggtttggatttgtggccatatatctcacagagcctctggtccgtgggtttaccaccgcagcagctgtgcatgtcttcacctccatgttaaaatatctgtttggagttaaaacaaagcggtacagtggaatcttttccgtggtgtatagtacagttgctgtgttgcagaatgttaaaaacctcaacgtgtgttccctaggcgtcgggctgatggtttttggtttgctgttgggtggcaaggagtttaatgagagatttaaagagaaattgccggcgcctattcctttagagttctttgcggtcgtaatgggaactggcatttcagctgggtttaacttgaaagaatcatacaatgtggatgtcgttggaacacttcctctaggctttcatacagagatgaccagaagatggagaccgtaggggaaatgccgtgtaatccaagcagttcaggctttggggccaggtggacagggtttgaatgccagctctggaatctgttagtggggtgacctcagccaagtcacttaacacttctgaactttgttttctcttttgtgaaataaagaaaaaatgaatctacaaaaaaaaaaaaaaaaaa

SEQ ID NO: 2096 - protein, 335 aa, Homo sapiens
MDHAEENEILAATQRYYVERPIFSHPVLQERLHTKDKVPDSIADKLKQAFTCTPKKIRNIIYMFLPITKWLPAYKFKEYVLGDLVSGISTGVLQLPQGLAFAMLAAVPPIFGLYSSFYPVIMYCFLGTSRHISIGPFAVISLMIGGVAVRLVPDDIVIPGGVNATNGTEARDALRVKVAMSVTLLSGIIQFCLGVCRFGFVAIYLTEPLVRGFTTAAAVHVFTSMLKYLFGVKTKRYSGIFSVVYSTVAVLQNVKNLNVCSLGVGLMVFGLLLGGKEFNERFKEKLPAPIPLEFFAVVMGTGISAGFNLKESYNVDVVGTLPLGFHTEMTRRWRP

SEQ ID NO: 2097 - DNA, 8192 bp, Homo sapiens
tcggcgggggcccgctcccaggcccgctcccgagcccgttccgctcccgtccgccttcttctcgccttctctccgcgtggctcctccgtcccggcgtctccaaaactgaatgagcgagcggcgcgtagggcgcgcggcggcggcggcggcggcggcggcatggagcgcagtggctgggcccggcagactttcctcctagcgctgttgctgggggcgacgctgagggcgcgcgcggcggctggctattacccccgcttttcgcccttctttttcctgtgcacccaccacggggagctggaaggggatggggagcagggcgaggtgctcatttccctgcatattgcgggcaaccccacctactacgttccgggacaagaataccatgtgacaatttcaacaagcaccttttttgacggcttgctggtgacaggactatacacatctacaagtgttcaggcatcacagagcattggaggttccagtgctttcggatttgggatcatgtctgaccaccagtttggtaaccagtttatgtgcagtgtggtagcctctcacgtgagtcacctgcccacaaccaacctcagtttcatctggattgctccacctgcgggcacaggctgtgtgaatttcatggctacagcaacacaccggggccaggttattttcaaagatgctttagcccagcagttgtgtgaacaaggagctccaacagatgtcactgtgcacccacatctagctgaaatacatagtgacagcattatcctgagagatgactttgactcctaccaccaactgcaattaaatccaaatatatgggttgaatgtaacaactgtgagactggagaacagtgtggcgcgattatgcatggcaatgccgtcaccttctgtgaaccatatggcccacgagaactgattaccacaggccttaatacaacaacagcttctgtcctccaattttccattgggtcaggttcatgtcgctttagttattcagaccccagcatcatcgtgttatatgccaagaataactctgcggactggattcagctagagaaaattagagccccttccaatgtcagcacaatcatccatatcctctaccttcctgaggacgccaaaggggagaatgtccaatttcagtggaagcaggaaaatcttcgtgtaggtgaagtgtatgaagcctgctgggccttagataacatcttgatcatcaattcagctcacagacaagtcgttttagaagatagtctcgacccagtggacacaggcaactggcttttcttcccaggagctacagttaagcatagctgtcagtcagatgggaactccatttatttccatggaaatgaaggcagcgagttcaattttgccaccaccagggatgtagatctttccacagaagatattcaagagcaatggtcagaagaatttgagagccagcctacaggatgggatgtcttgggagctgtcattggtacagaatgtggaacgatagaatcaggcttatcaatggtcttcctcaaagatggagagaggaaattatgcactccatccatggacactaccggttatgggaacctgaggttttactttgtgatgggaggaatttgtgaccctggaaattctcatgaaaatgacataatcctgtatgcaaaaattgaaggaagaaaagagcatataacactggataccctttcctattcctcatataaggttccgtctttggtttctgtggtcatcaatcctgaacttcagactcctgctaccaaattttgtctcaggcaaaagaaccatcaaggacataataggaatgtctgggctgtagactttttccatgtcttgcctgttctcccttctacaatgtctcacatgatacagttttccatcaatctgggatgtggaacgcatcagcctggtaacagtgtcagcttggaattttctaccaaccatgggcgctcctggtccctccttcacactgaatgcttacctgagatctgtgctggaccccacctcccccacagcactgtctactcctctgaaaactacagtgggtggaaccgaataacaattccccttcctaacgcagcactaacccggaacaccaggattcgctggagacaaacaggaccaatccttggaaacatgtgggcaattgataatgtttatattggcccgtcatgtctcaaattctgttctggcagaggacagtgcactagacatggttgcaagtgtgaccctggattttctggcccagcttgtgagatggcatcccagacattcccaatgtttatttctgaaagctttggcagttccaggctctcctcttaccataacttttactctatccgtggtgctgaagtcagctttggttgtggtgtcttggccagtggtaaggccctggttttcaacaaagatgggcggcgtcagctaattacatctttccttgacagctcacaatccaggtttctccagttcacactgagactggggagcaaatctgttctgagcacgtgcagagcccctgatcagcctggtgaaggagttttgttgcattattcttatgataatgggataacttggaaactcctggagcattattcatatctcagctatcatgagcccagaataatctccgtagaactaccaggtgatgcaaagcagtttggaattcagttcagatggtggcaaccgtatcattcttcccagagagaagatgtatgggctattgatgagattatcatgacatctgtgcttttcaacagcattagtcttgactttaccaatcttgtggaggtcactcagtctctgggattctaccttggaaatgttcagccatactgtggccacgactggaccctttgttttacaggagattctaaacttgcctcaagtatgcgctatgtggaaacacaatcaatgcagataggagcatcctatatgattcagttcagtttggtgatgggatgtggccagaaatacaccccacacatggacaaccaggtgaagctggagtactcaaccaaccacggccttacctggcacctcgtccaagaagaatgccttccaagtatgccaagttgtcaggaatttacatcagcaagtatttaccatgccagtgagtttacacagtggaggagagtcatagtgcttcttccccagaaaacttggtccagtgctacccgtttccgctggagccagagctattacacagctcaagacgagtgggctttggacagcatttacattgggcagcagtgccccaacatgtgcagtgggcatggctcatgcgatcatggcatatgcaggtgtgaccaggggtaccaaggcactgaatgccacccagaagctgcccttccgtccacaattatgtcagattttgagaaccagaatggctgggagtctgactggcaagaagttattgggggagaaattgtaaaaccagaacaagggtgtggtgtcatctcttctggatcatctctgtacttcagcaaggctgggaaaagacagctggtgagttgggacctggatacttcttgggtggactttgtccagttctacatccagataggcggagagagtgcttcatgcaacaagcctgacagcagagaggagggcgtcctccttcagtacagcaacaatgggggcatccagtggcacctgctagcagagatgtacttttcagacttcagcaaacccagatttgtctatctggagcttccagctgctgccaagaccccttgcaccaggttccgctggtggcagcccgtgttctcaggggaggactatgaccagtgggcagtcgatgacatcatcattctgtccgagaagcagaagcagatcatcccagttatcaatccaactttacctcagaacttttatgagaagccagcttttgattaccctatgaatcagatgagtgtgtggttgatgttggctaatgaaggaatggttaaaaatgaaaccttctgtgctgccacaccatcagcaatgatatttggaaaatcagatggagatcgatttgcagtaactcgagatttgaccctgaaacctggatatgtgctacagttcaagctaaacataggttgtgccaatcaattcagcagtactgctccagttcttcttcagtactctcatgatgctggtatgtcctggtttctggtgaaagaaggctgttacccggcttctgcaggcaaaggatgcgaaggaaactccagagaactaagtgagcccaccatgtatcacacaggggactttgaagaatggacaagaatcaccattgttattccaaggtctcttgcatccagcaagaccagattccgatggatccaggagagcagctcacagaaaaacgtgcctccatttggtttagatggagtgtacatatccgagccttgtcccagttactgcagtggccatggggactgcatttcaggagtgtgtttctgtgacctgggatatactgctgcacaaggaacctgtgtgtcaaatgtccccaatcacaatgagatgttcgataggtttgaggggaagctcagccctctgtggtacaagataacaggtgcccaggttggaactggctgtggaacacttaacgatggcaaatctctctacttcaatggccctgggaaaagggaagcccggacggtccctctggacaccaggaatatcagacttgttcaattttatatacaaattggaagcaaaacttcaggcattacctgcatcaaaccaagaactagaaatgaagggcttattgttcagtattcaaatgacaatgggatactctggcatttgcttcgagagttggacttcatgtccttcctggaaccacagatcatttccattgacctgccacaggacgcgaagacacctgcaacggcatttcgatggtggcaaccgcaacatgggaagcattcagcccagtgggctttggatgatgttcttataggaatgaatgacagctctcaaactggatttcaagacaaatttgatggctctatagatttgcaagccaactggtatcgaatccaaggaggtcaagttgatattgactgtctctctatggatactgctctgatattcactgaaaacataggaaaacctcgttatgctgagacctgggattttcatgtgtcagcatctacctttttgcagtttgaaatgagcatgggctgtagcaagcccttcagcaactcccacagtgtacagctccagtattctctgaacaatggcaaggactggcatcttgtcaccgaagagtgtgttcctccaaccattggctgtctgcattacacggaaagttcaatttacacctcggaaagattccagaattggaagcggatcactgtctaccttccactctccaccatttctcccaggacccggttcagatggattcaggccaactacactgtgggggctgattcctgggcgattgataatgttgtactggcctcagggtgcccttggatgtgctcaggacgagggatttgtgatgctggacgctgtgtgtgtgaccggggctttggtggaccctattgtgttcctgttgttcctctgccctcgattcttaaagacgatttcaatgggaatttacatcctgacctttggcctgaagtgtatggtgcagagagggggaatctgaatggtgaaaccatcaaatctggaacatctctaatttttaaaggggaaggactaaggatgcttatttcaagagatctagattgtacaaatacaatgtatgtccagttttcacttagatttatagcaaaaagtaccccagagagatctcactctattctgttacaattctccatcagtggaggaatcacttggcacctgatggatgaattttactttcctcaaacaacgaatatacttttcatcaatgttcccttgccatacactgcccaaaccaatgctacaagattcagactctggcaaccttataataacggtaagaaagaagaaatctggattgttgatgacttcattatcgatggaaataatgtaaacaaccctgtgatgctcttggatacatttgattttgggcccagagaagacaattggtttttctatcctggtggtaacatcggtctttattgtccatattcttcaaagggggcacctgaagaagattcagctatggtgtttgtttcaaatgaagttggtgagcattccattaccacccgtgacctaaatgtgaatgagaacaccatcatacaatttgagatcaacgttggctgttcgactgatagctcatccgcggatccagtgagactggaattttcaagggacttcggggcgacctggcaccttctgctgcccctctgctaccacagcagcagccacgtcagctctttatgctccaccgagcaccaccccagcagcacctactacgcaggaaccatgcagggctggaggagggaggtcgtgcactttgggaagctgcacctttgtggatctgtccgtttcagatggtaccagggattttaccctgccggctctcagccagtgacatgggccattgataatgtctacatcggtccccagtgtgaggagatgtgtaatggacaggggagctgtatcaatggaaccaaatgtatatgtgaccctggctactcaggtccaacctgtaaaataagcaccaaaaatcctgattttctcaaagatgatttcgaaggtcagctagaatctgatagattcttattaatgagtggtgggaaaccatctcgaaagtgtggaatcctttctagtggaaacaacctctttttcaatgaagatggcttgcgcatgttgatgacacgagacctggatttatcacatgctagatttgtgcagttcttcatgagactgggatgtggtaaaggcgttcctgaccccaggagtcaacccgtgctcctacagtattctctcaacggtggcctctcgtggagtcttcttcaggagttccttttcagcaattccagcaatgtgggcaggtacattgccctggagatacccttgaaagcccgttctggttctactcgccttcgctggtggcaaccgtctgagaatgggcacttctacagcccctgggttatcgatcagattcttattggaggaaatatttctggtaatacggtcttggaagatgatttcacaacccttgatagtaggaaatggctgcttcacccaggaggcaccaagatgcccgtgtgtggctctactggtgatgccctggtcttcattgaaaaggccagcacccgttacgtggtcagcacagacgttgccgtgaatgaggattccttcctacagatagacttcgctgcctcctgctcagtcacagactcttgttatgcgattgaattggaatactcagtagatcttggattgtcatggcacccattggtaagggactgtctgcctaccaatgtggaatgcagtcgctatcatctgcaacggatcctggtgtcagacactttcaacaagtggactagaatcactctgcctctccctccttataccaggtcccaagccactcgtttccgttggcatcaaccagctccttttgacaagcagcagacatgggcaatagataatgtctatatcggggatggctgcatagacatgtgcagtggccatgggagatgcatccagggaaactgcgtctgtgatgaacagtggggtggcctgtactgtgatgaccccgagacctctcttccaacccaactcaaagacaacttcaatcgagctccatccagtcagaactggctgactgtgaacggagggaaattgagtacagtgtgtggagccgtggcgtcgggaatggctctccatttcagtgggggttgtagtcgattattagtcactgtggatctaaacctcactaatgctgagttcatccaattttacttcatgtatgggtgcctgattacaccaaacaaccgtaaccaaggtgttctcttggaatattctgtcaatggaggcattacctggaacctgctcatggagattttctatgaccagtacagtaagcccgggtttgtgaatatccttctccctcctgatgctaaagagattgccactcgcttccgctggtggcagccaagacatgacggcctggatcagaacgactgggccattgacaatgtcctcatctcaggctctgctgaccaaaggaccgttatgctggacaccttcagcagcgcccc

SEQ ID NO: 2098 - protein, 3460 aa, Homo sapiens
MERSGWARQTFLLALLLGATLRARAAAGYYPRFSPFFFLCTHHGELEGDGEQGEVLISLHIAGNPTYYVPGQEYHVTISTSTFFDGLLVTGLYTSTSVQASQSIGGSSAFGFGIMSDHQFGNQFMCSVVASHVSHLPTTNLSFIWIAPPAGTGCVNFMATATHRGQVIFKDALAQQLCEQGAPTDVTVHPHLAEIHSDSIILRDDFDSYHQLQLNPNIWVECNNCETGEQCGAIMHGNAVTFCEPYGPRELITTGLNTTTASVLQFSIGSGSCRFSYSDPSIIVLYAKNNSADWIQLEKIRAPSNVSTIIHILYLPEDAKGENVQFQWKQENLRVGEVYEACWALDNILIINSAHRQVVLEDSLDPVDTGNWLFFPGATVKHSCQSDGNSIYFHGNEGSEFNFATTRDVDLSTEDIQEQWSEEFESQPTGWDVLGAVIGTECGTIESGLSMVFLKDGERKLCTPSMDTTGYGNLRFYFVMGGICDPGNSHENDIILYAKIEGRKEHITLDTLSYSSYKVPSLVSVVINPELQTPATKFCLRQKNHQGHNRNVWAVDFFHVLPVLPSTMSHMIQFSINLGCGTHQPGNSVSLEFSTNHGRSWSLLHTECLPEICAGPHLPHSTVYSSENYSGWNRITIPLPNAALTRNTRIRWRQTGPILGNMWAIDNVYIGPSCLKFCSGRGQCTRHGCKCDPGFSGPACEMASQTFPMFISESFGSSRLSSYHNFYSIRGAEVSFGCGVLASGKALVFNKDGRRQLITSFLDSSQSRFLQFTLRLGSKSVLSTCRAPDQPGEGVLLHYSYDNGITWKLLEHYSYLSYHEPRIISVELPGDAKQFGIQFRWWQPYHSSQREDVWAIDEIIMTSVLFNSISLDFTNLVEVTQSLGFYLGNVQPYCGHDWTLCFTGDSKLASSMRYVETQSMQIGASYMIQFSLVMGCGQKYTPHMDNQVKLEYSTNHGLTWHLVQEECLPSMPSCQEFTSASIYHASEFTQWRRVIVLLPQKTWSSATRFRWSQSYYTAQDEWALDSIYIGQQCPNMCSGHGSCDHGICRCDQGYQGTECHPEAALPSTIMSDFENQNGWESDWQEVIGGEIVKPEQGCGVISSGSSLYFSKAGKRQLVSWDLDTSWVDFVQFYIQIGGESASCNKPDSREEGVLLQYSNNGGIQWHLLAEMYFSDFSKPRFVYLELPAAAKTPCTRFRWWQPVFSGEDYDQWAVDDIIILSEKQKQIIPVINPTLPQNFYEKPAFDYPMNQMSVWLMLANEGMVKNETFCAATPSAMIFGKSDGDRFAVTRDLTLKPGYVLQFKLNIGCANQFSSTAPVLLQYSHDAGMSWFLVKEGCYPASAGKGCEGNSRELSEPTMYHTGDFEEWTRITIVIPRSLASSKTRFRWIQESSSQKNVPPFGLDGVYISEPCPSYCSGHGDCISGVCFCDLGYTAAQGTCVSNVPNHNEMFDRFEGKLSPLWYKITGAQVGTGCGTLNDGKSLYFNGPGKREARTVPLDTRNIRLVQFYIQIGSKTSGITCIKPRTRNEGLIVQYSNDNGILWHLLRELDFMSFLEPQIISIDLPQDAKTPATAFRWWQPQHGKHSAQWALDDVLIGMNDSSQTGFQDKFDGSIDLQANWYRIQGGQVDIDCLSMDTALIFTENIGKPRYAETWDFHVSASTFLQFEMSMGCSKPFSNSHSVQLQYSLNNGKDWHLVTEECVPPTIGCLHYTESSIYTSERFQNWKRITVYLPLSTISPRTRFRWIQANYTVGADSWAIDNVVLASGCPWMCSGRGICDAGRCVCDRGFGGPYCVPVVPLPSILKDDFNGNLHPDLWPEVYGAERGNLNGETIKSGTSLIFKGEGLRMLISRDLDCTNTMYVQFSLRFIAKSTPERSHSILLQFSISGGITWHLMDEFYFPQTTNILFINVPLPYTAQTNATRFRLWQPYNNGKKEEIWIVDDFIIDGNNVNNPVMLLDTFDFGPREDNWFFYPGGNIGLYCPYSSKGAPEEDSAMVFVSNEVGEHSITTRDLNVNENTIIQFEINVGCSTDSSSADPVRLEFSRDFGATWHLLLPLCYHSSSHVSSLCSTEHHPSSTYYAGTMQGWRREVVHFGKLHLCGSVRFRWYQGFYPAGSQPVTWAIDNVYIGPQCEEMCNGQGSCINGTKCICDPGYSGPTCKISTKNPDFLKDDFEGQLESDRFLLMSGGKPSRKCGILSSGNNLFFNEDGLRMLMTRDLDLSHARFVQFFMRLGCGKGVPDPRSQPVLLQYSLNGGLSWSLLQEFLFSNSSNVGRYIALEIPLKARSGSTRLRWWQPSENGHFYSPWVIDQILIGGNISGNTVLEDDFTTLDSRKWLLHPGGTKMPVCGSTGDALVFIEKASTRYVVSTDVAVNEDSFLQIDFAASCSVTDSCYAIELEYSVDLGLSWHPLVRDCLPTNVECSRYHLQRILVSDTFNKWTRITLPLPPYTRSQATRFRWHQPAPFDKQQTWAIDNVYIGDGCIDMCSGHGRCIQGNCVCDEQWGGLYCDDPETSLPTQLKDNFNRAPSSQNWLTVNGGKLSTVCGAVASGMALHFSGGCSRLLVTVDLNLTNAEFIQFYFMYGCLITPNNRNQGVLLEYSVNGGITWNLLMEIFYDQYSKPGFVNILLPPDAKEIATRFRWWQPRHDGLDQNDWAIDNVLISGSADQRTVMLDTFSSAPVPQHERSPADAGPVGRIAFDMFMEDKTSVNEHWLFHDDCTVERFCDSPDGVMLCGSHDGREVYAVTHDLTPTEGWIMQFKISVGCKVSEKIAQNQIHVQYSTDFGVSWNYLVPQCLPADPKCSGSVSQPSVFFPTKGWKRITYPLPESLVGNPVRFRFYQKYSDMQWAIDNFYLGPGCLDNCRGHGDCLREQCICDPGYSGPNCYLTHTLKTFLKERFDSEEIKPDLWMSLEGGSTCTECGILAEDTALYFGGSTVRQAVTQDLDLRGAKFLQYWGRIGSENNMTSCHRPICRKEGVLLDYSTDGGITWTLLHEMDYQKYISVRHDYILLPEDALTNTTRLRWWQPFVISNGIVVSGVERAQWALDNILIGGAEINPSQLVDTFDDEGTSHEENWSFYPNAVRTAGFCGNPSFHLYWPNKKKDKTHNALSSRELIIQPGYMMQFKIVVGCEATSCGDLHSVMLEYTKDARSDSWQLVQTQCLPSSSNSIGCSPFQFHEATIYNSVNSSSWKRITIQLPDHVSSSATQFRWIQKGEETEKQSWAIDHVYIGEACPKLCSGHGYCTTGAICICDESFQGDDCSVFSHDLPSYIKDNFESARVTEANWETIQGGVIGSGCGQLAPYAHGDSLYFNGCQIRQAATKPLDLTRASKIMFVLQIGSMSQTDSCNSDLSGPHAVDKAVLLQYSVNNGITWHVIAQHQPKDFTQAQRVSYNVPLEARMKGVLLRWWQPRHNGTGHDQWALDHVEVVLVSTRKQNYMMNFSRQHGLRHFYNRRRRSLRRYP

SEQ ID NO: 2099 - DNA, 8192 bp, Homo sapiens; identical to SEQ ID NO: 2097

SEQ ID NO: 2100 - protein, 3458 aa, Homo sapiens
MERSGWARQTFLLALLLGATLRARAAAGYYPRFSPFFFLCTHHGELEGDGEQGEVLISLHIAGNPTYYVPGQEYHVTISTSTFFDGLLVTGLYTSTSVQASQSIGGSSAFGFGIMSDHQFGNQFMCSVVASHVSHLPTTNLSFIWIAPPAGTGCVNFMATATHRGQVIFKDALAQQLCEQGAPTDVTVHPHLAEIHSDSIILRDDFDSYHQLQLNPNIWVECNNCETGEQCGAIMHGNAVTFCEPYGPRELITTGLNTTTASVLQFSIGSGSCRFSYSDPSIIVLYAKNNSADWIQLEKIRAPSNVSTIIHILYLPEDAKGENVQFQWKQENLRVGEVYEACWALDNILIINSAHRQVVLEDSLDPVDTGNWLFFPGATVKHSCQSDGNSIYFHGNEGSEFNFATTRDVDLSTEDIQEQWSEEFESQPTGWDVLGAVIGTECGTIESGLSMVFLKDGERKLCTPSMDTTGYGNLRFYFVMGGICDPGNSHENDIILYAKIEGRKEHITLDTLSYSSYKVPSLVSVVINPELQTPATKFCLRQKNHQGHNRNVWAVDFFHVLPVLPSTMSHMIQFSINLGCGTHQPGNSVSLEFSTNHGRSWSLLHTECLPEICAGPHLPHSTVYSSENYSGWNRITIPLPNAALTRNTRIRWRQTGPILGNMWAIDNVYIGPSCLKFCSGRGQCTRHGCKCDPGFSGPACEMASQTFPMFISESFGSSRLSSYHNFYSIRGAEVSFGCGVLASGKALVFNKDGRRQLITSFLDSSQSRFLQFTLRLGSKSVLSTCRAPDQPGEGVLLHYSYDNGITWKLLEHYSYLSYHEPRIISVELPGDAKQFGIQFRWWQPYHSSQREDVWAIDEIIMTSVLFNSISLDFTNLVEVTQSLGFYLGNVQPYCGHDWTLCFTGDSKLASSMRYVETQSMQIGASYMIQFSLVMGCGQKYTPHMDNQVKLEYSTNHGLTWHLVQEECLPSMPSCQEFTSASIYHASEFTQWRRVIVLLPQKTWSSATRFRWSQSYYTAQDEWALDSIYIGQQCPNMCSGHGSCDHGICRCDQGYQGTECHPEAALPSTIMSDFENQNGWESDWQEVIGGEIVKPEQGCGVISSGSSLYFSKAGKRQLVSWDLDTSWVDFVQFYIQIGGESASCNKPDSREEGVLLQYSNNGGIQWHLLAEMYFSDFSKPRFVYLELPAAAKTPCTRFRWWQPVFSGEDYDQWAVDDIIILSEKQKQIIPVINPTLPQNFYEKPAFDYPMNQMSVWLMLANEGMVKNETFCAATPSAMIFGKSDGDRFAVTRDLTLKPGYVLQFKLNIGCANQFSSTAPVLLQYSHDAGMSWFLVKEGCYPASAGKGCEGNSRELSEPTMYHTGDFEEWTRITIVIPRSLASSKTRFRWIQESSSQKNVPPFGLDGVYISEPCPSYCSGHGDCISGVCFCDLGYTAAQGTCVSNVPNHNEMFDRFEGKLSPLWYKITGAQVGTGCGTLNDGKSLYFNGPGKREARTVPLDTRNIRLVQFYIQIGSKTSGITCIKPRTRNEGLIVQYSNDNGILWHLLRELDFMSFLEPQIISIDLPQDAKTPATAFRWWQPQHGKHSAQWALDDVLIGMNDSSQTGFQDKFDGSIDLQANWYRIQGGQVDIDCLSMDTALIFTENIGKPRYAETWDFHVSASTFLQFEMSMGCSKPFSNSHSVQLQYSLNNGKDWHLVTEECVPPTIGCLHYTESSIYTSERFQNWKRITVYLPLSTISPRTRFRWIQANYTVGADSWAIDNVVLASGCPWMCSGRGICDAGRCVCDRGFGGPYCVPVVPLPSILKDDFNGNLHPDLWPEVYGAERGNLNGETIKSGTSLIFKGEGLRMLISRDLDCTNTMYVQFSLRFIAKSTPERSHSILLQFSISGGITWHLMDEFYFPQTTNILFINVPLPYTAQTNATRFRLWQPYNNGKKEEIWIVDDFIIDGNNVNNPVMLLDTFDFGPREDNWFFYPGGNIGLYCPYSSKGAPEEDSAMVFVSNEVGEHSITTRDLNVNENTIIQFEINVGCSTDSSSADPVRLEFSRDFGATWHLLLPLCYHSSSHVSSLCSTEHHPSSTYYAGTMQGWRREVVHFGKLHLCGSVRFRWYQGFYPAGSQPVTWAIDNVYIGPQCEEMCNGQGSCINGTKCICDPGYSGPTCKISTKNPDFLKDDFEGQLESDRFLLMSGGKPSRKCGILSSGNNLFFNEDGLRMLMTRDLDLSHARFVQFFMRLGCGKGVPDPRSQPVLLQYSLNGGLSWSLLQEFLFSNSSNVGRYIALEIPLKARSGSTRLRWWQPSENGHFYSPWVIDQILIGGNISGNTVLEDDFTTLDSRKWLLHPGGTKMPVCGSTGDALVFIEKASTRYVVSTDVAVNEDSFLQIDFAASCSVTDSCYAIELEYSVDLGLSWHPLVRDCLPTNVECSRYHLQRILVSDTFNKWTRITLPLPPYTRSQATRFRWHQPAPFDKQQTWAIDNVYIGDGCIDMCSGHGRCIQGNCVCDEQWGGLYCDDPETSLPTQLKDNFNRAPSSQNWLTVNGGKLSTVCGAVASGMALHFSGGCSRLLVTVDLNLTNAEFIQFYFMYGCLITPNNRNQGVLLEYSVNGGITWNLLMEIFYDQYSKPGFVNILLPPDAKEIATRFRWWQPRHDGLDQNDWAIDNVLISGSADQRTVMLDTFSSAPVPQHERSPADAGPVGRIAFDMFMEDKTSVNEHWLFHDDCTVERFCDSPDGVMLCGSHDGREVYAVTHDLTPTEGWIMQFKISVGCKVSEKIAQNQIHVQYSTDFGVSWNYLVPQCLPADPKCSGSVSQPSVFFPTKGWKRITYPLPESLVGNPVRFRFYQKYSDMQWAIDNFYLGPGCLDNCRGHGDCLREQCICDPGYSGPNCYLTHTLKTFLKERFDSEEIKPDLWMSLEGGSTCTECGILAEDTALYFGGSTVRQAVTQDLDLRGAKFLQYWGRIGSENNMTSCHRPICRKEGVLLDYSTDGGITWTLLHEMDYQKYISVRHDYILLPEDALTNTTRLRWWQPFVISNGIVVSGVERAQWALDNILIGGAEINPSQLVDTFDDEGTSHEENWSFYPNAVRTAGFCGNPSFHLYWPNKKKDKTHNALSSRELIIQPGYMMQFKIVVGCEATSCGDLHSVMLEYTKDARSDSWQLVQTQCLPSSSNSIGCSPFQFHEATIYNSVNSSSWKRITIQLPDHVSSSATQFRWIQKGEETEKQSWAIDHVYIGEACPKLCSGHGYCTTGAICICDESFQGDDCSVFSHDLPSYIKDNFESARVTEANWETIQGGVIGSGCGQLAPYAHGDSLYFNGCQIRQAATKPLDLTRASKIMFVLQIGSMSQTDSCNSDLSGPHAVDKAVLLQYSVNNGITWHVIAQHQPKDFTQAQRVSYNVPLEARMKGVLLRWWQPRHNGTGHDQWALDHVEVVLTRKQNYMMNFSRQHGLRHFYNRRRRSLRRYP

SEQ ID NO: 2101 - DNA, 1540 bp, Homo sapiens
cggccgcgagtcctgcgtgatcgcgagcatgtgtgcgtgcgcgtgtttatctgaggcgcgtgcggcggccaccccagcctagtcctcttcttggtgccactggctaactaggttgagaaaccggcgccacaggcggcacacctggcccggagctggcccgctcctccccgccgagccggcgccccaacaacgcgccctctcccagtcctcacaaaggggcctagtccggcccccggctctggccgtgagggagcgctgtgggggcgcgctgccttctgcctggaagtgttgggcaggtggtgggagagcgtcaggcttgaacaacatgattttaaagcacgtgtctgtctgtcgttttttacttttagggttttggccaaattgggcgagggcacaaaataaccacttaccccttctcaccgaggaagagcgggagaaagggtatggcacagtcacaagggtgggtgaaaagatacatcaaggccttttgtaaaggcttctttgtggcggtgcctgtggcagtgactttcttggatcgggtcgcctgtgtggcaagagtagaaggagcatcgatgcagccttctttgaatcctggggggagccagtcatctgatgtggtgcttttgaaccactggaaagtgaggaattttgaagtacaccgtggtgacattgtatcattggtgtctcctaaaaacccagaacagaagatcattaagagagtgattgctcttgaaggagatattgtcagaaccataggacacaaaaaccggtatgtcaaagtcccccgtggtcacatctgggttgaaggtgatcatcatggacacagttttgacagtaattcttttgggccggtttccctaggacttctgcatgcccatgccacacatatcctgtggcccccagagcgctggcagaaattggaatctgttcttcctccagagcgcttaccagtacagagagaagaggaatgactgcatgaatctacctgagttgctggcattgggaggccagttactggaaaggaatggaaaaaagaagcctccaaaagggaaaaacttctgacaatatgatgctgtgcgagaaatatttacagcacattaaaacgatctgtattattaaataaataattttcaaatgttaaacagtattaaatggcacctgattttgtgttaaattttagttccctgttgtttaatgcccccaaaatatgcagacctttgggaatataaaaatattgcacccacatgtcttaatggggctgaatttcagattatttgttacatatacttattatattgattgttgggttttgattttggtgcttgctgctgaaataaattgaaaattaatattcaataaaaatgatgtatttgtcacttgctgttaaggtagaacaagaaggaacacatattatacacataatgatgggaattacattgtgatttgtactatctacaaaggagtaactgccagttaggaagaacagtaaacagtgatgttaaaataaaacaatgatttgtaaaaaaaaaaaaaaaaaaaa

SEQ ID NO: 2102 - protein, 175 aa, Homo sapiens
MAQSQGWVKRYIKAFCKGFFVAVPVAVTFLDRVACVARVEGASMQPSLNPGGSQSSDVVLLNHWKVRNFEVHRGDIVSLVSPKNPEQKIIKRVIALEGDIVRTIGHKNRYVKVPRGHIWVEGDHHGHSFDSNSFGPVSLGLLHAHATHILWPPERWQKLESVLPPERLPVQREEE

SEQ ID NO: 2103 - DNA, 3389 bp, Homo sapiens
gtcggtgtgacaactgatcgggtgaacgatgcaccactaaccaccatggaaacaaggaaaaataaagcaagctcacaggatctctcttcactggattgagagcctcagcctgccgactgagaaaaagagttccaggaaaaagaaggaatcccggctgcagcctcctgccttcctttatattttaaaatagagagataagattgcgtgcatgtgtgcatatctatagtatatattttgtacactttgttacacagacacacaaatgcacctatttataccgggcaagaacacaaccatgtgattatctcaaccaaggaactgaggaatccagcacgcaaggacatcggaggtgggctagcactgaaactgcttttcaagcatcatgctgctattcctgcaaatactgaagaagcatgggatttaaatattttacttctaaataaatgaattactcaatctcctatgaccatctatacatactccaccttcaaaaagtacatcaatattatatcattaaggaaatagtaaccttctcttctccaatatgcatgacatttttggacaatgcaattgtggcactggcacttgtttcagtgaagaaaaactttgtggttctatggcattcatcatttgacaaatgcaagcatcttccttatcaatcagctcctattgaacttactagcactgactgtggaatccttaagggcccattacatttctgaagaagaaagctaagatgaaggacatgccactccgaattcatgtgctacttggcctagctatcactacactagtacaagctgtagataaaaaagtggattgtccacggttatgtacgtgtgaaatcaggccttggtttacacccagatccatttatatggaagcatctacagtggattgtaatgatttaggtcttttaactttcccagccagattgccagctaacacacagattcttctcctacagactaacaatattgcaaaaattgaatactccacagactttccagtaaaccttactagcctggatttatctcaaaacaatttatcttcagtcaccaatattaatgtaaaaaagatgcctcagctcctttctgtgtacctagaggaaaacaaacttactgaactgcctgaaaaatgtctgtccgaactgagcaacttacaagaactctatattaatcacaacttgctttctacaatttcacctggagcctttattggcctacataatcttcttcgacttcatctcaattcaaatagattgcagatgatcaacagtaagtggtttgatgctcttccaaatctagagattctgatgattggggaaaatccaattatcagaatcaaagacatgaactttaagcctcttatcaatcttcgcagcctggttatagctggtataaacctcacagaaataccagataacgccttggttggactggaaaacttagaaagcatctctttttacgataacaggcttattaaagtaccccatgttgctcttcaaaaagttgtaaatctcaaatttttggatctaaataaaaatcctattaatagaatacgaaggggtgattttagcaatatgctacacttaaaagagttggggataaataatatgcctgagctgatttccatcgatagtcttgctgtggataacctgccagatttaagaaaaatagaagctactaacaaccctagattgtcttacattcaccccaatgcatttttcagactccccaagctggaatcactcatgctgaacagcaatgctctcagtgccctgtaccatggtaccattgagtctctgccaaacctcaaggaaatcagcatacacagtaaccccatcaggtgtgactgtgtcatccgttggatgaacatgaacaaaaccaacattcgattcatggagccagattcactgttttgcgtggacccacctgaattccaaggtcagaatgttcggcaagtgcatttcagggacatgatggaaatttgtctccctcttatagctcctgagagctttccttctaatctaaatgtagaagctgggagctatgtttcctttcactgtagagctactgcagaaccacagcctgaaatctactggataacaccttctggtcaaaaactcttgcctaataccctgacagacaagttctatgtccattctgagggaacactagatataaatggcgtaactcccaaagaagggggtttatatacttgtatagcaactaacctagttggcgctgacttgaagtctgttatgatcaaagtggatggatcttttccacaagataacaatggctctttgaatattaaaataagagatattcatgccaattcagttttggtgtcctggaaagcaagttctaaaattctcaaatctagtgttaaatggacagcctttgtcaagactgaaaattctcatgctgcgcaaagtgctcgaataccatctgatgtcaaggtatataatcttactcatctgaatccatcaactgagtataaaatttgtattgatattcccaccatctatcagaaaaacagaaaaaaatgtgtaaatgtcaccaccaaaggtttgcaccctgatcaaaaagagtatgaaaagaataataccacaacacttatggcctgtcttggaggccttctggggattattggtgtgatatgtcttatcagctgcctctctccagaaatgaactgtgatggtggacacagctatgtgaggaattacttacagaaaccaacctttgcattaggtgagctttatcctcctctgataaatctctgggaagcaggaaaagaaaaaagtacatcactgaaagtaaaagcaactgttataggtttaccaacaaatatgtcctaaaaaccaccaaggaaacctactccaaaaatgaacaaaaaaaaaaaaagcgaaagactgcagttgtgctaaaaacaaaacaaaacaaacaaacaaacaaaaaagtaaaaaaagattactttcgagagagaagtttaagcttcaccaatgctgctcctgaccaatggaaatatgtacaacttcagcattttaagtaactggcttcaaggggtactgtggcaaccaaataaaataactccattttctaaaactttcatgtaacttttatgtctggactacagttcaagtggacaaaaacatttctgtattttttttaagtaaataagagtagttgaactgagcaatacctcctcctgtgttgtattacacatattagccacgagtttttgcagtgaccagataaacttgaattgacacgtggtgtaataaaatggacaaattctgtagagtagacacagtgagtatgtggacctcttttataaggaaaaatacattttggattaaaatcaaaaaaaaaaaaaaaaaaaaa

SEQ ID NO: 2104 - protein, 708 aa, Homo sapiens
MKDMPLRIHVLLGLAITTLVQAVDKKVDCPRLCTCEIRPWFTPRSIYMEASTVDCNDLGLLTFPARLPANTQILLLQTNNIAKIEYSTDFPVNLTSLDLSQNNLSSVTNINVKKMPQLLSVYLEENKLTELPEKCLSELSNLQELYINHNLLSTISPGAFIGLHNLLRLHLNSNRLQMINSKWFDALPNLEILMIGENPIIRIKDMNFKPLINLRSLVIAGINLTEIPDNALVGLENLESISFYDNRLIKVPHVALQKVVNLKFLDLNKNPINRIRRGDFSNMLHLKELGINNMPELISIDSLAVDNLPDLRKIEATNNPRLSYIHPNAFFRLPKLESLMLNSNALSALYHGTIESLPNLKEISIHSNPIRCDCVIRWMNMNKTNIRFMEPDSLFCVDPPEFQGQNVRQVHFRDMMEICLPLIAPESFPSNLNVEAGSYVSFHCRATAEPQPEIYWITPSGQKLLPNTLTDKFYVHSEGTLDINGVTPKEGGLYTCIATNLVGADLKSVMIKVDGSFPQDNNGSLNIKIRDIHANSVLVSWKASSKILKSSVKWTAFVKTENSHAAQSARIPSDVKVYNLTHLNPSTEYKICIDIPTIYQKNRKKCVNVTTKGLHPDQKEYEKNNTTTLMACLGGLLGIIGVICLISCLSPEMNCDGGHSYVRNYLQKPTFALGELYPPLINLWEAGKEKSTSLKVKATVIGLPTNMS

SEQ ID NO: 2105 - DNA, 4560 bp, Homo sapiens
agttttcctttcgttctgcggccgctgcagccagccccgcggctccctcagacccgcgggcgcagccgccgggggtgaggcgcttggggaccgcgggccgagcggcggggatccccgagcaccatgctggacccgtcttccagcgaagaggagtcggacgaggggctggaagaggaaagccgcgatgtgctggtggcagccggcagctcgcagcgagctcctccagccccgactcgggaagggcagctggacgatgagcaggagcggaggatccgcctgcagctctacgtcttcgtcgtgaggtgcatcgcgtaccccttcaacgccaagcagcccaccgacatggcccggaggcagcagaagcttaacaaacaacagttgcagttactgaaagaacggttccaggccttcctcaatggggaaacccaaattgtagctgacgaagcattttgcaacgcagttcggagttattatgaggtttttctaaagagtgaccgagtggccagaatggtacagagtggagggtgttctgctaatgacttcagagaagtatttaagaaaaacatagaaaaacgtgtgcggagtttgccagaaatagatggcttgagcaaagagacagtgttgagctcatggatagccaaatatgatgccatttacagaggtgaagaggacttgtgcaaacagccaaatagaatggccctaagtgcagtgtctgaacttattctgagcaaggaacaactctatgaaatgtttcagcagattctgggtattaaaaaactggaacaccagctcctttataatgcatgtcagctggataacgcagatgaacaagcagcccagatcagaagggaacttgatggccggctgcaattggcagataaaatggcaaaggaaagaaaattccccaaatttatagcaaaagatatggagaatatgtatatagaagagttgcggtcttcagtgaatttgctaatggccaatttggaaagtcttccagtttcgaaaggtggtccggaatttaaattacaaaaattaaaacgttcacagaactctgcatttttggacataggagatgagaatgagattcagctgtcaaagtccgacgtggtactgtcattcaccttagagattgtcataatggaagtgcaaggcctgaagtcagttgctcccaatcgaattgtttactgtacaatggaagtggaaggagaaaaacttcagacagaccaggccgaagcctcaaggccacaatgggggactcaaggagatttcaccaccacccatcctcggcctgtggtcaaagtgaaactcttcacagaaagcactggagttctggccctggaagataaagaactgggaagggtgatattatacccaacttctaatagctccaaatcagctgaattacaccgaatggtagttccaaaaaatagccaggattctgacttaaaaatcaaactggcagtgcgaatggataaaccagcacatatgaagcatagtggatatctgtatgcccttggacagaaggtttggaaaagatggaaaaaacgttactttgttctagttcaggttagccaatatacctttgctatgtgcagttatagagaaaagaagtctgaaccacaagaattaatgcagcttgaaggctatactgtggattataccgatccccacccaggccttcagggtggttgtatgttctttaatgctgttaaagaaggagatactgtaatctttgccagtgatgatgaacaggacagaatattatgggttcaagccatgtatagggccacaggtcaatcatataaaccagttcctgcaattcaaacccagaaactgaatcctaaaggaggaactctccatgcagatgctcagctttatgcagatcgttttcagaaacatggtatggatgagtttatttctgcaaacccctgcaagcttgatcatgccttcctttttagaatactccagaggcagactttggatcacagactgaatgattcctattcttgcttgggatggtttagccctggccaagtctttgtgttagatgagtactgtgcccgttatggtgtgagaggctgtcacagacatctctgctaccttgcagaactgatggaacattcagaaaatggtgctgtcattgaccctaccctgctccattacagctttgcattctgtgcctctcatgtgcacggcaacaggcctgatggaattgggactgtttcagtggaagaaaaagaaagatttgaggagataaaagagagactctcttcccttttagaaaatcagataagccatttcagatactgttttccctttggacgacctgaaggtgctctaaaagctacactttcattacttgaaagggttttaatgaaagatattgccactcccataccagcagaagaggtgaagaaagtggtcagaaaatgtctcgagaaagctgccttgatcaattacactagactcacagaatatgccaaaatagaagagaccatgaaccaggcatctcctgctagaaagctggaagagattcttcatctggcagagctctgcatagaagtcttacagcagaatgaagagcatcatgcagaggcatttgcctggtggcctgatttattggctgaacatgcagagaaattttgggctttatttacagtggatatggacactgcactagaggctcaaccgcaagactcctgggatagttttcctcttttccaactgcttaataatttcctccgaaatgacacacttttgtgtaatggaaaatttcacaaacacttgcaagaaatctttgtacccttggttgtccgctatgtggatctcatggagtcttccatcgcccagtcaattcacagaggttttgagcaggagacatggcagcctgtcaacaatggctcagcaacatcagaagaccttttttggaagcttgatgcactgcaaatgtttgtctttgatctgcactggccagaacaggaatttgcccaccacttagagcaaagacttaaactaatggccagtgatatgctagaggcctgtgtcaaaagaacaagaactgcatttgaactcaagctacaaaaggcaagcaaaacaactgacttgcgcattccagcttccgtttgcactatgtttaatgtattagtcgatgccaaaaagcaaagcaccaaactctgtgccctggatggaggacaagagtttggtagtcaatggcaacagtaccattcaaaaatagatgatctgatcgacaacagtgtaaaagaaatcatttcactgttagtttcaaagtttgtttcagtgttggaaggcgtgttgtctaagctgtcaaggtatgatgaaggcactttcttttcatccattctgtcattcactgtgaaagcagctgcaaaatatgttgatgttccaaaaccaggaatggatctggcagacacctatattatgtttgttcggcaaaaccaagatattcttcgagaaaaggtcaatgaggaaatgtatatagaaaagttatttgatcaatggtacagcagttccatgaaagtcatttgcgtgtggttgactgatagattagacctccaactccatatttaccagctgaagacgctcatcaagattgtgaagaaaacctacagggactttcgattgcagggtgtgttggaaggaacactgaacagtaagacttatgatactgtgcacagacgtttaacagtagaggaggccacagcctctgtttcagaaggaggaggacttcagggcattactatgaaagacagtgacgaagaagaagaaggctgatatcacacagctttgcagaaggaaggaagaccttgatcgacattgttttttatttttttaaccttgtccttgtaattacattcattgtttgttttggccaaataaaaatgcttgtatttctttaaaaagtaagcctgaatgtagagtaaaaggggaaatgccaagattttggggtttttttgtttcctttttttgtttgtttgtttgtttgtttttttggagaagagcatcctcttttgtgtagtttgacctaaaaatgaaccttggctctgcttgtgatcagaacatgaacttttttttttaaagaagatttgagcatttttctgtaatcacatcaaaatgatgttttctgtgtaaagcgagatacatatttctcataatgcagcattgtgagaagtcagttcggaccactgcaccaacactgtcgtatccttgttaaaatggtgtgtaccttacaaattataatttatgtgccaggttcgttttgtacttaatttgctattattgtgatgtgtataaaatctttaatcttggttcttagtactttgaattggtctacaggtatattcctgggatgaaaggattgccaaacccaaatatagactagattatccaatgggtttgtgtctttgttccattctcaacatttcttctttcaactataagtaatccccaggtgtggggtagcaagtgtgcttccgtcaagataccatattctcctgctccagtataacagcttgcaggcaataaaaatctatttgctcataa

SEQ ID NO: 2106 - protein, 1222 aa, Homo sapiens
MLDPSSSEEESDEGLEEESRDVLVAAGSSQRAPPAPTREGQLDDEQERRIRLQLYVFVVRCIAYPFNAKQPTDMARRQQKLNKQQLQLLKERFQAFLNGETQIVADEAFCNAVRSYYEVFLKSDRVARMVQSGGCSANDFREVFKKNIEKRVRSLPEIDGLSKETVLSSWIAKYDAIYRGEEDLCKQPNRMALSAVSELILSKEQLYEMFQQILGIKKLEHQLLYNACQLDNADEQAAQIRRELDGRLQLADKMAKERKFPKFIAKDMENMYIEELRSSVNLLMANLESLPVSKGGPEFKLQKLKRSQNSAFLDIGDENEIQLSKSDVVLSFTLEIVIMEVQGLKSVAPNRIVYCTMEVEGEKLQTDQAEASRPQWGTQGDFTTTHPRPVVKVKLFTESTGVLALEDKELGRVILYPTSNSSKSAELHRMVVPKNSQDSDLKIKLAVRMDKPAHMKHSGYLYALGQKVWKRWKKRYFVLVQVSQYTFAMCSYREKKSEPQELMQLEGYTVDYTDPHPGLQGGCMFFNAVKEGDTVIFASDDEQDRILWVQAMYRATGQSYKPVPAIQTQKLNPKGGTLHADAQLYADRFQKHGMDEFISANPCKLDHAFLFRILQRQTLDHRLNDSYSCLGWFSPGQVFVLDEYCARYGVRGCHRHLCYLAELMEHSENGAVIDPTLLHYSFAFCASHVHGNRPDGIGTVSVEEKERFEEIKERLSSLLENQISHFRYCFPFGRPEGALKATLSLLERVLMKDIATPIPAEEVKKVVRKCLEKAALINYTRLTEYAKIEETMNQASPARKLEEILHLAELCIEVLQQNEEHHAEAFAWWPDLLAEHAEKFWALFTVDMDTALEAQPQDSWDSFPLFQLLNNFLRNDTLLCNGKFHKHLQEIFVPLVVRYVDLMESSIAQSIHRGFEQETWQPVNNGSATSEDLFWKLDALQMFVFDLHWPEQEFAHHLEQRLKLMASDMLEACVKRTRTAFELKLQKASKTTDLRIPASVCTMFNVLVDAKKQSTKLCALDGGQEFGSQWQQYHSKIDDLIDNSVKEIISLLVSKFVSVLEGVLSKLSRYDEGTFFSSILSFTVKAAAKYVDVPKPGMDLADTYIMFVRQNQDILREKVNEEMYIEKLFDQWYSSSMKVICVWLTDRLDLQLHIYQLKTLIKIVKKTYRDFRLQGVLEGTLNSKTYDTVHRRLTVEEATASVSEGGGLQGITMKDSDEEEEG

SEQ ID NO: 2107 - DNA, 4683 bp, Homo sapiens
agttttcctttcgttctgcggccgctgcagccagccccgcggctccctcagacccgcgggcgcagccgccgggggtgaggcgcttggggaccgcgggccgagcggcggggatccccgagcaccatgctggacccgtcttccagcgaagaggagtcggacgaggggctggaagaggaaagccgcgatgtgctggtggcagccggcagctcgcagcgagctcctccagccccgactcgggaagggcagctggacgatgagcaggagcggaggatccgcctgcagctctacgtcttcgtcgtgaggtgcatcgcgtaccccttcaacgccaagcagcccaccgacatggcccggaggcagcagaagcttaacaaacaacagttgcagttactgaaagaacggttccaggccttcctcaatggggaaacccaaattgtagctgacgaagcattttgcaacgcagttcggagttattatgaggtttttctaaagagtgaccgagtggccagaatggtacagagtggagggtgttctgctaatgacttcagagaagtatttaagaaaaacatagaaaaacgtgtgcggagtttgccagaaatagatggcttgagcaaagagacagtgttgagctcatggatagccaaatatgatgccatttacagaggtgaagaggacttgtgcaaacagccaaatagaatggccctaagtgcagtgtctgaacttattctgagcaaggaacaactctatgaaatgtttcagcagattctgggtattaaaaaactggaacaccagctcctttataatgcatgtcagctggataacgcagatgaacaagcagcccagatcagaagggaacttgatggccggctgcaattggcagataaaatggcaaaggaaagaaaattccccaaatttatagcaaaagatatggagaatatgtatatagaagagttgcggtcttcagtgaatttgctaatggccaatttggaaagtcttccagtttcgaaaggtggtccggaatttaaattacaaaaattaaaacgttcacagaactctgcatttttggacataggagatgagaatgagattcagctgtcaaagtccgacgtggtactgtcattcaccttagagattgtcataatggaagtgcaaggcctgaagtcagttgctcccaatcgaattgtttactgtacaatggaagtggaaggagaaaaacttcagacagaccaggccgaagcctcaaggccacaatgggggactcaaggagatttcaccaccacccatcctcggcctgtggtcaaagtgaaactcttcacagaaagcactggagttctggccctggaagataaagaactgggaagggtgatattatacccaacttctaatagctccaaatcagctgaattacaccgaatggtagttccaaaaaatagccaggattctgacttaaaaatcaaactggcagtgcgaatggataaaccagcacatatgaagcatagtggatatctgtatgcccttggacagaaggtttggaaaagatggaaaaaacgttactttgttctagttcaggttagccaatatacctttgctatgtgcagttatagagaaaagaagtctgaaccacaagaattaatgcagcttgaaggctatactgtggattataccgatccccacccaggccttcagggtggttgtatgttctttaatgctgttaaagaaggagatactgtaatctttgccagtgatgatgaacaggacagaatattatgggttcaagccatgtatagggccacaggtcaatcatataaaccagttcctgcaattcaaacccagaaactgaatcctaaaggaggaactctccatgcagatgctcagctttctggtaaagatgcagatcgttttcagaaacatggtatggatgagtttatttctgcaaacccctgcaagcttgatcatgccttcctttttagaatactccagaggcagactttggatcacagactgaatgattcctattcttgcttgggatggtttagccctggccaagtctttgtgttagatgagtactgtgcccgttatggtgtgagaggctgtcacagacatctctgctaccttgcagaactgatggaacattcagaaaatggtgctgtcattgaccctaccctgctccattacagctttgcattctgtgcctctcatgtgcacggcaacaggcctgatggaattgggactgtttcagtggaagaaaaagaaagatttgaggagataaaagagagactctcttcccttttagaaaatcagataagccatttcagatactgttttccctttggacgacctgaaggtgctctaaaagctacactttcattacttgaaagggttttaatgaaagatattgccactcccataccagcagaagaggtgaagaaagtggtcagaaaatgtctcgagaaagctgccttgatcaattacactagactcacagaatatgccaaaatagaagagaccatgaaccaggcatctcctgctagaaagctggaagagattcttcatctggcagagctctgcatagaagtcttacagcagaatgaagagcatcatgcagagggaagagaggcatttgcctggtggcctgatttattggctgaacatgcagagaaattttgggctttatttacagtggatatggacactgcactagaggctcaaccgcaagactcctgggatagttttcctcttttccaactgcttaataatttcctccgaaatgacacacttttgtgtaatggaaaatttcacaaacacttgcaagaaatctttgtacccttggttgtccgctatgtggatctcatggagtcttccatcgcccagtcaattcacagaggttttgagcaggagacatggcagcctgtcaagaatatcgccaacagtcttcccaatgtagctcttccaaaagttccaagtctgcctcttaatcttccacagattcctaacatttctactgcttcgtggatgccttctttatatgagtccaccaatggctcagcaacatcagaagaccttttttggaagcttgatgcactgcaaatgtttgtctttgatctgcactggccagaacaggaatttgcccaccacttagagcaaagacttaaactaatggccagtgatatgctagaggcctgtgtcaaaagaacaagaactgcatttgaactcaagctacaaaaggcaagcaaaacaactgacttgcgcattccagcttccgtttgcactatgtttaatgtattagtcgatgccaaaaagcaaagcaccaaactctgtgccctggatggaggacaagagcaacagtaccattcaaaaatagatgatctgatcgacaacagtgtaaaagaaatcatttcactgttagtttcaaagtttgtttcagtgttggaaggcgtgttgtctaagctgtcaaggtatgatgaaggcactttcttttcatccattctgtcattcactgtgaaagcagctgcaaaatatgttgatgttccaaaaccaggaatggatctggcagacacctatattatgtttgttcggcaaaaccaagatattcttcgagaaaaggtcaatgaggaaatgtatatagaaaagttatttgatcaatggtacagcagttccatgaaagtcatttgcgtgtggttgactgatagattagacctccaactccatatttaccagctgaagacgctcatcaagattgtgaagaaaacctacagggactttcgattgcagggtgtgttggaaggaacactgaacagtaagacttatgatactgtgcacagacgtttaacagtagaggaggccacagcctctgtttcagaaggaggaggacttcagggcattactatgaaagacagtgacgaagaagaagaaggctgatatcacacagctttgcagaaggaaggaagaccttgatcgacattgttttttatttttttaaccttgtccttgtaattacattcattgtttgttttggccaaataaaaatgcttgtatttctttaaaaagtaagcctgaatgtagagtaaaaggggaaatgccaagattttggggtttttttgtttcctttttttgtttgtttgtttgtttgtttttttggagaagagcatcctcttttgtgtagtttgacctaaaaatgaaccttggctctgcttgtgatcagaacatgaacttttttttttaaagaagatttgagcatttttctgtaatcacatcaaaatgatgttttctgtgtaaagcgagatacatatttctcataatgcagcattgtgagaagtcagttcggaccactgcaccaacactgtcgtatccttgttaaaatggtgtgtaccttacaaattataatttatgtgccaggttcgttttgtacttaatttgctattattgtgatgtgtataaaatctttaatcttggttcttagtactttgaattggtctacaggtatattcctgggatgaaaggattgccaaacccaaatatagactagattatccaatgggtttgtgtctttgttccattctcaacatttcttctttcaactataagtaatccccaggtgtggggtagcaagtgtgcttccgtcaagataccatattctcctgctccagtataacagcttgcaggcaataaaaatctatttgctcataa

SEQ ID NO: 2108 - protein, 1263 aa, Homo sapiens
MLDPSSSEEESDEGLEEESRDVLVAAGSSQRAPPAPTREGQLDDEQERRIRLQLYVFVVRCIAYPFNAKQPTDMARRQQKLNKQQLQLLKERFQAFLNGETQIVADEAFCNAVRSYYEVFLKSDRVARMVQSGGCSANDFREVFKKNIEKRVRSLPEIDGLSKETVLSSWIAKYDAIYRGEEDLCKQPNRMALSAVSELILSKEQLYEMFQQILGIKKLEHQLLYNACQLDNADEQAAQIRRELDGRLQLADKMAKERKFPKFIAKDMENMYIEELRSSVNLLMANLESLPVSKGGPEFKLQKLKRSQNSAFLDIGDENEIQLSKSDVVLSFTLEIVIMEVQGLKSVAPNRIVYCTMEVEGEKLQTDQAEASRPQWGTQGDFTTTHPRPVVKVKLFTESTGVLALEDKELGRVILYPTSNSSKSAELHRMVVPKNSQDSDLKIKLAVRMDKPAHMKHSGYLYALGQKVWKRWKKRYFVLVQVSQYTFAMCSYREKKSEPQELMQLEGYTVDYTDPHPGLQGGCMFFNAVKEGDTVIFASDDEQDRILWVQAMYRATGQSYKPVPAIQTQKLNPKGGTLHADAQLSGKDADRFQKHGMDEFISANPCKLDHAFLFRILQRQTLDHRLNDSYSCLGWFSPGQVFVLDEYCARYGVRGCHRHLCYLAELMEHSENGAVIDPTLLHYSFAFCASHVHGNRPDGIGTVSVEEKERFEEIKERLSSLLENQISHFRYCFPFGRPEGALKATLSLLERVLMKDIATPIPAEEVKKVVRKCLEKAALINYTRLTEYAKIEETMNQASPARKLEEILHLAELCIEVLQQNEEHHAEGREAFAWWPDLLAEHAEKFWALFTVDMDTALEAQPQDSWDSFPLFQLLNNFLRNDTLLCNGKFHKHLQEIFVPLVVRYVDLMESSIAQSIHRGFEQETWQPVKNIANSLPNVALPKVPSLPLNLPQIPNISTASWMPSLYESTNGSATSEDLFWKLDALQMFVFDLHWPEQEFAHHLEQRLKLMASDMLEACVKRTRTAFELKLQKASKTTDLRIPASVCTMFNVLVDAKKQSTKLCALDGGQEQQYHSKIDDLIDNSVKEIISLLVSKFVSVLEGVLSKLSRYDEGTFFSSILSFTVKAAAKYVDVPKPGMDLADTYIMFVRQNQDILREKVNEEMYIEKLFDQWYSSSMKVICVWLTDRLDLQLHIYQLKTLIKIVKKTYRDFRLQGVLEGTLNSKTYDTVHRRLTVEEATASVSEGGGLQGITMKDSDEEEEG

SEQ ID NO: 2109 - DNA, 1446 bp, Homo sapiens
gcagtatctagagttaacagtaggggatttatttttcaatctaaagtttttcacctctctctagtaagacatctgaaactcataagccatctttaagaatttcttacaaaaacatgctggaagacagtggatcttgtttgtatcctgaagatttttttctcttcgttattttaaattaattgtcaacagatgtgcaactgttaggttggttcttaagtcactcggagaagagagagatgcatctactcaaggttggcacttggagaaacaacactgcctcttcctggcttatgaagttcagtgttctttggcttgttagtcagaactgttgcagagcaagtgttgtttggatggcttatatgaacatatcatttcatgttgggaatcatgtgttgtcagagttgggagagactggagtctttggaagaagctccactttgaagagagtggcaggagttatagtgccaccagagggaaaaatccaaaatgcatgtaatcccaataccattttcagccgatcaaagtactcagagacctggcttgcacttattgaacggggaggttgtaccttcacacagaaaattaaagtggcaactgagaagggagccagtggagtgatcatctataacgttccaggtactggcaaccaggtgttccccatgtttcatcaggcatttgaagatgtcgttgtggttatgattggtaacttaaaaggcacggaaattttccatttaattaagaagggagttctcattacagccgtggttgaggtggggagaaagcacatcatctggatgaatcactatttggtctcttttgtgattgtcacaactgctaccttagcatatttcatcttttatcacattcatagactttgtttagcaaggattcagaaccggagatggcagcgattaacaacagatcttcagaacacatttggacaactccaacttcgagtagtaaaagagggggatgaagaaataaatccaaatggggatagctgcgtaatttgctttgaacgctataagcctaatgacatagttcgtattctgacttgtaaacattttttccacaagaattgcattgacccctggattttaccccatgggacatgccccatttgcaaatgtgatattcttaaagttttggggattcaagtggttgttgaaaatggaacagaacctttgcaagttctaatgtcaaatgaactgcctgaaaccttatcacctagtgaagaggagacaaataatgaagtttctcctgcaggaacctcagataaagtaatccatgtggaggagaaccctacttctcagaataatgacatccagcctcattcagtagtggaagatgttcatccttcaccttgatggcatgacttttgaggaagtgtattaaacctgtatgtgaaatcaggtcctaatactgacaagcagtttgtctgttaaa

SEQ ID NO: 2110 - protein, 376 aa, Homo sapiens
MHLLKVGTWRNNTASSWLMKFSVLWLVSQNCCRASVVWMAYMNISFHVGNHVLSELGETGVFGRSSTLKRVAGVIVPPEGKIQNACNPNTIFSRSKYSETWLALIERGGCTFTQKIKVATEKGASGVIIYNVPGTGNQVFPMFHQAFEDVVVVMIGNLKGTEIFHLIKKGVLITAVVEVGRKHIIWMNHYLVSFVIVTTATLAYFIFYHIHRLCLARIQNRRWQRLTTDLQNTFGQLQLRVVKEGDEEINPNGDSCVICFERYKPNDIVRILTCKHFFHKNCIDPWILPHGTCPICKCDILKVLGIQVVVENGTEPLQVLMSNELPETLSPSEEETNNEVSPAGTSDKVIHVEENPTSQNNDIQPHSVVEDVHPSP

SEQ ID NO: 2111 - DNA, 1328 bp, Homo sapiens
gtaccaatcacaagtcttgttattttgtttcattatgagaaagataatctactaaatattaaaatactggaaggagcaagatagctttgatccagggagaccttttccatttatgtgctttagtaatctgccgccaacaagctatcttctttatgttcttctacaactgatgttgttttgttttctcatgtttgtctcttaatagacaaatggaggcatgagcttccttagaattaccccttcgacgcatagttctgtttcatctggacttttgaggcttagtatctttctactacttagctttcctgactcaaacggaaaagccatttggacagctcacctgaatataacatttcaggttggaaatgagatcacatcggaattaggagagagtggagtgttcgggaatcattctcctctggaaagggtgtctggtgtggtggcacttcctgaaggatggaatcagaatgcctgtcatcctttgaccaatttcagcaggcccaaacaggcagactcatggctggccctcatcgaacgtggaggctgtacttttacacataaaatcaacgtggcagcagagaagggagcaaatggggtgatcatctacaactatcaaggtacgggcagtaaagtatttcccatgtctcaccaggggacggaaaatatagtcgcggtgatgataagcaacctgaaaggcatggaaattttgcactcgattcagaaaggagtctatgtgacagtcatcattgaagtggggagaatgcacatgcagtgggtgagccattacatcatgtatctatttaccttcctggctgccacaattgcctacttttacttagattgcgtctggagacttacacctagagtgcccaattctttcaccaggaggcgaagtcaaataaagacagatgtgaagaaagctattgaccagcttcaactgcgagttctcaaagaaggggatgaggaattagacctaaatgaagacaactgtgttgtttgctttgacacatacaaaccccaagatgtagtacgcattttaacttgcaaacattttttccataaggcatgcattgacccctggcttttagcccataggacatgtcccatgtgcaagtgtgacatcctgaaaacttaagaaatctggagaattttctgaagatgtaaccagatctttccaaatacaaagattagataaattgtcttattgtactttatgtagagagaaaatttcagcttctctacccaagtatgaacaagggtgaaatttgtgttttaaaaataaaactccttatcatgcccagcaaaaaaaaaaaaaaaaaaaaaaaaaa

SEQ ID NO: 2112 - protein, 305 aa, Homo sapiens
MSFLRITPSTHSSVSSGLLRLSIFLLLSFPDSNGKAIWTAHLNITFQVGNEITSELGESGVFGNHSPLERVSGVVALPEGWNQNACHPLTNFSRPKQADSWLALIERGGCTFTHKINVAAEKGANGVIIYNYQGTGSKVFPMSHQGTENIVAVMISNLKGMEILHSIQKGVYVTVIIEVGRMHMQWVSHYIMYLFTFLAATIAYFYLDCVWRLTPRVPNSFTRRRSQIKTDVKKAIDQLQLRVLKEGDEELDLNEDNCVVCFDTYKPQDVVRILTCKHFFHKACIDPWLLAHRTCPMCKCDILKT

SEQ ID NO: 2113 - DNA, 3811 bp, Homo sapiens
ctattgaagccacctgctcaggacaatgaaattcttcagttacattctggtttatcgccgatttctcttcgtggttttcactgtgttggttttactacctctgcccatcgtcctccacaccaaggaagcagaatgtgcctacacactctttgtggtcgccacattttggctcacagaagcattgcctctgtcggtaacagctttgctacctagtttaatgttacccatgtttgggatcatgccttctaagaaggtggcatctgcttatttcaaggattttcacttactgctaattggagttatctgtttagcaacatccatagaaaaatggaatttgcacaagagaattgctctgaaaatggtgatgatggttggtgtaaatcctgcatggctgacgctggggttcatgagcagcactgcctttttgtctatgtggctcagcaacacctcgacggctgccatggtgatgcccattgcggaggctgtagtgcagcagatcatcaatgcagaagcagaggtcgaggccactcagatgacttacttcaacggatcaaccaaccacggactagaaattgatgaaagtgttaatggacatgaaataaatgagaggaaagagaaaacaaaaccagttccaggatacaataatgatacagggaaaatttcaagcaaggtggagttggaaaagaactcaggcatgagaaccaaatatcgaacaaagaagggccacgtgacacgtaaacttacgtgtttgtgcattgcctactcttctaccattggtggactgacaacaatcactggtacctccaccaacttgatctttgcagagtatttcaatacacgctatcctgactgtcgttgcctcaactttggatcatggtttacgttttccttcccagctgcccttatcattctactcttatcctggatctggcttcagtggcttttcctaggattcaattttaaggagatgttcaaatgtggcaaaaccaaaacagtccaacaaaaagcttgtgctgaggtgattaagcaagaataccaaaagcttgggccaataaggtatcaagaaattgtgaccttggtcctcttcattataatggctctgctatggtttagtcgagaccccggatttgttcctggttggtctgcacttttttcagagtaccctggttttgctacagattcaactgttgctttacttatagggctgctattctttcttatcccagctaagacactgactaaaactacacctacaggagaaattgttgcttttgattactctccactgattacttggaaagaattccagtcattcatgccctgggatatagccattcttgttggtggagggtttgccctggcagatggttgtgaggagtctggattatctaagtggataggaaataaattatctcctctgggttcattaccagcatggctaataattctgatatcttctttgatggtgacatctttaactgaggtagccagcaatccagctaccattacactctttctcccaatattatctccattggccgaagccattcatgtgaaccctctttatattctgataccttctactctgtgtacttcatttgcattcctcctaccagtagcaaatccacccaatgctattgtcttttcatatggtcatctgaaagtcattgacatggttaaagctggacttggtgtcaacattgttggtgttgctgtggttatgcttggcatatgtacttggattgtacccatgtttgacctctacacttacccttcgtgggctcctgctatgagtaatgagaccatgccataataagcacaaaatttctgactatcttgcggtaatttctggaagacattaatgattgactgtaaaatgtggctctaaataactaatgacacacatttaaatcagttatggtgtagctgctgcaattcccgtgaatacccgaaacctgctgttataactcagagtccatatttgttattgcagtgcaactaaagagcatctatgtgccttcatcaagaagcccatgttttgagattttgctcatgaaccatctgcaacttgcttcatcataagaataatttataacttgaccttcaaagagattagagcatttgtttcatcttacagttggagttcaatgtaacattttaaatgcaatttattatttcagaaatttcccatgaaactaaaaatagaaaataagatatacaagttaattcggtacttggataaatcatttctgcattgttgttccagagaatttgctgagaaatcaaagccatggtcatctggtgatgaagagaaaagtttaatctaaatgatatgtgcatttcctcatttaaaaaatccaattggattattcttaatatatacatgtaatatgaaaattgagattgaagcactaattccaaaattatggctgaatatactaaataacagaaaagttacagataagaatttatttctactgaactctatagttagtgtaatataattcatatttttatgatattggcacactgagaaattcattttgtagagctatggataaggcttgctatgatttgcactattagtacagtatagttagaaaggaaagctgaacactataaaactattaacatattttcgtatatgagtaacaactttgcttaagtgtttatcttagttcagaaatacataatgtcatatgttaaaaataaagagatgtagaaatctaaatgaattatcactgtgtatacagacagaaaaatcacataactctggtgtgttaacattgcaatgaaaaaatgaaaaaaagaaggaaaaaagaataagaatgaaaactgctgacgtattacaaaacagaaaaataaatgatttaaaatcaaatcaaaaagaaaaaactaaacatttaaacaaaaatgggataagaatagtcttctagaagtgaggatgcgaaaaagaatgagtttccaattaccctgatgtgacaattacacattgtagacaggtagcaaaatatcacatacacccccaaaatatgtacaaatattatatatcaataaataaatttttaaagagtaagtgctattggcattccaaaattcagctaaaggaaaaatgatcaaaaacaaagtaaggtgcacagttagcaaaagatgcagatgttatatcacagcaattctcatgctaaaaatacaacaaaagacaaagcaaaaaataaacctttgcttttttttttttttttttttttttgagacggagtctcgctctgtcgcccaggctggagtgcagtggcgggatctcggctcactgcaagctccgcctcccaggttcacgccattctcctgcctcagccaaacctttgctatttttaatcttcgttggcactttccagctgttactgaccttgtcattttttattcaaataagattatttacaaacttattcttgaaactaaatatagtaaagagggtttttaaaataatatttaacatacgaattattaattggccatgttcattatttatctatgtttattaatgggccaatgcaaaaaatcattttttcaaagaaaaatttgtccatgtaaagcttaaattataatattgctgctttgtataactcttctatgtttattctattcatttgttcctttccctaccatattttacacatgtatttataatctgtagtatttattacatttctgcttttttctagtcattcaatttatcactgctgaattgcatcagatcatggatgcatttttattatgaaaaaataaaatgacttttcaaattaaaaaaaaaaaaaaa

SEQ ID NO: 2114 - protein, 595 aa, Homo sapiens
MKFFSYILVYRRFLFVVFTVLVLLPLPIVLHTKEAECAYTLFVVATFWLTEALPLSVTALLPSLMLPMFGIMPSKKVASAYFKDFHLLLIGVICLATSIEKWNLHKRIALKMVMMVGVNPAWLTLGFMSSTAFLSMWLSNTSTAAMVMPIAEAVVQQIINAEAEVEATQMTYFNGSTNHGLEIDESVNGHEINERKEKTKPVPGYNNDTGKISSKVELEKNSGMRTKYRTKKGHVTRKLTCLCIAYSSTIGGLTTITGTSTNLIFAEYFNTRYPDCRCLNFGSWFTFSFPAALIILLLSWIWLQWLFLGFNFKEMFKCGKTKTVQQKACAEVIKQEYQKLGPIRYQEIVTLVLFIIMALLWFSRDPGFVPGWSALFSEYPGFATDSTVALLIGLLFFLIPAKTLTKTTPTGEIVAFDYSPLITWKEFQSFMPWDIAILVGGGFALADGCEESGLSKWIGNKLSPLGSLPAWLIILISSLMVTSLTEVASNPATITLFLPILSPLAEAIHVNPLYILIPSTLCTSFAFLLPVANPPNAIVFSYGHLKVIDMVKAGLGVNIVGVAVVMLGICTWIVPMFDLYTYPSWAPAMSNETMP

SEQ ID NO: 2115 - DNA, 2556 bp, Homo sapiens
acgaccaacagctgagaacgcggcgagtatggaagctgcgtcttaggagcctgggaaagcacttcgacgagaatagtttggtttcgtacacaggaaaatgtctaatcgacaggagaagtatgaagctcagaatatagtcaattcaacagaagagagtgatgatgcttttgatactgtcactattccagttccctcagaagagcctcaagagtcagatcaaactgaagagcatgaatctggaatagaacaattcagtgagagccatgcaatacatgttgaggagcagagtgaccaaagcttttcaagcctggaaccagacaatgaacaactcatggaagaggttatatcaccaagacaagtttcatatactccgcaacatcatgaaaagcaatatgcaatgcagaggccaaatgatgatagtttggcatttctggataaaataaagtctgtaaaggaatctttgcaagaatcagtggaagattctctagcaacagtaaaagttgtacttattccagtgggccaggaaattgtaataccttttaaggttgataccattcttaaatatcttaaggaccatttttcacacttattaggtatcccacattctgtactgcagataagatactcaggaaaaattcttaaaaataatgagactctagtacaacatggagttaagccacaggaaattgtacaagtggaaatcttttctacaaatccagatctgtatccagtcagaagaatagatggattaactgatgtctctcaaatcataactgtcactgtccaaactggacttgatcaataccagcaggtacctgttgagattgtcaaatctgactttcacaaaccatctcttggtggattcagacataaagtaacaggagtagagtatcacaatgctggaacacaaactgtacctaaaaggattcccgaaagactcagtatattttgtagggatacgcagacagtttttcagaaaaaaaatctccaacaaactacaaatacaacatccacacagatgactaacattggtgtatatgtatcaaatatgactgataaactggtaacaccaggaaagtatttttcagcagcagaataccatgctcaaagactaaaggcggtgacagtgatacagacttactacaggcaatggcatgctaaaatcttcgtagagaatttaagaagacagaaaagcttaagactggaatgggaaacacagcaagaactaaggaagataagagaaaaagaagaatggataaaattggactatcaccggaggcataatcctaaaacaaatgaagattttgaatttctttataatgcattagaattctggcggcaagaagaacttacacgtattaaccaatcttttactggagctgaaaggaaagctgctctgtgtgaacttctggaaaaagagactcagataattgcttccattgggagacatagatacattgcttatatggcaaatcaggaagcagcaatacaagcttttttggataagtgttcagctccaaaaatatggagaacccctaatggcaaaacaattgagatggatacgcagttcaccatcagagccagagagctgcaaaatatctataagtgcattatgctgaaaaatatctcccaagatgagaggctggatgtgctgttaactcttaaacacactgtaaaggaacatgaatgtaaactaactcaggaaattctagaattgattgacagagaggttgaccttatgatgagaggagtcaaacatcataaccttgaaggactcagaaaaagaattgcgacactcttttttcattatatcaaaacacctctgtttaatcctgaagttgcaaaataccttaaggtccctcaagacccattgaaattttataagaagatttacttttgccacagttgccagctttatttgccttctacagaattttctgtatcatccacctcacgccgcatataccggtgtcgtaactgcattaaccttcagaatgaggctcaaaaacgagaatcatttttgaagtacaaatgtttacttcaacagctctactatacagaagctgattatgaagatgattctaaaattgctttcttgatgcagctacaagacattcagtacctgacagagaacatctgggcgtcccagtcagtcctcagtgcttgcgacaatctcagtgatctggtcatggtcagatggaataaatccctggagtggtccccctggaactgcattcttcttaccaaagatgaagcagctgctcatctcaagctaacaagtattgaagagggatatgaacgctcatttattcacaagatcaaacacaaacatatcctggctaagaactatttttctcaggttccagtgctggcttcatttatacttgatgatggtgaaattgatgagatcagatggaagtatcactcagacacaacacctaagattatagaatcccagaggcctcctcattaggtgatccaggagtatttgtttgatgatcggcattttgttcactgctaatagggtaatacagaggtcacagagtatggaaatgg

SEQ ID NO: 2116 - protein, 791 aa, Homo sapiens
MSNRQEKYEAQNIVNSTEESDDAFDTVTIPVPSEEPQESDQTEEHESGIEQFSESHAIHVEEQSDQSFSSLEPDNEQLMEEVISPRQVSYTPQHHEKQYAMQRPNDDSLAFLDKIKSVKESLQESVEDSLATVKVVLIPVGQEIVIPFKVDTILKYLKDHFSHLLGIPHSVLQIRYSGKILKNNETLVQHGVKPQEIVQVEIFSTNPDLYPVRRIDGLTDVSQIITVTVQTGLDQYQQVPVEIVKSDFHKPSLGGFRHKVTGVEYHNAGTQTVPKRIPERLSIFCRDTQTVFQKKNLQQTTNTTSTQMTNIGVYVSNMTDKLVTPGKYFSAAEYHAQRLKAVTVIQTYYRQWHAKIFVENLRRQKSLRLEWETQQELRKIREKEEWIKLDYHRRHNPKTNEDFEFLYNALEFWRQEELTRINQSFTGAERKAALCELLEKETQIIASIGRHRYIAYMANQEAAIQAFLDKCSAPKIWRTPNGKTIEMDTQFTIRARELQNIYKCIMLKNISQDERLDVLLTLKHTVKEHECKLTQEILELIDREVDLMMRGVKHHNLEGLRKRIATLFFHYIKTPLFNPEVAKYLKVPQDPLKFYKKIYFCHSCQLYLPSTEFSVSSTSRRIYRCRNCINLQNEAQKRESFLKYKCLLQQLYYTEADYEDDSKIAFLMQLQDIQYLTENIWASQSVLSACDNLSDLVMVRWNKSLEWSPWNCILLTKDEAAAHLKLTSIEEGYERSFIHKIKHKHILAKNYFSQVPVLASFILDDGEIDEIRWKYHSDTTPKIIESQRPPH

SEQ ID NO: 2117 - DNA, 1550 bp, Homo sapiens
tggagctaagctgtttccagggtgacagagtggcgacctcggtggtcgattgagcaggtctgagaattgttcccaaagggttgtgcgtcaccgagtcgttggcgctgtcatggcgggtgtgctgaagaagaccactggccttgtgggattggctgtgtgcaatactcctcacgagaggctaagaatattgtacacaaagattcttgatgttcttgaggaaatccctaaaaatgcagcatatagaaagtatacagaacagattacaaatgagaagctggctatggttaaagcggaaccagatgttaaaaaattagaagaccaacttcaaggcggtcaattagaagaggtgattcttcaggctgaacatgaactaaatctggcaagaaaaatgagggaatggaaactatgggagccattagtggaagagcctcctgccgatcagtggaaatggccaatataattattaagtgactttggtgtgttcatgggaaactgatgtaattaaatattctgttatattaagagcgtgttcttattactgacattttgtaatcaagaaaagtgatatagaaaatatgtaggagactgttaaaattggtgattatggtaatatggtcatgtgaatcaatttttgatttataaagtactcacacaagttgtttcaaagatgatatttctgtgaacagagaggccatgggaagatttgaaaattattaaagaaaaattcctacagattttcaatgcagagaccataatcaaaaagtaaactttctttagtagtatgttcaatacatcatttaattttttaagttatcctgaagaaggaaaggtccttaattattatagtctaaacaaatttatagattactgtttgaagtaaataatacgagtgaatattttcaaatgtgataaaatagcacaagtggctggtgataaaatttgaaattatggttaacctcagctgtgatcttatgtatgtaaagtgaaatttaaatagataattataggttgattacaaaatccatagtgtcattttattttagtcattattgaattataccatttactctgttttcttatagtcttaattttattatattttgttgttactgtattatatttgaaaaccttcaaattagaatacattgtacagttaaagaaattgacttggtacttaaaagaaagatttcccattgcatacaggttattggagaaattttccttttgttgcatttgtggaagttagttttctggcccgtggcctttaattttcttaatcaacctaattacatcaggatagaggtagagtttctgtaaaagaagagacattaagagttcctgaaatttatatctggcataccgataggcttatattcaaaacatcttagtcatacgaccataaattaaaagtggagtcactaaatagtttgcagtacgtttctaatataagtgtaggtgggtatcaaaacaagacaaatgctgttcagggaaagaagttggcaagcttaaggttaaacaaaaataaaattacatgtgttttcgccttccta

SEQ ID NO: 2118 - protein, 116 aa, Homo sapiens
MAGVLKKTTGLVGLAVCNTPHERLRILYTKILDVLEEIPKNAAYRKYTEQITNEKLAMVKAEPDVKKLEDQLQGGQLEEVILQAEHELNLARKMREWKLWEPLVEEPPADQWKWPI

SEQ ID NO: 2119 - DNA, 2706 bp, Homo sapiens
gtagattagctcaacactcgagaatcattgcagcttcaaggaatggatactaatgatgaccctgatgaagaccatcttacaagttatgatattcagctaagtattcaagaatccattgaagccagcaagactgcactttgtcctgaaagatttgtacccctaagtgctcaaaacagaaaacttgtggaggccataaaacaaggtcacattcctgagctccaggagtatgtaaaatataaatatgcaatggatgaagctgatgaaaaaggatggtttccattgcatgaagctgttgttcaacccattcaacaaatacttgagattgttctggatgcatcctataagacactctgggaattcaagacctgtgatggagaaacacccttgactttggcagtcaaagctggtctggtggaaaatgtaagaactttattagaaaagggagtgtggcccaacacaaaaaatgataaaggagagaccccccttctgattgctgtgaaaaagggctcctatgacatggtgtcgactctgatcaaacataacactagcctagaccagccctgtgtcaagcgatggtcagcaatgcatgaagcagccaagcaaggccgaaaagatatcgtagctctgctgctgaaacatggaggcaatgtccacctgagagatggatttggagtcacaccactaggcgtcgctgccgagtatggtcactgtgacgtgttagaacatctaatccacaaaggtggtgatgtgcttgctttggcggatgatggggcgtcggtgctgtttgaggcagcaggaggtggcaatcccgactgcatttccctcctgctggaatatggaggaagcggaaatgtacctaaccgagcaggacatcttcctatacaccgagctgcctatgaggggcattatcttgcactgaaatatcttatcccagtaacatctaaaaatgcaattcggaaaagtgggctaacaccaattcactcagcagcagatggacaaaatgcacagtgtctagaactgctcattgaaaatggttttgatgtcaacactctacttgctgaccacatttcccagagctatgacgatgagaggaagactgcgctgtattttggcgtttctaataatgacgttcattgcacagaagtccttctggctgcaggtgcagacccaaacttagatcccctcaactgtctacttgttgcagtgagggccaataattatgaaattgtcaggctgcttctctcccatggagctaatgtcaattgttattttatgcatgtgaatgacactcgtttccccagtgtcattcaatatgctctaaacgacgaggtaatgctgaggctattgctgaataatggctatcaagtggagatgtgctttgactgcatgcatggtgacatctttggaaattcatttgtgtggtcagagatacaggaagaggtgctgccaggatggacatcttgtgtaataaaagataacccgttctgtgagtttattacagttccttggatgaagcacttggtaggcagagttactcgtgtactaatagattacatggattatgttcctctgtgtgctaaactgaagtctgcactagaagtacagagagaatggccagaaatccgccaaatactagagaatccttgttcattgaagcatttgtgtcggttaaaaattcgaaggcttatgggtctccagaaactctgccagccagcctcagtggagaagcttcctctaccaccagctattcaaagatacatattatttaaagagtatgatctctatggacaagagctaaaattgacataacttaatattttaaaatgtgatttaaaaaaaatgttgaaatgtgattccctcagataatttcttgtaaccattttacatccttaattgtaaagtgtatttaaattcattgacagttttataggttatcatgtgttcttatgggaacaccatgatttatgtctttaaagacatttgcattttttaaagatagtattttgaacttagatttgtatctttgtttgctacaagtcatcaaactctccctatcaagtggctcctacaatatccacaatcaagtctctatgtttaaaaaacagataaccactttctcaaacccacatctgccagttgctggccagattctcctgtctttcacggtcttgctgtgtaaaagagctcctcctgcctgtaagttcacagactgtgatctggcatctgaccctccactgcttttctcaaggtccctgacaatctctttgttggtaaattcagtgaacattcttcagtccctcttccaatcgattcctacagcatctaacattgttgcctgttccttgcttgaaatgatatctctttccttgtttctcgcaaaacctgttctcttgggtgtcctcccacctccctggacactctgtctctggcttctttctgcctagctcatctctagccaatcttacagttatatatcttaagccctcttctctttgttctttaagttatatatcctaagccctctttgctttgttctctgggatattttatccacatccatggtcttaatcattttgctagagactacaaaatttccatccaaagctcagctctttctctcatgttctcctgacctatgtagacaattggcctcatgaacatttgaacacaaagacacctcaaattcaacatgtccccagatgaact

SEQ ID NO: 2120 - protein, 588 aa, Homo sapiens
MDTNDDPDEDHLTSYDIQLSIQESIEASKTALCPERFVPLSAQNRKLVEAIKQGHIPELQEYVKYKYAMDEADEKGWFPLHEAVVQPIQQILEIVLDASYKTLWEFKTCDGETPLTLAVKAGLVENVRTLLEKGVWPNTKNDKGETPLLIAVKKGSYDMVSTLIKHNTSLDQPCVKRWSAMHEAAKQGRKDIVALLLKHGGNVHLRDGFGVTPLGVAAEYGHCDVLEHLIHKGGDVLALADDGASVLFEAAGGGNPDCISLLLEYGGSGNVPNRAGHLPIHRAAYEGHYLALKYLIPVTSKNAIRKSGLTPIHSAADGQNAQCLELLIENGFDVNTLLADHISQSYDDERKTALYFGVSNNDVHCTEVLLAAGADPNLDPLNCLLVAVRANNYEIVRLLLSHGANVNCYFMHVNDTRFPSVIQYALNDEVMLRLLLNNGYQVEMCFDCMHGDIFGNSFVWSEIQEEVLPGWTSCVIKDNPFCEFITVPWMKHLVGRVTRVLIDYMDYVPLCAKLKSALEVQREWPEIRQILENPCSLKHLCRLKIRRLMGLQKLCQPASVEKLPLPPAIQRYILFKEYDLYGQELKLT

SEQ ID NO: 2121 - DNA, 1620 bp, Homo sapiens
ttccttggagcctagcggctctccccgcgtccaagatggcggcagaagcagctggtgggaaatacagaagcacagtcagcaaaagcaaagacccctcggggctgctcatctctgtgatcaggactctgtctactagtgacgatgtcgaagacagggaaaatgaaaagggtcgccttgaagaagcctacgagaaatgtgaccgtgacctggatgaattgattgtacagcactacacagaattgacgacagccattcgcacataccagagcatcacagagcgcatcactaactcccgaaataaaataaagcaggtaaaagagaacctgctttcatgcaagatgctgctgcactgcaaacgggatgagcttcggaaactgtggattgaaggaattgagcataagcatgtcctgaacttgttggatgaaattgagaatatcaagcaagtgcctcaaaagctggaacagtgcatggccagcaagcactatctcagtgccactgacatgttggtgtcagcagttgagtctttggagggccccctgctccaggtggaaggactgagtgaccttcgactagagcttcacagcaagaagatgaaccttcacttggttctcatagatgaactacaccggcacctgtacatcaaatcgactagccgagttgtgcagcgtaacaaggaaaaagggaaaatcagctccctcgtgaaagatgcttctgttcctctgattgatgttacaaacctccctactcctcgaaaattccttgatacctctcactattctactgctggaagctcaagtgtgagggagataaatctgcaggacatcaaggaagatttagaattggatccagaggaaaacagcaccctgtttatgggtatcctcattaagggcttggcgaaactgaagaagatcccagaaacagttaaggcaatcatagagcgcttggagcaggagttgaagcaaattgtgaagaggtctacaacccaggtggcagacagtggctatcagcggggggagaacgttactgtggagaaccaaccaaggttgcttctagaactgctggagttactgtttgacaagtttaatgctgtagccgctgcacactctgtggtcctgggatacctgcaggacactgtagtgactccactgactcagcaggaagatatcaaactgtatgatatggcagatgtatgggtgaagatccaagatgttctacagatgctattaactgagtacttggatatgaaaaatactcgtacggcctctgaaccatcagctcaactaagctatgccagcactggacgagagtttgcagccttttttgccaagaagaaacctcaaaggccaaaaaattctcttttcaagttcgaatcgtcctcccatgccatcagtatgagcgcctatctgcgagaacagagaagggagctctatagtcggagtggagaactgcaagggtagcggcgaagaaatccaccagaaagacaatcaaagtaacattaaaaagctcaaattttacaaaagttaagttcctgccaacattttcaatttatcatacaattagaaatgtgactcagtctaacaacacccaagaggataaaaggattaaaaaaaaaaaaaaaaa

SEQ ID NO: 2122 - protein, 473 aa, Homo sapiens
MAAEAAGGKYRSTVSKSKDPSGLLISVIRTLSTSDDVEDRENEKGRLEEAYEKCDRDLDELIVQHYTELTTAIRTYQSITERITNSRNKIKQVKENLLSCKMLLHCKRDELRKLWIEGIEHKHVLNLLDEIENIKQVPQKLEQCMASKHYLSATDMLVSAVESLEGPLLQVEGLSDLRLELHSKKMNLHLVLIDELHRHLYIKSTSRVVQRNKEKGKISSLVKDASVPLIDVTNLPTPRKFLDTSHYSTAGSSSVREINLQDIKEDLELDPEENSTLFMGILIKGLAKLKKIPETVKAIIERLEQELKQIVKRSTTQVADSGYQRGENVTVENQPRLLLELLELLFDKFNAVAAAHSVVLGYLQDTVVTPLTQQEDIKLYDMADVWVKIQDVLQMLLTEYLDMKNTRTASEPSAQLSYASTGREFAAFFAKKKPQRPKNSLFKFESSSHAISMSAYLREQRRELYSRSGELQG

SEQ ID NO: 2123 - DNA, 4203 bp, Homo sapiens
ttccttggagcctagcggctctccccgcgtccaagatggcggcagaagcagctggtgggaaatacagaagcacagtcagcaaaagcaaagacccctcggggctgctcatctctgtgatcaggactctgtctactagtgacgatgtcgaagacagggaaaatgaaaagggtcgccttgaagaagcctacgagaaatgtgaccgtgacctggatgaattgattgtacagcactacacagaattgacgacagccattcgcacataccagagcatcacagagcgcatcactaactcccgaaataaaataaagcaggtaaaagagaacctgctttcatgcaagatgctgctgcactgcaaacgggatgagcttcggaaactgtggattgaaggaattgagcataagcatgtcctgaacttgttggatgaaattgagaatatcaagcaagtgcctcaaaagctggaacagtgcatggccagcaagcactatctcagtgccactgacatgttggtgtcagcagttgagtctttggagggccccctgctccaggtggaaggactgagtgaccttcgactagagcttcacagcaagaagatgaaccttcacttggttctcatagatgaactacaccggcacctgtacatcaaatcgactagccgagttgtgcagcgtaacaaggaaaaagggaaaatcagctccctcgtgaaagatgcttctgttcctctgattgatgttacaaacctccctactcctcgaaaattccttgatacctctcactattctactgctggaagctcaagtgtgagggagataaatctgcaggacatcaaggaagatttagaattggatccagaggaaaacagcaccctgtttatgggtatcctcattaagggcttggcgaaactgaagaagatcccagaaacagttaaggcaatcatagagcgcttggagcaggagttgaagcaaattgtgaagaggtctacaacccaggtggcagacagtggctatcagcggggggagaacgttactgtggagaaccaaccaaggttgcttctagaactgctggagttactgtttgacaagtttaatgctgtagccgctgcacactctgtggtcctgggatacctgcaggacactgtagtgactccactgactcagcaggaagatatcaaactgtatgatatggcagatgtatgggtgaagatccaagatgttctacagatgctattaactgagtacttggatatgaaaaatactcgtacggcctctgaaccatcagctcaactaagctatgccagcactggacgagagtttgcagccttttttgccaagaagaaacctcaaaggccaaaaaattctcttttcaagttcgaatcgtcctcccatgccatcagtatgagcgcctatctgcgagaacagagaagggagctctatagtcggagtggagaactgcaagggggtcctgatgacaacttaattgaaggtggaggaacaaaatttgtctgcaaacctggagccagaaacattaccgtcatattccacccattactaagatttattcaggagattgagcatgctctgggtcttggcccagccaaacagtgtcctcttcgagagtttctcaccgtgtacatcaaaaacatctttctcaatcaagtcttggctgagatcaacaaggagattgaaggagtcactaaaacatctgaccctttgaagattctggccaacgcagacaccatgaaggtgctgggagtgcagcggcctctcctacagagcacaatcattgtggagaagacagttcaagacctcctgaacctgatgcatgacttgagtgcatattcagatcaattcctcaacatggtgtgcgtgaagctccaggagtacaaggacacctgcactgcagcttacaggggtattgtccagtcagaagaaaaacttgtcatcagtgcatcctgggcaaaagatgatgatatcagcagactcttgaaatctctaccaaactggatgaatatggctcaacccaaacagctgaggccaaaaagagaggaggaagaagatttcataagggcagcttttggcaaggagtctgaagttcttattgggaacctgggtgataaattaatccctccacaagacatccttcgtgacgtcagtgacctcaaagccttggccaacatgcatgaaagcctggaatggttggcaagtcgaacaaagtcagctttctccaatctttctacatcccagatgctttctcctgctcaagacagccacacgaacacggatctccccccagtgtcagagcagatcatgcagactctcagtgaacttgccaaatcgttccaggatatggctgaccgctgcttgcttgtcttacatctggaagtgagggttcactgtttccactatcttatccctcttgcaaaggaggggaactatgccattgtggctaatgtggaaagtatggattatgaccccctggtggtcaagctcaacaaagatatcagcgccattgaagaggccatgagcgccagccttcagcagcacaagttccagtatatcttcgaaggcctgggccacctgatctcctgcatcctcattaatggtgcccagtacttcaggcgcatcagtgagtctggcatcaagaaaatgtgtaggaacatttttgttcttcagcagaatttgaccaacatcaccatgtcgcgggaggcagacctggactttgcaaggcagtactacgagatgctttacaacacagctgacgagctcctgaacctggtggtggaccagggtgtgaagtacacggagctggagtacatccacgctctgaccctgctgcaccgcagccagactggggtgggggaactgaccacccagaacacgaggctgcagaggctcaaagagatcatctgcgagcaggctgccatcaagcaagccaccaaggacaagaagataactaccgtttagcagggcgtactgcggttggtgacgggggtcccctcagtcacactcacttttttccttggtatgttattgagtatattctgagcttagttttctctacagtgatactttagtggagaggaggtgtaaggattctttctctctggttttggcttttcatataaatgctaaaggaaggcgacagtacagagtgttttggttgaacaactactttaatgcagtcaaatctaacgggactagggtgggatagggaggaaggtggtatcaaattgttggactctgaaaaacaagtggatggattactaatatttgatttattactcaatatatatataattccagccttggaaagtaggaaagtaggctgctacctaacttttagtcccttccaaaaccatttagtagggttctattacataaacagtagggtttttcctctcctgaccttatccgtttacagttcaatgaaataagtgtatgtgcattgctgtctgtctctattgccaaaatcaaataaatggcttctcagctgctgtttacaacaaacttccctaaccaaaacagaacctctaatttagggctaggaatagaagtcttttgatcccagtccctgggacagttttgtatgctgtatcttgtacacaggttgtaggttggtttattgccattttgttttatttctgctgtataaaaaccaagagccagacaattagacaactatggaggaatgaaaggcaattcaaacatctgcttgattcccgccccgccacccctaatttctgagagaataatggttagagaacattgcatctcacttgaaacatcctttgggggtaaatgattcttaggtgctcacttggtctgagctcagctgaatgcagggaagatgggacagagtgacatttctcctctgtgcggcctccagctgagcctgtctctgaattgttccctcccccgcaatgtgggcacttaccatgttcctggcacactggacctcaccatgtcccccggtcaccagtcctcttgctgcccatggttcataggtcatagaaggcagcaatgcactgactgggccacatcttgaaaactcgtggaaagggaaaggggaggagatgggactttgaccacacacagtgatgcctcacaccctgaaggtgggggattttgtacctgtttgtacaactttggtcttgatgggaaaaatggagaattaaaaagtgttttgagaagcttaaaaaaaaaaaaa

SEQ ID NO: 2124 - protein, 974 aa, Homo sapiens [sequence omitted]

SEQ ID NO: 2125 - DNA, 3770 bp, Homo sapiens
cggacgcgtgggctgctgggcccggtggccgcaaaagaactttctttctcccgcccgaacggtcgccgcggccaactgcctcgcccgcctggcagcctaaccctccttctcttcttctcctctccggcttcgcgcggccctgcctccctctcgcccggcggcatccgcttgctgctgccaccgcctcctcatcttctgcccggccaaccggcctgccccgctgcagtgatgtgcgacaaggagttcatgtgggccctgaaaaacggagacttggatgaggtgaaagactatgtggccaagggagaagatgtcaaccggacactagaaggtggaaggaaacctcttcattatgcagcagattgtgggcagcttgaaatcctggaatttctgctgctgaaaggagcagatattaatgctccagataaacatcatattactcctcttctgtctgctgtctatgagggtcatgtttcctgtgtgaaattgcttctgtcaaagggtgctgataagactgtgaaaggcccagatggactgaccgcctttgaagccactgacaaccaggcaatcaaagctcttctccagtgatggatggatggactgataactccggaagaatgactctcctgtggcctcacactgctgcctgtctgtctgtcactctctatctgccagcttcttcagctaaatactttaagaggggtgaggggagagagaaattcataacaaatccgactaccagaaaaaaaaaattgttttggaggaggggcaaaaggaaccatgatcaggcttttactgggattcctgatcaagtaagcctcttccctttctaataaaatatacaccttatacccaagggagagcaaagacaaaatacaccagtaacatttgaccttttcagctccctagctaatttattagattgtgttgaaggtctgattctacaaaggccaactctacatatttggtagccctaactgtctgagcagtagtggctgctgtgatgtaaacttagggtgctgagataagcaattagctctagccttctgccttaagaatgcactctactggggatttcctggcatagttaagagcgctgcctataaggttggtgaccaaatctttcctcggtgactttaagctttatgtgaaagcttagttaaggtgaggaggggcacactcctaaattgctggatgactgaactttggattttctctcccctttcacatggatttcatgtctctttagataaaactgactagttttatttataaaatcttaagttttggaagtctaaaggagaaaccattccagtatgcatatttttttctcctctagattcatacatttatatagcattgaaacactttcaaactcctgctggtagtaaaaggggatttaaaaatagaatcatagccataagcctgttagtatcatatgaagagagaacagttatcttagtacctatggattttctttatttgctgtttgaatggattgaccttggttatgtgttgagaattaaggaacattctttgaaatgcctctctcagacccatcttggaggctgattacttactgcaccaaagctatcactggggtgagatttactgtttggacaaatttagccccatcccttcaaaaatacacttgtaaccaggtttcccagagttgttgataggcttctgctgaacatatgccaacccacctgcataatatatttttgttgcttttataaatcatgcattacataaagtgtgacaacttcaaaatgtattctctgttcttggaatacagtgccctaaaatggtgttcttatgacctgcagaaaatatttacacatatttccaaatatttatttcatgagcagtacagctaattaaaatatataagcttaaattttatatcttacatttaaaatattaagattcctttgacttgccatccatataagcttgctaaaaatattaagaccaagtcatgcaataattgaatgtacctcaaatttttaggggagggtgggttagggactgatactcagattgtggataataattgaattggtttttaaaggcaacatagcattctacagcagggttaatctattatcaagaacagtcaccctggttaataacaagttttactgatcagttgctggttggttggttggttggcatgtgggtgtgtgggtgtataggtgtgtgtgggtgtgtgtgtgtatttttccccatgagtcctttttttaatcctgtggctttttcacttacaactagcctaaccctgtaattttcctacatccaagaaaacaatcacaaagtagtggtttaaatactttgttgtatttggctaattttgctgtcttaatgcagcctattaagagttgggttaaaaatcagtaatcagtactttattacatcactgaactaaaatatggagacatcctcattgaaaatggagggcactctatcagtctataactatcaacgtagtgcaacagggtgttttgatacctttgttttcacctcttgacataatgctatttaaaggcttgaatttttccctttatataattttcacctttactttcaaagtgttttgttgtagttggctattgcagagagtgcattgtcctatcattcctaaacctggtctgctttctacattcatggtatggaaaccatgtgattctttgtacagtttatcctgatgttgcttgtaatgcagtagaggctatttcgccttcgcttttctttctcgacctttttgtaaaccctataattatgaagcgattgcttgagaaaataacatataaacatagaatagaatagactgaccaagatggttcacagtttctttttttaactaggttatttataatgtatttctgaaccacttggcagacaaattcacaacacttaatgttcatattttgagtaaaggaagctaaaaccatgtttgctttctggtactacatgcattagcgaaaggttaagtaagttttgttctccactgaagtaatacttaacatctcagaaaaaattttgcatgttctgtagttttgtattaaatcagtcatttcatatgcactatatcaagtacaaacaggtagtttacctgtttatagtagtgtactaacaaagtctcccttgcagcttcagactgttatctataggcttatcgttcaaatacagcacttgaatatcccaagtagttcttctacgcatagctcacctttctaaacccagttaagcatggaagagaggtagtaggtaggtgcagtgtgtggaagctgcaaacaagtaggccttttattcattgatatcttttcccaagtactggattttaaatctgtatgtatctgtttgatttttttttctaatatttcagttgagctgctgttttcttccatgcaatattgtatactcaattgtgtatagaagaagctggtgagagtgccctcctacataaataagcaattgcagtgttttgcatgcaaaatataaaaaatttaaattgtcctgattctattttgtaaatggagaaacaatcatatctttctaagcggtaatggaggaagactagtgctttgtgcattttgatatatttgagttcattttttccacaatgtcatacttttgacgcagttgggtttctcataagtatcctagttcatgtacatccgaatgctaaataatactgtgttttaagttttgtgttgcaagaacaaatggaataaacttgaattgtgctacgaaaaaaaaaaaaaaaaaaa

SEQ ID NO: 2126 - protein, 118 aa, Homo sapiens
MCDKEFMWALKNGDLDEVKDYVAKGEDVNRTLEGGRKPLHYAADCGQLEILEFLLLKGADINAPDKHHITPLLSAVYEGHVSCVKLLLSKGADKTVKGPDGLTAFEATDNQAIKALLQ

SEQ ID NO: 2127 - DNA, 6513 bp, Homo sapiens
attgctaagccatccttcagacagagagggagcggctgcaagaggtaatgagagatggcaagaaagaagctgaaaaaatttactactttggagattgtgctcagtgttcttctgcttgtgttgtttatcatcagtattgttctaattgtgcttttagccaaagagtcactgaaatcaacagccccagatcctgggacaactggtaccccggatcctgggacaactggtaccccagatcctggaacaactggtaccacacatgctaggacaacgggtcccccagatcctggaacaactggtaccactcctgtttctgctgaatgtccagtggtaaatgaattggaacgaattaattgcatccctgaccagccgccaacaaaggccacatgtgaccaacgtggctgttgctggaatccccagggagctgtaagtgttccctggtgctactattccaagaatcatagctaccatgtagagggcaaccttgtcaacacaaatgcaggattcacagcccggttgaaaaatctgccttcctcaccagtgtttggaagcaatgttgacaatgttcttctcacagcagaatatcagacatctaatcgtttccactttaagttgactgaccaaaccaataacaggtttgaagtgccccacgaacacgtgcagtccttcagtggaaatgctgctgcttctttgacctaccaagttgaaatctccagacagccatttagcatcaaagtgaccagaagaagcaacaatcgtgttttgtttgactcgagcattgggcccctactgtttgctgaccagttcttgcagctctccactcgactgcctagcactaacgtgtatggcctgggagagcatgtgcaccagcagtatcggcatgatatgaattggaagacctggcccatatttaacagagacacaactcccaatggaaacggaactaatttgtatggtgcgcagacattcttcttgtgccttgaagatgctagtggattgtcctttggggtgtttctgatgaacagcaatgccatggaggttgtccttcagcctgcgccagccatcacttaccgcaccattgggggcattctcgacttctatgtgttcttgggaaacactccagagcaagttgttcaagaatatctagagctcattgggcggccagcccttccctcctactgggcgcttggatttcacctcagtcgttacgaatatggaaccttagacaacatgagggaagtcgtggagagaaatcgcgcagcacagctcccttatgatgttcagcatgctgatattgattatatggatgagagaagggacttcacttatgattcagtggattttaaaggcttccctgaatttgtcaacgagttacacaataatggacagaagcttgtcatcattgtggatccagccatctccaacaactcttcctcaagtaaaccctatggcccatatgacaggggttcggatatgaagatatgggtgaatagttcagatggagtgactccactcattggggaggtctggcctggacaaactgtgtttcctgattataccaatcccaactgtgctgtttggtggacaaaggaatttgagctttttcacaatcaagtagagtttgatggaatctggattgatatgaatgaagtctccaactttgttgatggttcggtctcaggatgttccacaaacaacctaaataatcccccattcactcccagaatcctggatgggtacctgttctgcaagactctctgtatggatgcagtgcagcactggggcaagcagtatgacattcacaatctgtatggctactccatggcggtcgccacagcagaagctgccaagactgtgttccctaataagagaagcttcattctgacccgttctacctttgcgggctctggcaagtttgcagcacattggttaggagacaacactgccacctgggatgacctgagatggtccatccctggcgtgcttgagttcaacctttttggcatcccaatggtgggtcctgacatatgtggctttgctttggacacccctgaggagctctgtaggcggtggatgcagttgggtgcattttatccgttttctagaaatcacaatggccaaggctacaaggaccaggatcctgcctcctttggagctgactccctgctgttgaattcctccaggcactaccttaacatccgctatactctattgccctacctatacacccttttcttccgtgctcacagccgaggggacacggtggccaggccccttttgcatgagttctacgaggacaacagcacttgggatgtgcaccaacagttcttatgggggcccggcctcctcatcactccagttctggatgaaggtgcagagaaagcgatggcatatgtgcctgatgctgtctggtatgactacgagactgggagccaagtgagatggaggaagcaaaaagtcgagatggaacttcctggagacaaaattggacttcaccttcgaggaggctacatcttccccacacagcagccaaatacaaccactctggccagtcgaaagaaccctcttggtcttatcattgccctagatgagaacaaagaagcaaaaggagaacttttctgggatgatggggaaacgaaggatactgtggccaataaagtgtatcttttatgtgagttttctgtcactcaaaaccgcttggaggtgaatatttcacaatcaacctacaaggaccccaataatttagcatttaatgagattaaaattcttgggacggaggaacctagcaatgttacagtgaaacacaatggtgtcccaagtcagacttctcctacagtcacttatgattctaacctgaaggttgccattatcacagatattgatcttctcctgggagaagcatacacagtggaatggagcataaagataagggatgaagaaaaaatagactgttaccctgatgagaatggtgcttctgccgaaaactgcactgcccgtggctgtatctgggaggcatccaattcttctggagtccctttttgctattttgtcaacgacctatactctgtcagtgatgttcagtataattcccatggggccacagctgacatctccttaaagtcttccgtttatgccaatgccttcccctccacacccgtgaacccccttcgcctggatgtcacttaccataagaatgaaatgccgcagttcaagatttatgatcccaacaagaatcggtatgaagttccagtccctctgaacatacccagcatgccatccagcacccctgagggtcaactctatgatgtgctcattaagaagaatccatttgggattgaaattcgccggaagagtataggcactataatttgggactctcagctccttggctttaccttcagtgacatgtttatccgcatctccacccgccttccctccaagtacctctatggcttcggggaaactgagcacaggtcctataggagagacttggagtggcacacttgggggatgttctcccgagaccagcccccagggtacaagaagaattcctatggtgtccacccctactacatggggctggaggaggacggcagtgcccatggagtgctcctgctgaacagcaatgccatggatgtgacgttccagcccctgcctgccttgacataccgcaccacagggggagttctggacttttatgtgttcttggggccgactccagagcttgtcacccagcagtacactgagttgattggccggcctgtgatggtaccttactggtctttggggttccagctgtgtcgctatggctaccagaatgactctgagatcgccagcttgtatgatgagatggtggctgcccagatcccttatgatgtgcagtactcagacatcgactacatggagcggcagctggacttcaccctcagccccaagtttgctgggtttccagctctgatcaatcgcatgaaggctgatgggatgcgggtcatcctcattctggatccagccatttctggcaatgagacacagccttatcctgccttcactcggggcgtggaggatgacgtcttcatcaaatacccaaatgatggagacattgtctggggaaaggtctggcctgattttcctgatgttgttgtgaatgggtctctagactgggacagccaagtggagctatatcgagcttatgtggccttcccagactttttccgtaattcaactgccaagtggtggaagagggaaatagaagaactatacaacaatccacagaatccagagaggagcttgaagtttgatggcatgtggattgatatgaatgaaccatcaagcttcgtgaatggggcagtttctccaggctgcagggacgcctctctgaaccaccctccctacatgccacatttggagtccagggacaggggcctgagcagcaagaccctttgtatggagagtcagcagatcctcccagacggctccctggtgcagcactacaacgtgcacaacctgtatgggtggtcccagaccagacccacatacgaagccgtgcaggaggtgacgggacagcgaggggtcgtcatcacccgctccacatttccctcttctggccgctgggcaggacattggctgggagacaacacggccgcatgggatcagctgaagaagtctatcattggcatgacggagttcagcctcttcggcatatcctatacgggagcagatatctgtgggttctttcaagatgctgaatatgagatgtgtgttcgctggatgcagctgggggccttttaccccttctcaagaaaccacaacaccattgggaccaggagacaagaccctgtgtcctgggatgttgcttttgtgaatatttccagaactgtcctgcagaccagatgcaccctgttgccatatctgtataccttgatgcataaggcccacacggagggcgtcactgttgtgcggcctctgctccatgaatttgtgtcagaccaggtgacatgggacatagacagtcagttcctgctgggcccagccttcctggtcagccctgtcctggagcgtaatgccagaaatgtcactgcatatttccctagagcccgctggtatgattactacacgggtgtggatattaatgcaagaggagagtggaagaccttgccagcccctcttgaccacattaatcttcatgtccgtgggggctacatcctgccctggcaagagcctgcactgaacacccacttaagccgccagaaattcatgggcttcaaaattgccttggatgatgaaggaactgctgggggctggctcttctgggatgatgggcaaagcattgatacctatgggaaaggactctattacttggccagcttttctgccagccagaatacgatgcaaagccatataattttcaacaattacatcactggtacaaatcctttgaaactgggctacattgaaatctggggagtgggcagtgtccccgttaccagtgccagcatctctgtgagtggcatggtcataacaccctccttcaacaatgaccccacgacacaggtattaagcatcgatgtgactgacagaaacatcagcctacataattttacttcattgacgtggataagcactctgtgaatttttacagcaagattctaactaactatgaatgactttgaaactacttatacttcatactcataaaaattattgtgtgttgctaatttgttcatacccactattggtgaaatatttctgttaattttgttatatgttttttgtgtgaaccctaaaggttaaaccttagccctgtgggataggcagttagggaggtgtggaaaatctatgcattaccttaatgtctctgtgtggttagtatggtagtgactgttcatcatatgacatttactgaagatgaactgggtccatgatgaagtgtgtgtatgtccacgtttgtaatcatagaatggaccccattcttttgttaaatacacaagagaaagctttctgtgacagttccaggtcttgaagctaatcagcatctcaagaaagtatccagaaagaacatctgctagttggttataggcggtgggaggaataatatacctaattggttataggtggggggagcatgataagcaaagaaaaggcaaacacaaggaaagatcagatgaaacagaagatgatagtaaaagtgatcctaagtaagaacataatgtaaaattgtcagcagcctcatggggaggaaaaaggaagagtcaactcacttgaagaagagggtcttgagaaatccttagcataaagggctactggtgagattgagatctgagcaggcaaagctcaaaagagagtttggaggttaaaaataatttatttttgcagtagtgtgctttgaaatgtgtaaatcttatttctaatgtatacaaccacatttcacataaaaatatgcaatttatatgccagataaaaataaaacaagtgaatttgcaagtgaaaaaaaaaaaaaaaaaaaaaaaaaaaaaa

SEQ ID NO: 2128 - protein, 1857 aa, Homo sapiens
MARKKLKKFTTLEIVLSVLLLVLFIISIVLIVLLAKESLKSTAPDPGTTGTPDPGTTGTPDPGTTGTTHARTTGPPDPGTTGTTPVSAECPVVNELERINCIPDQPPTKATCDQRGCCWNPQGAVSVPWCYYSKNHSYHVEGNLVNTNAGFTARLKNLPSSPVFGSNVDNVLLTAEYQTSNRFHFKLTDQTNNRFEVPHEHVQSFSGNAAASLTYQVEISRQPFSIKVTRRSNNRVLFDSSIGPLLFADQFLQLSTRLPSTNVYGLGEHVHQQYRHDMNWKTWPIFNRDTTPNGNGTNLYGAQTFFLCLEDASGLSFGVFLMNSNAMEVVLQPAPAITYRTIGGILDFYVFLGNTPEQVVQEYLELIGRPALPSYWALGFHLSRYEYGTLDNMREVVERNRAAQLPYDVQHADIDYMDERRDFTYDSVDFKGFPEFVNELHNNGQKLVIIVDPAISNNSSSSKPYGPYDRGSDMKIWVNSSDGVTPLIGEVWPGQTVFPDYTNPNCAVWWTKEFELFHNQVEFDGIWIDMNEVSNFVDGSVSGCSTNNLNNPPFTPRILDGYLFCKTLCMDAVQHWGKQYDIHNLYGYSMAVATAEAAKTVFPNKRSFILTRSTFAGSGKFAAHWLGDNTATWDDLRWSIPGVLEFNLFGIPMVGPDICGFALDTPEELCRRWMQLGAFYPFSRNHNGQGYKDQDPASFGADSLLLNSSRHYLNIRYTLLPYLYTLFFRAHSRGDTVARPLLHEFYEDNSTWDVHQQFLWGPGLLITPVLDEGAEKAMAYVPDAVWYDYETGSQVRWRKQKVEMELPGDKIGLHLRGGYIFPTQQPNTTTLASRKNPLGLIIALDENKEAKGELFWDDGETKDTVANKVYLLCEFSVTQNRLEVNISQSTYKDPNNLAFNEIKILGTEEPSNVTVKHNGVPSQTSPTVTYDSNLKVAIITDIDLLLGEAYTVEWSIKIRDEEKIDCYPDENGASAENCTARGCIWEASNSSGVPFCYFVNDLYSVSDVQYNSHGATADISLKSSVYANAFPSTPVNPLRLDVTYHKNEMPQFKIYDPNKNRYEVPVPLNIPSMPSSTPEGQLYDVLIKKNPFGIEIRRKSIGTIIWDSQLLGFTFSDMFIRISTRLPSKYLYGFGETEHRSYRRDLEWHTWGMFSRDQPPGYKKNSYGVHPYYMGLEEDGSAHGVLLLNSNAMDVTFQPLPALTYRTTGGVLDFYVFLGPTPELVTQQYTELIGRPVMVPYWSLGFQLCRYGYQNDSEIASLYDEMVAAQIPYDVQYSDIDYMERQLDFTLSPKFAGFPALINRMKADGMRVILILDPAISGNETQPYPAFTRGVEDDVFIKYPNDGDIVWGKVWPDFPDVVVNGSLDWDSQVELYRAYVAFPDFFRNSTAKWWKREIEELYNNPQNPERSLKFDGMWIDMNEPSSFVNGAVSPGCRDASLNHPPYMPHLESRDRGLSSKTLCMESQQILPDGSLVQHYNVHNLYGWSQTRPTYEAVQEVTGQRGVVITRSTFPSSGRWAGHWLGDNTAAWDQLKKSIIGMTEFSLFGISYTGADICGFFQDAEYEMCVRWMQLGAFYPFSRNHNTIGTRRQDPVSWDVAFVNISRTVLQTRCTLLPYLYTLMHKAHTEGVTVVRPLLHEFVSDQVTWDIDSQFLLGPAFLVSPVLERNARNVTAYFPRARWYDYYTGVDINARGEWKTLPAPLDHINLHVRGGYILPWQEPALNTHLSRQKFMGFKIALDDEGTAGGWLFWDDGQSIDTYGKGLYYLASFSASQNTMQSHIIFNNYITGTNPLKLGYIEIWGVGSVPVTSASISVSGMVITPSFNNDPTTQVLSIDVTDRNISLHNFTSLTWISTL

SEQ ID NO: 2129 - DNA, 932 bp, Homo sapiens
caaaaaggagaccagacaggaggcgtctgtagagatatcatgaacttcaacttagctttgttttccagagactggagctaaactgggctttcaacatcatcatgaagtttatcctcctctgggccctcttgaatctgactgttgctttggcctttaatccagattacacagtcagctccactcccccttacttggtctatttgaaatctgactacttgccctgcgctggagtcctgatccacccgctttgggtgatcacagctgcacactgcaatttaccaaagcttcgggtgatattgggggttacaatcccagcagactctaatgaaaagcatctgcaagtgattggctatgagaagatgattcatcatccacacttctcagtcacttctattgatcatgacatcatgctaatcaagctgaaaacagaggctgaactcaatgactatgtgaaattagccaacctgccctaccaaactatctctgaaaataccatgtgctctgtctctacctggagctacaatgtgtgtgatatctacaaagagcccgattcactgcaaactgtgaacatctctgtaatctccaagcctcagtgtcgcgatgcctataaaacctacaacatcacggaaaatatgctgtgtgtgggcattgtgccaggaaggaggcagccctgcaaggaagtttctgctgccccggcaatctgcaatgggatgcttcaaggaatcctgtcttttgcggatggatgtgttttgagagccgatgttggcatctatgccaaaattttttactatataccctggattgaaaatgtaatccaaaataactgagctgtggcagttgtggaccatatgacacagcttgtccccatcgttcacctttagaattaaatataaattaactcctcaaaaaaaaaaaaaaaaaaaaaaaaaaaa

SEQ ID NO: 2130 - protein, 241 aa, Homo sapiens
MKFILLWALLNLTVALAFNPDYTVSSTPPYLVYLKSDYLPCAGVLIHPLWVITAAHCNLPKLRVILGVTIPADSNEKHLQVIGYEKMIHHPHFSVTSIDHDIMLIKLKTEAELNDYVKLANLPYQTISENTMCSVSTWSYNVCDIYKEPDSLQTVNISVISKPQCRDAYKTYNITENMLCVGIVPGRRQPCKEVSAAPAICNGMLQGILSFADGCVLRADVGIYAKIFYYIPWIENVIQNN

SEQ ID NO: 2131 - DNA, 972 bp, Homo sapiens
atggcaacggtgaacacagatgccacagataaagacatatccaagttcaaggtcaccttcactttggtggtctccggaatagagtgcatcactggcatccttgggagtggcttcatcacggccatctatggggctgagtgggccaggggcaaaacactccccactggtgaccgcattatgttgatgctgagcttttccaggctcttgctacagatttggatgatgctggagaacattttcagtctgctattccgaattgtttataaccaaaactcagtgtatatcctcttcaaagtcatcactgtctttctgaaccattccaatctctggtttgctgcctggctcaaagtcttctattgtcttagaattgcaaacttcaatcatcctttgttcttcctgatgaagaggaaaatcatagtgctgatgccttggcttctcaggctgtcagtgttggtttccttaagcttcagctttcctctctcgagagatgtcttcaatgtgtatgtgaatagctccattcctatcccctcctccaactccacggagaagaagtacttctctgagaccaatatggtcaacctggtatttttctataacatggggatcttcgttcctctgatcatgttcatcctggcagccaccctgctgatcctctctctcaagagacacaccctacacatgggaagcaatgccacagggtccagggaccccagcatgaaggctcacataggggccatcaaagccaccagctactttctcatcctctacattttcaatgcaattgctctatttctttccacgtccaacatctttgacacttacagttcctggaatattttgtgcaagatcatcatggctgcctaccctgccggccactcagtacaactgatcttgggcaaccctgggctgagaagagcctggaagcggtttcagcaccaagttcctctttacctaaaagggcagactctgtga

SEQ ID NO: 2132 - protein, 323 aa, Homo sapiens
MATVNTDATDKDISKFKVTFTLVVSGIECITGILGSGFITAIYGAEWARGKTLPTGDRIMLMLSFSRLLLQIWMMLENIFSLLFRIVYNQNSVYILFKVITVFLNHSNLWFAAWLKVFYCLRIANFNHPLFFLMKRKIIVLMPWLLRLSVLVSLSFSFPLSRDVFNVYVNSSIPIPSSNSTEKKYFSETNMVNLVFFYNMGIFVPLIMFILAATLLILSLKRHTLHMGSNATGSRDPSMKAHIGAIKATSYFLILYIFNAIALFLSTSNIFDTYSSWNILCKIIMAAYPAGHSVQLILGNPGLRRAWKRFQHQVPLYLKGQTL

SEQ ID NO: 2133 - DNA, 1017 bp, Homo sapiens
gaaaaggagctcctgctgccactgctcttccggagcctgcagcatggggcccctgccgcgcaccgtggagctcttctatgacgtgctgtccccctactcctggctgggcttcgagatcctgtgccggtatcagaatatctggaacatcaacctgcagttgcggcccagcctcataacagggatcatgaaagacagtggaaacaagcctccaggtctgcttccccgcaaaggactatacatggcaaatgacttaaagctcctgagacaccatctccagattcccatccacttccccaaggatttcttgtctgtgatgcttgaaaaaggaagtttgtctgccatgcgtttcctcaccgccgtgaacttggagcatccagagatgctggagaaagcgtcccgggagctgtggatgcgcgtctggtcaaggaatgaagacatcaccgagccgcagagcatcctggcggctgcagagaaggctggtatgtctgcagaacaagcccagggacttctggaaaagatcgcaacgccaaaggtgaagaaccagctcaaggagaccactgaggcagcctgcagatacggagcctttgggttgcccatcaccgtggcccatgtggatggccaaacccacatgttatttggctctgaccggatggagctgctggcgcacctgctgggagagaagtggatgggccctatacctccagccgtgaatgccagactttaagattgcccggaggaagcaaactcttcgtataaaaaaagcaggccatctgcttaacccttggctccaccataaggcactgggactcggatttctctatctgatagaggtattttctgtggccctgggagctgtctgtctttcccctacccccaaggatgccaggaagacgtccaccattagccatgtggcaacctttacttctatgcctcacaagtgcctttcagagagccccaattctgctttcccacaaaataaacctaatgccatcaggcaaaaaaaaaaaaaaaaaaaaa

SEQ ID NO: 2134 - protein, 226 aa, Homo sapiens
MGPLPRTVELFYDVLSPYSWLGFEILCRYQNIWNINLQLRPSLITGIMKDSGNKPPGLLPRKGLYMANDLKLLRHHLQIPIHFPKDFLSVMLEKGSLSAMRFLTAVNLEHPEMLEKASRELWMRVWSRNEDITEPQSILAAAEKAGMSAEQAQGLLEKIATPKVKNQLKETTEAACRYGAFGLPITVAHVDGQTHMLFGSDRMELLAHLLGEKWMGPIPPAVNARL

SEQ ID NO: 2135 - DNA, 2400 bp, Homo sapiens
gacaggtgagcgacgaacttctgagacaggtgtgggtgcgagggtcgggagggtcatgggattgggaccgaggtgtgaggagggaatctgcaattccttgctacacagagcgctggcaacttctgacaggctgtttctggggtatgggctgcctcgggttgttgctgttacaaggaaagaaaagagttcccctgcccaccgcctcccagccactgggctacctcctggcaggaaatttgcaaactgagtttaacaagttaggatcagcagagggtagaggagggccctggcagatgtggggtctagaagaggacaggagttatcagggcctccggccattgtgctgggcctttgcctgtacaattgtttctcaagcagttgtgtccctgtggctttggtgcgcctgtgtgcactttctccctccacctggagcatgggctaacaccggaggaaaggaaaagacagagtcagacagggagcctggggaggggccatggtgccaatgcacttactggggagactggagaagccgcttctcctcctgtgctgcgcctccttcctactggggctggctttgctgggcataaagacggacatcacccccgttgcttatttctttctcacattgggtggcttcttcttgtttgcctatctcctggtccggtttctggaatgggggcttcggtcccagctccaatcaatgcagactgagagcccagggccctcaggcaatgcacgggacaatgaagcctttgaagtgccagtctatgaagaggccgtggtgggactagaatcccagtgccgcccccaagagttggaccaaccacccccctacagcactgttgtgatacccccagcacctgaggaggaacaacctagccatccagaggggtccaggagagccaaactggaacagaggcgaatggcctcagaggggtccatggcccaggaaggaagccctggaagagctccaatcaaccttcggcttcggggaccacgggctgtgtccactgctcctgatctgcagagcttggcggcagtccccacattagagcctctgactccaccccctgcctatgatgtctgctttggtcaccctgatgatgatagtgttttttatgaggacaactgggcacccccttaaatgactctcccaagatttctcttctctccacaccagacctcgttcatttgactaacattttccagcgcctactatgtgtcagaaacaagtgtttctgcctggacatcataaatggggacttggaccctgaggagagtcaggccacggtaagcccttcccagctgagatatgggtggcataatttgagtcttctggcaacatttggtgacctaccccatatccaatatttccagcgttagattgaggatgaggtagggaggtgatccagagaaggcggagaaggaagaagtaacctctgagtggcggctattgcttctgttccaggtgctgttcgagctgttagaacccttaggcttgacagctttgtgagttattattgaaaaatgaggattccaagagtcagaggagtttgataatgtgcacgagggcacactgctagtaaataacattaaaataactggaatgaactcctgatcccaaagcctattgtgttttcaacacaaggtaataggaagccaagcaacttgcatgtctcccaatccctgtctagggacagctgctggtgcaggatggaagacttcctataaacagaatgggcgaccaattgtgtctacagagggggtgggctgagcatgggcacgcatgtccccagcctcctggacgagcaaagtcagtcaaagcgctggtgatccctgctccgcgtgcgtagcagtgtctgtgcctctcctgcccaggggctagagagcagtctccagtgcagggtccccatcctatctgaaaacagtggagtcagtgaccccaggtggagggacttccagttttaacaatgggttggtatgaaggccagaaggagtgaaacatgtgaactttctggcgaggagactccctcttgaatcatccatatgtagccccggggtcacttgcgaagagtctctaacagcttctgcctcactcctaagctctgaccgctaggctttcaccccagccgccggtcctgattcctgagatcccaatattgagcaccaggtttcctggaattgtgtgctgcggctgtgatgtaggtttcggtcgctggaagctgctaaaccatagctgacgccccctcctaagccagccttccttccccgcgcgggcatctgtccagggccttgtcgcgctctcagtctccttcgcagcctggccccaaccgttcaacttcaataaagcaaaactccagccaaaaaaaaaaaaaaaaaaaaaaaaaaaaaaaaaaaaaa

SEQ ID NO: 2136 - protein, 216 aa, Homo sapiens
MVPMHLLGRLEKPLLLLCCASFLLGLALLGIKTDITPVAYFFLTLGGFFLFAYLLVRFLEWGLRSQLQSMQTESPGPSGNARDNEAFEVPVYEEAVVGLESQCRPQELDQPPPYSTVVIPPAPEEEQPSHPEGSRRAKLEQRRMASEGSMAQEGSPGRAPINLRLRGPRAVSTAPDLQSLAAVPTLEPLTPPPAYDVCFGHPDDDSVFYEDNWAPP

SEQ ID NO: 2137 - DNA, 4145 bp, Homo sapiens
gggtggcctggtgtgtgggcgcggcagggcgcaggcgcaggcgcagtgtgcgtccgcgtctgaggggagggatgtgggggaagcgacggcccccggtttgtttgggctgtgggcggtgcgcagcggagagcccgggaaaagcgggaaatggcggcgccgagcgcggggtcttggtccaccttccagcacaaggagctgatggccgctgacaggggacgcaggatattgggagtgtgtggcatgcatcctcatcatcaggaaactctaaaaaagaaccgagtggtgctagccaaacagctgttgttgagcgaattgttagaacatcttctggagaaggacatcatcaccttggaaatgagggagctcatccaggccaaagtgggcagtttcagccagaatgtggaactcctcaacttgctgcctaagaggggtccccaagcttttgatgccttctgtgaagcactgagggagaccaagcaaggccacctggaggatatgttgctcaccaccctttctgggcttcagcatgtactcccaccgttgagctgtgactacgacttgagtctcccttttccggtgtgtgagtcctgtcccctttacaagaagctccgcctgtcgacagatactgtggaacactccctagacaataaagatggtcctgtctgccttcaggtgaagccttgcactcctgaattttatcaaacacacttccagctggcatataggttgcagtctcggcctcgtggcctagcactggtgttgagcaatgtgcacttcactggagagaaagaactggaatttcgctctggaggggatgtggaccacagtactctagtcaccctcttcaagcttttgggctatgacgtccatgttctatgtgaccagactgcacaggaaatgcaagagaaactgcagaattttgcacagttacctgcacaccgagtcacggactcctgcatcgtggcactcctctcgcatggtgtggagggcgccatctatggtgtggatgggaaactgctccagctccaagaggtttttcagctctttgacaacgccaactgcccaagcctacagaacaaaccaaaaatgttcttcatccaggcctgccgtggagatgagactgatcgtggggttgaccaacaagatggaaagaaccacgcaggatcccctgggtgcgaggagagtgatgccggtaaagaaaagttgccgaagatgagactgcccacgcgctcagacatgatatgcggctatgcctgcctcaaagggactgccgccatgcggaacaccaaacgaggttcctggtacatcgaggctcttgctcaagtgttttctgagcgggcttgtgatatgcacgtggccgacatgctggttaaggtgaacgcacttatcaaggatcgggaaggttatgctcctggcacagaattccaccggtgcaaggagatgtctgaatactgcagcactctgtgccgccacctctacctgttcccaggacaccctcccacatgatgtcacctccccatcatccacgccaagtggaagccactggaccacaggaggtgtgatagagcctttgatcttcaggatgcacggtttctgttctgccccctcagggatgtgggaatctcccagacttgtttcctgtgcccatcatctctgcctttgagtgtgggactccaggccagctccttttctgtgaagccctttgcctgtagagccagccttggttggacctattgccaggaatgtttcagctgcagttgaagagcctgacaagtgaagttgtaaacacagtgtggttatggggagagggcatataaattccccatatttgtgttcagttccagcttttgtagatggcactttagtgattgcttttattacattagttaagatgtctgagagaccatctcctatcttttatttcattcatatcctccgccctttttgtcctagagtgagagtttggaaggtgtccaaatttaatgtagacattatcttttggctctgaagaagcaaacatgactagagacgcaccttgctgcagtgtccagaagcggcctgtgcgttcccttcagtactgcagcgccacccagtggaaggacactcttggctcgtttgggctcaaggcaccgcagcctgtcagccaacattgccttgcatttgtaccttattgatctttgcccatggaagtctcaaagatctttcgttggttgtttctctgagctttgttactgaaatgagcctcgtggggagcatcagagaaggccaggaagaatggtgtgtttccctagactctgtaaccacctctctgtctttttccttcctgagaaacgtccatctctctcccttactattcccactttcattcaatcaacctgcacttcatatctagatttctagaaaagcttcctagcttatctccctgcttcatatctctcccttctttaccttcatttcatcctgttggctgctgccaccaaatctgtctagaatcctgctttacaggatcatgtaaatgctcaaagatgtaatgtagttctttgttcctgctttctctttcagtattaaactctcctttgatattatgtggcttttatttcagtgccatacatgttattgttttcaacctagaaacctttatccctgcttatctgaaacttcccaacttccctgttctttaagactttttttttttttttttttttttttgagacagagtctcgctctgtcgcccaggctggagggcagtggcacgatctcagctcactgcaagctccaactcccgggttcacgccattctcctgcctcagccttccaagtagctgggactacaggtgcccgccaccgtgcccggctaatttttttgtatttttagtagagacagggtttcaccatgttagccgggatggtcttgatctcctgacctcatgatccacccacctcagcctcccaaagtgttgggattacaggcgtgagccactgcgcccgggcaagacctttttttaaaaaaaaaaaaaaaaaaacttccattctttcttcctccagtctgttctcacataacagagtagttttggtttttaattttttttggttgtttgctgttttttgttttttaaggtgagttctcactatgtttctcagactggtctcgaactcctggcctcaagccatcttcccgcctcagcctctcaaatagctgggcttacaggcatgagccaccacacctggccaggatttggttgtttaaatataaatctgatcacccccctgcttagaacccttctgctttctattacccctcatttaaaatgtaaactcttcaccttggtttatgagaactggttcttgccttccccttgaacctcattaaatggtgatttcttgctaagctccagcccgagtggtctcctctcagcttctaattttgtgctctttcctgcccttttcctgggccttctcagctctccacccccaccactcttgactcaggtggtgtccttcttcctcaagtcttgacaattcccgggcccttcagtccctgagcagtctacttctgtgtctgtcaccacatcttgtcttttcccctcattgcatttattgcagtttatatatatgctacttttacttgttcatttctgtctcccctaccaggctgtaaatgagggcagaaaccttgtttgttttattcaccatcatgtaccaagtgcttggcacatagtgggccttcattaaatgtttgttgaataaaagagggaagaaggcaagccaaccttagctacaatcctaccttttgataaaatgttccttttgacaatatacacggattattatttgtactttgtttttccatgtgttttgcttttatccactggcatttttagctccttgaagacatatcatgtgtgagataacttccttcacatctcccatggtccctagcaaaatgctaggcctgtagtagtcaaggtgctcaataaatatttgtttgggtggtttgtgagccttgctgccaagtcctgcctttgggtcgacatagtatggaagtatttgagagagagaacctttccactcccactgccaggattttgtattgccatcgggtgccaaataaatgctcatatttattaaaaaaaaaaaaaaaaaaa

SEQ ID NO: 2138 - protein, 452 aa, Homo sapiens
MAAPSAGSWSTFQHKELMAADRGRRILGVCGMHPHHQETLKKNRVVLAKQLLLSELLEHLLEKDIITLEMRELIQAKVGSFSQNVELLNLLPKRGPQAFDAFCEALRETKQGHLEDMLLTTLSGLQHVLPPLSCDYDLSLPFPVCESCPLYKKLRLSTDTVEHSLDNKDGPVCLQVKPCTPEFYQTHFQLAYRLQSRPRGLALVLSNVHFTGEKELEFRSGGDVDHSTLVTLFKLLGYDVHVLCDQTAQEMQEKLQNFAQLPAHRVTDSCIVALLSHGVEGAIYGVDGKLLQLQEVFQLFDNANCPSLQNKPKMFFIQACRGDETDRGVDQQDGKNHAGSPGCEESDAGKEKLPKMRLPTRSDMICGYACLKGTAAMRNTKRGSWYIEALAQVFSERACDMHVADMLVKVNALIKDREGYAPGTEFHRCKEMSEYCSTLCRHLYLFPGHPPT

SEQ ID NO: 2139 - DNA, 3927 bp, Homo sapiens
gggtggcctggtgtgtgggcgcggcagggcgcaggcgcaggcgcagtgtgcgtccgcgtctgaggggagggatgtgggggaagcgacggcccccggtttgtttgggctgtgggcggtgcgcagcggagagcccgggaaaagcgggaaatggcggcgccgagcgcggggtcttggtccaccttccagcacaaggagctgatggccgctgacaggggacgcaggatattgggagtgtgtggcatgcatcctcatcatcaggaaactctaaaaaagaaccgagtggtgctagccaaacagctgttgttgagcgaattgttagaacatcttctggagaaggacatcatcaccttggaaatgagggagctcatccaggccaaagtgggcagtttcagccagaatgtggaactcctcaacttgctgcctaagaggggtccccaagcttttgatgccttctgtgaagccttgcactcctgaattttatcaaacacacttccagctggcatataggttgcagtctcggcctcgtggcctagcactggtgttgagcaatgtgcacttcactggagagaaagaactggaatttcgctctggaggggatgtggaccacagtactctagtcaccctcttcaagcttttgggctatgacgtccatgttctatgtgaccagactgcacaggaaatgcaagagaaactgcagaattttgcacagttacctgcacaccgagtcacggactcctgcatcgtggcactcctctcgcatggtgtggagggcgccatctatggtgtggatgggaaactgctccagctccaagaggtttttcagctctttgacaacgccaactgcccaagcctacagaacaaaccaaaaatgttcttcatccaggcctgccgtggagatgagactgatcgtggggttgaccaacaagatggaaagaaccacgcaggatcccctgggtgcgaggagagtgatgccggtaaagaaaagttgccgaagatgagactgcccacgcgctcagacatgatatgcggctatgcctgcctcaaagggactgccgccatgcggaacaccaaacgaggttcctggtacatcgaggctcttgctcaagtgttttctgagcgggcttgtgatatgcacgtggccgacatgctggttaaggtgaacgcacttatcaaggatcgggaaggttatgctcctggcacagaattccaccggtgcaaggagatgtctgaatactgcagcactctgtgccgccacctctacctgttcccaggacaccctcccacatgatgtcacctccccatcatccacgccaagtggaagccactggaccacaggaggtgtgatagagcctttgatcttcaggatgcacggtttctgttctgccccctcagggatgtgggaatctcccagacttgtttcctgtgcccatcatctctgcctttgagtgtgggactccaggccagctccttttctgtgaagccctttgcctgtagagccagccttggttggacctattgccaggaatgtttcagctgcagttgaagagcctgacaagtgaagttgtaaacacagtgtggttatggggagagggcatataaattccccatatttgtgttcagttccagcttttgtagatggcactttagtgattgcttttattacattagttaagatgtctgagagaccatctcctatcttttatttcattcatatcctccgccctttttgtcctagagtgagagtttggaaggtgtccaaatttaatgtagacattatcttttggctctgaagaagcaaacatgactagagacgcaccttgctgcagtgtccagaagcggcctgtgcgttcccttcagtactgcagcgccacccagtggaaggacactcttggctcgtttgggctcaaggcaccgcagcctgtcagccaacattgccttgcatttgtaccttattgatctttgcccatggaagtctcaaagatctttcgttggttgtttctctgagctttgttactgaaatgagcctcgtggggagcatcagagaaggccaggaagaatggtgtgtttccctagactctgtaaccacctctctgtctttttccttcctgagaaacgtccatctctctcccttactattcccactttcattcaatcaacctgcacttcatatctagatttctagaaaagcttcctagcttatctccctgcttcatatctctcccttctttaccttcatttcatcctgttggctgctgccaccaaatctgtctagaatcctgctttacaggatcatgtaaatgctcaaagatgtaatgtagttctttgttcctgctttctctttcagtattaaactctcctttgatattatgtggcttttatttcagtgccatacatgttattgttttcaacctagaaacctttatccctgcttatctgaaacttcccaacttccctgttctttaagactttttttttttttttttttttttttgagacagagtctcgctctgtcgcccaggctggagggcagtggcacgatctcagctcactgcaagctccaactcccgggttcacgccattctcctgcctcagccttccaagtagctgggactacaggtgcccgccaccgtgcccggctaatttttttgtatttttagtagagacagggtttcaccatgttagccgggatggtcttgatctcctgacctcatgatccacccacctcagcctcccaaagtgttgggattacaggcgtgagccactgcgcccgggcaagacctttttttaaaaaaaaaaaaaaaaaaacttccattctttcttcctccagtctgttctcacataacagagtagttttggtttttaattttttttggttgtttgctgttttttgttttttaaggtgagttctcactatgtttctcagactggtctcgaactcctggcctcaagccatcttcccgcctcagcctctcaaatagctgggcttacaggcatgagccaccacacctggccaggatttggttgtttaaatataaatctgatcacccccctgcttagaacccttctgctttctattacccctcatttaaaatgtaaactcttcaccttggtttatgagaactggttcttgccttccccttgaacctcattaaatggtgatttcttgctaagctccagcccgagtggtctcctctcagcttctaattttgtgctctttcctgcccttttcctgggccttctcagctctccacccccaccactcttgactcaggtggtgtccttcttcctcaagtcttgacaattcccgggcccttcagtccctgagcagtctacttctgtgtctgtcaccacatcttgtcttttcccctcattgcatttattgcagtttatatatatgctacttttacttgttcatttctgtctcccctaccaggctgtaaatgagggcagaaaccttgtttgttttattcaccatcatgtaccaagtgcttggcacatagtgggccttcattaaatgtttgttgaataaaagagggaagaaggcaagccaaccttagctacaatcctaccttttgataaaatgttccttttgacaatatacacggattattatttgtactttgtttttccatgtgttttgcttttatccactggcatttttagctccttgaagacatatcatgtgtgagataacttccttcacatctcccatggtccctagcaaaatgctaggcctgtagtagtcaaggtgctcaataaatatttgtttgggtggtttgtgagccttgctgccaagtcctgcctttgggtcgacatagtatggaagtatttgagagagagaacctttccactcccactgccaggattttgtattgccatcgggtgccaaataaatgctcatatttattaaaaaaaaaaaaaaaaaaa

SEQ ID NO: 2140 - protein, 108 aa, Homo sapiens
MAAPSAGSWSTFQHKELMAADRGRRILGVCGMHPHHQETLKKNRVVLAKQLLLSELLEHLLEKDIITLEMRELIQAKVGSFSQNVELLNLLPKRGPQAFDAFCEALHS

SEQ ID NO: 2141 - DNA, 3093 bp, Homo sapiens
agcaagagcagaggcttaaggagctacactgggggaaggacaggggcaagcaggccaaggcctggccggggctcggggggagggaatatggagcaatcccggtcacagcagcgtgggggtgaacaaagctggtggggtagtgacccccagtaccagtatatgccctttgaacactgcaccagctacggactgccctctgagaatgggggcctccagcacaggctccggaaggatgcaggcccccgccacaacgtccaccccacacagatttatggccatcacaaagaacaattctcagacagggagcaggacatagggatgcccaagaagacaggctccagttctaccgtggacagcaaggatgaggatcactattctaaatgtcaagattgtatccaccgcctgggacaggtggtgagaagaaaattaggggaagactggatctttctggtgcttctgggactgctgatggctctggtcagctggagcatggactacgtcagtgccaaaagccttcaggcctacaagtggtcctacgcgcagatgcagcccagccttcctctgcagttcctggtctgggtcaccttcccactagtcctcatcctcttcagcgccctcttctgccacctcatctctccccaggctgttggctctggaatccccgaaatgaagacaatacttcgtggggttgtcctgaaggaatacctcacaatgaaagcctttgtggccaaggttgtcgccctgactgcgggcctgggcagtggcatccccgtggggaaagagggccccttcgtccacattgccagcatctgtgctgctgtcctcagcaaattcatgtctgtgttctgcggggtatatgagcagccatactactactctgatatcctgacggtgggctgtgctgtgggagtcggctgttgttttgggacaccacttggaggagtgctatttagcatcgaggtcacctccacctactttgctgttcggaactactggagaggattctttgcagccacgttcagcgcctttgtgtttcgagtgctggcagtgtggaacaaggatgctgtcaccatcactgctctgttcagaaccaatttccgaatggatttcccctttgacctgaaggaactaccagcttttgctgccatcgggatttgctgtgggctcctgggagctgtatttgtgtatctgcatcgccaagtcatgctcggtgtccgaaagcacaaggccctcagccagtttcttgctaagcaccgcctgctgtatcctggaattgttacctttgtcattgcctcattcaccttcccaccaggaatgggtcaattcatggctggagagttgatgccccgcgaagccatcagtactttgtttgacaacaatacatgggtgaaacacgcgggtgatcctgagagcctgggccagtcagctgtgtggattcacccccgggtcaacgttgtcatcatcatctttctcttcttcgtcatgaagttctggatgtccatcgtggccaccactatgcccataccctgcggaggcttcatgcctgtgtttgtgctaggagctgcatttggaaggctggtaggagaaatcatggccatgctctttcctgatggtattttgtttgatgacatcatctacaagatcctacctgggggctatgcagtaattggagcagcagcgctgactggtgccgtttcccacacagtctccacagctgtgatttgcttcgaattaacgggtcagattgctcacatcctgcccatgatggtggctgttatcttggccaacatggtggcccagagcctgcagccctctctctatgacagcatcatccaggtcaagaagctaccctacttgcctgaccttggctggaaccagctcagcaaatataccatctttgttgaggacatcatggtacgtgatgtgaagtttgtttcagcttcttacacatatggggagttgcgaaccctgctccagaccaccacagtcaagactttaccactggttgactcaaaagattcaatgatcctgctgggctcggtggagcggtcggaactgcaggccctcctgcagcgccacctgtgtcctgagcgcaggctgcgcgcagcccaagagatggcgcggaagttgtcggagctgccttacgacgggaaggcgcggctggctggggaggggccccccggcgcgcctccaggccggcccgagtccttcgcctttgtggatgaggatgaggacgaagatctctctggcaagagcgagcttcctccttcccttgctctccacccctctactactgcccctctgtccccagaagagcccaatgggcctctgcctggccacaaacagcagccggaagcaccagagcctgcaggtcaaagaccctccatcttccagtccctgcttcactgcttgctgggcagagctcgccccacaaagaagaaaacaacccaggattccacagatttagtggataacatgtcacctgaagagattgaggcctgggagcaggagcagctgagccagcctgtctgttttgattcctgctgtattgaccagtctcccttccagctggtggagcagacaaccctgcacaagactcataccctgttttcactccttggcctccacctcgcttacgtgaccagcatggggaagctcaggggcgtcctggccctggaggagctacagaaggccattgaggggcacaccaagtctggggtgcagctccgccctccccttgccagcttccggaacacgacttcaactcgaaagagtaccggggcacctccatcttctgcagagaactggaacctgcctgaggacaggcctggggccactggaacaggggatgtgattgctgcctccccagagacccctgtgccatctccttccccagagccccctctctccctggccccaggcaaggtagagggcgagttggaggagctggagctggtggagagtccagggctggaagaggagctggccgacatcttgcagggccccagcctgcgatccacagacgaggaggatgaggatgaactgatcctttgaccccctcccacgacctcctcataaagaccgtggagaggc

SEQ ID NO: 2142 - protein, 988 aa, Homo sapiens
MEQSRSQQRGGEQSWWGSDPQYQYMPFEHCTSYGLPSENGGLQHRLRKDAGPRHNVHPTQIYGHHKEQFSDREQDIGMPKKTGSSSTVDSKDEDHYSKCQDCIHRLGQVVRRKLGEDWIFLVLLGLLMALVSWSMDYVSAKSLQAYKWSYAQMQPSLPLQFLVWVTFPLVLILFSALFCHLISPQAVGSGIPEMKTILRGVVLKEYLTMKAFVAKVVALTAGLGSGIPVGKEGPFVHIASICAAVLSKFMSVFCGVYEQPYYYSDILTVGCAVGVGCCFGTPLGGVLFSIEVTSTYFAVRNYWRGFFAATFSAFVFRVLAVWNKDAVTITALFRTNFRMDFPFDLKELPAFAAIGICCGLLGAVFVYLHRQVMLGVRKHKALSQFLAKHRLLYPGIVTFVIASFTFPPGMGQFMAGELMPREAISTLFDNNTWVKHAGDPESLGQSAVWIHPRVNVVIIIFLFFVMKFWMSIVATTMPIPCGGFMPVFVLGAAFGRLVGEIMAMLFPDGILFDDIIYKILPGGYAVIGAAALTGAVSHTVSTAVICFELTGQIAHILPMMVAVILANMVAQSLQPSLYDSIIQVKKLPYLPDLGWNQLSKYTIFVEDIMVRDVKFVSASYTYGELRTLLQTTTVKTLPLVDSKDSMILLGSVERSELQALLQRHLCPERRLRAAQEMARKLSELPYDGKARLAGEGPPGAPPGRPESFAFVDEDEDEDLSGKSELPPSLALHPSTTAPLSPEEPNGPLPGHKQQPEAPEPAGQRPSIFQSLLHCLLGRARPTKKKTTQDSTDLVDNMSPEEIEAWEQEQLSQPVCFDSCCIDQSPFQLVEQTTLHKTHTLFSLLGLHLAYVTSMGKLRGVLALEELQKAIEGHTKSGVQLRPPLASFRNTTSTRKSTGAPPSSAENWNLPEDRPGATGTGDVIAASPETPVPSPSPEPPLSLAPGKVEGELEELELVESPGLEEELADILQGPSLRSTDEEDEDELIL

SEQ ID NO: 2143 - DNA, 2322 bp, Homo sapiens
cccgccccctctcttctccctccctcctccttccgtgtgtccctccccgcccggctggaggctgctccggaccgggacgcagagtctgcggacccggcgccgaggcggccacccgagacgcggcgcgcacgctccggcctgcgcccggcccggccatggcggccccccgcccgtctcccgcgatctccgtttcggtctcggctccggctttttacgccccgcagaagaagttcggccctgtggtggccccaaagcccaaagtgaatcccttccggcccggggacagcgagcctcccccggcacccggggcccagcgcgcacagatgggccgggtgggcgagattcccccgccgcccccggaagactttcccctgcctccacctccccttgctggggatggcgacgatgcagagggtgctctgggaggtgccttcccgccgccccctcccccgatcgaggaatcatttccccctgcgcctctggaggaggagatcttcccttccccgccgcctcctccggaggaggagggagggcctgaggcccccataccgcccccaccacagcccagggagaaggtgagcagtattgatttggagatcgactctctgtcctcactgctggatgacatgaccaagaatgatcctttcaaagcccgggtgtcatctggatatgtgcccccaccagtggccactccattcagttccaagtccagtaccaagcctgcagccgggggcacagcacccctgcctccttggaagtccccttccagctcccagcctctgccccaggttccggctccggctcagagccagacacagttccatgttcagccccagccccagcccaagcctcaggtccaactccatgtccagtcccagacccagcctgtgtctttggctaacacccagccccgagggcccccagcctcatctccggctccagcccctaagttttctccagtgactcctaagtttactcctgtggcttccaagttcagtcctggagccccaggtggatctgggtcacaaccaaatcaaaaattggggcaccccgaagctctttctgctggcacaggctcccctcaacctcccagcttcacctatgcccagcagagggagaagccccgagtgcaggagaagcagcaccccgtgcccccaccggctcagaaccaaaaccaggtgcgctcccctggggccccagggcccctgactctgaaggaggtggaggagctggagcagctgacccagcagctaatgcaggacatggagcatcctcagaggcagaatgtggctgtcaacgaactctgcggccgatgccatcaacccctggcccgggcgcagccagccgtccgcgctctagggcagctgttccacatcgcctgcttcacctgccaccagtgtgcgcagcagctccagggccagcagttctacagtctggagggggcgccgtactgcgagggctgttacactgacaccctggagaagtgtaacacctgcggggagcccatcactgaccgcatgctgagggccacgggcaaggcctatcacccgcactgcttcacctgtgtggtctgcgcccgccccctggagggcacctccttcatcgtggaccaggccaaccggccccactgtgtccccgactaccacaagcagtacgccccgaggtgctccgtctgctctgagcccatcatgcctgagcctggccgagatgagactgtgcgagtggtcgccctggacaagaacttccacatgaagtgttacaagtgtgaggactgcgggaagcccctgtcgattgaggcagatgacaatggctgcttccccctggacggtcacgtgctctgtcggaagtgccacactgctagagcccagacctgagtgaggacaggccctcttcagaccgcagtccatgccccattgtggaccacccacactgagaccacctgcccccacctcagttattgttttgatgtctagcccctcccatttccaacccctccctagcatcccaggtgccctgacccaggacccaacatggtctagggatgcaggatccccgccctggggtctggtcctcgcccatcctgcagggattgcccaccgtcttccagacaccccacctgaggggggcaccaggtttagtgctgctgctttcactgctgcacccgcgccctcggccggccccccgagcagcctttgtactctgcttgcggagggctgggagaccctccaggacattcccaccctcccccatgctgccaagttgtagctatagctacaaataaaaaaaaaccttgttttccagaaaaaaaaaaaaaaaaaaaaa

SEQ ID NO: 2144 - protein, 572 aa, Homo sapiens
MAAPRPSPAISVSVSAPAFYAPQKKFGPVVAPKPKVNPFRPGDSEPPPAPGAQRAQMGRVGEIPPPPPEDFPLPPPPLAGDGDDAEGALGGAFPPPPPPIEESFPPAPLEEEIFPSPPPPPEEEGGPEAPIPPPPQPREKVSSIDLEIDSLSSLLDDMTKNDPFKARVSSGYVPPPVATPFSSKSSTKPAAGGTAPLPPWKSPSSSQPLPQVPAPAQSQTQFHVQPQPQPKPQVQLHVQSQTQPVSLANTQPRGPPASSPAPAPKFSPVTPKFTPVASKFSPGAPGGSGSQPNQKLGHPEALSAGTGSPQPPSFTYAQQREKPRVQEKQHPVPPPAQNQNQVRSPGAPGPLTLKEVEELEQLTQQLMQDMEHPQRQNVAVNELCGRCHQPLARAQPAVRALGQLFHIACFTCHQCAQQLQGQQFYSLEGAPYCEGCYTDTLEKCNTCGEPITDRMLRATGKAYHPHCFTCVVCARPLEGTSFIVDQANRPHCVPDYHKQYAPRCSVCSEPIMPEPGRDETVRVVALDKNFHMKCYKCEDCGKPLSIEADDNGCFPLDGHVLCRKCHTARAQT

SEQ ID NO: 2145 - DNA, 2325 bp, Homo sapiens
cccgccccctctcttctccctccctcctccttccgtgtgtccctccccgcccggctggaggctgctccggaccgggacgcagagtctgcggacccggcgccgaggcggccacccgagacgcggcgcgcacgctccggcctgcgcagcccggcccggccatggcggccccccgcccgtctcccgcgatctccgtttcggtctcggctccggctttttacgccccgcagaagaagttcggccctgtggtggccccaaagcccaaagtgaatcccttccggcccggggacagcgagcctcccccggcacccggggcccagcgcgcacagatgggccgggtgggcgagattcccccgccgcccccggaagactttcccctgcctccacctccccttgctggggatggcgacgatgcagagggtgctctgggaggtgccttcccgccgccccctcccccgatcgaggaatcatttccccctgcgcctctggaggaggagatcttcccttccccgccgcctcctccggaggaggagggagggcctgaggcccccataccgcccccaccacagcccagggagaaggtgagcagtattgatttggagatcgactctctgtcctcactgctggatgacatgaccaagaatgatcctttcaaagcccgggtgtcatctggatatgtgcccccaccagtggccactccattcagttccaagtccagtaccaagcctgcagccgggggcacagcacccctgcctccttggaagtccccttccagctcccagcctctgccccaggttccggctccggctcagagccagacacagttccatgttcagccccagccccagcccaagcctcaggtccaactccatgtccagtcccagacccagcctgtgtctttggctaacacccagccccgagggcccccagcctcatctccggctccagcccctaagttttctccagtgactcctaagtttactcctgtggcttccaagttcagtcctggagccccaggtggatctgggtcacaaccaaatcaaaaattggggcaccccgaagctctttctgctggcacaggctcccctcaacctcccagcttcacctatgcccagcagagggagaagccccgagtgcaggagaagcagcaccccgtgcccccaccggctcagaaccaaaaccaggtgcgctcccctggggccccagggcccctgactctgaaggaggtggaggagctggagcagctgacccagcagctaatgcaggacatggagcatcctcagaggcagaatgtggctgtcaacgaactctgcggccgatgccatcaacccctggcccgggcgcagccagccgtccgcgctctagggcagctgttccacatcgcctgcttcacctgccaccagtgtgcgcagcagctccagggccagcagttctacagtctggagggggcgccgtactgcgagggctgttacactgacaccctggagaagtgtaacacctgcggggagcccatcactgaccgcatgctgagggccacgggcaaggcctatcacccgcactgcttcacctgtgtggtctgcgcccgccccctggagggcacctccttcatcgtggaccaggccaaccggccccactgtgtccccgactaccacaagcagtacgccccgaggtgctccgtctgctctgagcccatcatgcctgagcctggccgagatgagactgtgcgagtggtcgccctggacaagaacttccacatgaagtgttacaagtgtgaggactgcgggaagcccctgtcgattgaggcagatgacaatggctgcttccccctggacggtcacgtgctctgtcggaagtgccacactgctagagcccagacctgagtgaggacaggccctcttcagaccgcagtccatgccccattgtggaccacccacactgagaccacctgcccccacctcagttattgttttgatgtctagcccctcccatttccaacccctccctagcatcccaggtgccctgacccaggacccaacatggtctagggatgcaggatccccgccctggggtctggtcctcgcccatcctgcagggattgcccaccgtcttccagacaccccacctgaggggggcaccaggtttagtgctgctgctttcactgctgcacccgcgccctcggccggccccccgagcagcctttgtactctgcttgcggagggctgggagaccctccaggacattcccaccctcccccatgctgccaagttgtagctatagctacaaataaaaaaaaaccttgttttccagaaaaaaaaaaaaaaaaaaaaa

SEQ ID NO: 2146 - protein, 572 aa, Homo sapiens; identical to SEQ ID NO: 2144

SEQ ID NO: 2147 - DNA, 3367 bp, Homo sapiens
gcccccgcccggcccgccccgctctcctagtcccttgcaacctggcgctgccatccgggccactgtcccaggtcccggcccggagctatggagcggcgctggcccctggggctagggctggtgctgctgctctgcgccccgctgcccccgggggcgcgcgccaaggaagttactctgatggacacaagcaaggcacagggagagctgggctggctgctggatcccccaaaagatgggtggagtgaacagcaacagatactgaatgggacacccctgtacatgtaccaggactgcccaatgcaaggacgcagagacactgaccactggcttcgctccaattggatctaccgcggggaggaggcttcccgcgtccacgtggagctgcagttcaccgtgcgggactgcaagagtttccctgggggagccgggcctctgggctgcaaggagaccttcaaccttctgtacatggagagtgaccaggatgtgggcattcagctccgacggcccttgttccagaaggtaaccacggtggctgcagaccagagcttcaccattcgagaccttgcgtctggctccgtgaagctgaatgtggagcgctgctctctgggccgcctgacccgccgtggcctctacctcgctttccacaacccgggtgcctgtgtggccctggtgtctgtccgggtcttctaccagcgctgtcctgagaccctgaatggcttggcccaattcccagacactctgcctggccccgctgggttggtggaagtggcggggacctgcttgccccacgcgcgggccagccccaggccctcaggtgcaccccgcatgcactgcagccctgatggcgagtggctggtgcctgtaggacggtgccactgtgagcctggctatgaggaaggtggcagtggcgaagcatgtgttgcctgccctagcggctcctaccggatggacatggacacaccccattgtctcacgtgcccccagcagagcactgctgagtctgagggggccaccatctgtacctgtgagagcggccattacagagctcccggggagggcccccaggtggcatgcacaggtcccccctcggccccccgaaacctgagcttctctgcctcagggactcagctctccctgcgttgggaacccccagcagatacggggggacgccaggatgtcagatacagtgtgaggtgttcccagtgtcagggcacagcacaggacggggggccctgccagccctgtggggtgggcgtgcacttctcgccgggggcccgggggctcaccacacctgcagtgcatgtcaatggccttgaaccttatgccaactacacctttaatgtggaagcccaaaatggagtgtcagggctgggcagctctggccatgccagcacctcagtcagcatcagcatggggcatgcagagtcactgtcaggcctgtctctgagactggtgaagaaagaaccgaggcaactagagctgacctgggcggggtcccggccccgaagccctggggcgaacctgacctatgagctgcacgtgctgaaccaggatgaagaacggtaccagatggttctagaacccagggtcttgctgacagagctgcagcctgacaccacatacatcgtcagagtccgaatgctgaccccactgggtcctggccctttctcccctgatcatgagtttcggaccagcccaccagtgtccaggggcctgactggaggagagattgtagccgtcatctttgggctgctgcttggtgcagccttgctgcttgggattctcgttttccggtccaggagagcccagcggcagaggcagcagaggcagcgtgaccgcgccaccgatgtggatcgagaggacaagctgtggctgaagccttatgtggacctccaggcatacgaggaccctgcacagggagccctggactttacccgggagcttgatccagcgtggctgatggtggacactgtcataggagaaggagagtttggggaagtgtatcgagggaccctgaggctccccagccaggactgcaagactgtggccattaagaccttaaaagacacatccccaggtggccagtggtggaacttccttcgagaggcaactatcatgggccagtttagccacccgcatattctgcatctggaaggcgtcgtcacaaagcgaaagccgatcatgatcatcacagaatttatggagaatggagccctggatgccttcctgagggagcgggaggaccagctggtccctgggcagctagtggccatgctgcagggcatagcatctggcatgaactacctcagtaatcacaattatgtccaccgggacctggctgccagaaacatcttggtgaatcaaaacctgtgctgcaaggtgtctgactttggcctgactcgcctcctggatgactttgatggcacatacgaaacccagggaggaaagatccctatccgttggacagcccctgaagccattgcccatcggatcttcaccacagccagcgatgtgtggagctttgggattgtgatgtgggaggtgctgagctttggggacaagccttatggggagatgagcaatcaggaggttatgaagagcattgaggatgggtaccggttgccccctcctgtggactgccctgcccctctgtatgagctcatgaagaactgctgggcatatgaccgtgcccgccggccacacttccagaagcttcaggcacatctggagcaactgcttgccaacccccactccctgcggaccattgccaactttgaccccaggatgactcttcgcctgcccagcctgagtggctcagatgggatcccatatcgaaccgtctctgagtggctcgagtccatacgcatgaaacgctacatcctgcacttccactcggctgggctggacaccatggagtgtgtgctggagctgaccgctgaggacctgacgcagatgggaatcacactgcccgggcaccagaagcgcattctttgcagtattcagggattcaaggactgatccctcctctcaccccatgcccaatcagggtgcaaggagcaaggacggggccaaggtcgctcatggtcactccctgcgccccttcccacaacctgccagactaggctatcggtgctgcttctgcccactttcaggagaaccctgctctgcaccccagaaaacctctttgttttaaaagggaggtgggggtagaagtaaaaggatgatcatgggagggagctgaggggttaatatatatacatacatacacatatatatatttttgtaaataaacaggaactgattttctgcctccatcccacccatgagggctgcaggcactacaaaagagctgactactgagaaaaaa

SEQ ID NO: 2148 - protein, 976 aa, Homo sapiens
MERRWPLGLGLVLLLCAPLPPGARAKEVTLMDTSKAQGELGWLLDPPKDGWSEQQQILNGTPLYMYQDCPMQGRRDTDHWLRSNWIYRGEEASRVHVELQFTVRDCKSFPGGAGPLGCKETFNLLYMESDQDVGIQLRRPLFQKVTTVAADQSFTIRDLASGSVKLNVERCSLGRLTRRGLYLAFHNPGACVALVSVRVFYQRCPETLNGLAQFPDTLPGPAGLVEVAGTCLPHARASPRPSGAPRMHCSPDGEWLVPVGRCHCEPGYEEGGSGEACVACPSGSYRMDMDTPHCLTCPQQSTAESEGATICTCESGHYRAPGEGPQVACTGPPSAPRNLSFSASGTQLSLRWEPPADTGGRQDVRYSVRCSQCQGTAQDGGPCQPCGVGVHFSPGARGLTTPAVHVNGLEPYANYTFNVEAQNGVSGLGSSGHASTSVSISMGHAESLSGLSLRLVKKEPRQLELTWAGSRPRSPGANLTYELHVLNQDEERYQMVLEPRVLLTELQPDTTYIVRVRMLTPLGPGPFSPDHEFRTSPPVSRGLTGGEIVAVIFGLLLGAALLLGILVFRSRRAQRQRQQRQRDRATDVDREDKLWLKPYVDLQAYEDPAQGALDFTRELDPAWLMVDTVIGEGEFGEVYRGTLRLPSQDCKTVAIKTLKDTSPGGQWWNFLREATIMGQFSHPHILHLEGVVTKRKPIMIITEFMENGALDAFLREREDQLVPGQLVAMLQGIASGMNYLSNHNYVHRDLAARNILVNQNLCCKVSDFGLTRLLDDFDGTYETQGGKIPIRWTAPEAIAHRIFTTASDVWSFGIVMWEVLSFGDKPYGEMSNQEVMKSIEDGYRLPPPVDCPAPLYELMKNCWAYDRARRPHFQKLQAHLEQLLANPHSLRTIANFDPRMTLRLPSLSGSDGIPYRTVSEWLESIRMKRYILHFHSAGLDTMECVLELTAEDLTQMGITLPGHQKRILCSIQGFKD

SEQ ID NO: 2149 - DNA, 957 bp, Homo sapiens
atgaatggagaccacatggttctaggatcttcggtgactgacaagaaggccatcatcttggttaccattttactccttttacgcctggtagcaatagcaggcaatggcttcatcactgctgctctgggcgtggagtgggtgctacggagaatgttgttgccttgtgataagttattggttagcctaggggcctctcgcttctgtctgcagtcagtggtaatgggtaagaccatttatgttttcttgcatccgatggccttcccatacaaccctgtactgcagtttctagctttccagtgggacttcctgaatgctgccaccttatggtcctctacctggctcagtgtcttctattgtgtgaaaattgctaccttcacccaccctgtcttcttctggctaaagcacaagttgtctgggtggctaccatggatgctcttcagctctgtagggctctccagcttcaccaccattctatttttcataggcaaccacagaatgtatcagaactatttaaggaaccatctacaaccttggaatgtcactggcgatagcatacggagctactgtgagaaattctatctcttccctctaaaaatgattacttggacaatgcccactgctgtctttttcatttgcatgattttgctcatcacatctctgggaagacacaggaagaaggctctccttacaacctcaggattccgagagcccagtgtgcaggcacacataaaggctctgctggctctcctctcttttgccatgctcttcatctcatatttcctgtcactggtgttcagtgctgcaggtatttttccacctctggactttaaattctgggtgtgggagtcagtgatttatctgtgtgcagcagttcaccccatcattctgctcttcagcaactgcaggctgagagctgtgctgaagagtcgtcgttcctcaaggtgtgggacaccttga

SEQ ID NO: 2150 - protein, 318 aa, Homo sapiens
MNGDHMVLGSSVTDKKAIILVTILLLLRLVAIAGNGFITAALGVEWVLRRMLLPCDKLLVSLGASRFCLQSVVMGKTIYVFLHPMAFPYNPVLQFLAFQWDFLNAATLWSSTWLSVFYCVKIATFTHPVFFWLKHKLSGWLPWMLFSSVGLSSFTTILFFIGNHRMYQNYLRNHLQPWNVTGDSIRSYCEKFYLFPLKMITWTMPTAVFFICMILLITSLGRHRKKALLTTSGFREPSVQAHIKALLALLSFAMLFISYFLSLVFSAAGIFPPLDFKFWVWESVIYLCAAVHPIILLFSNCRLRAVLKSRRSSRCGTP

SEQ ID NO: 2151 - DNA, 924 bp, Homo sapiens
atgcaagcagcactgacggccttcttcgtgttgctctttagcctgctgagtcttctggggattgcagcgaatggcttcattgtgctggtgctgggcagggagtggctgcgatatggcaggttgctgcccttggatatgatcctcattagcttgggtgcctcccgcttctgcctgcagttggttgggacagtgcacaacttctactactctgcccagaaggtcgagtactctgggggtctcggccgacagttcttccatctacactggcacttcctgaactcagccaccttctggttttgcagctggctcagtgtcctgttctgtgtgaagattgctaacatcacacactccaccttcctgtggctgaagtggaggttcctagggtgggtgccctggctcctgttgggctctgtcctgatctccttcatcataaccctgctgtttttttgggtgaactaccctgtatatcaagaatttttaattagaaaattttctgggaacatgacctacaagtggaatacaaggatagaaacatactatttcccatccctgaaactggtcatctggtcaattcctttttctgtttttctggtctcaattatgctgttaattaattctctgaggaggcatactcagagaatgcagcacaacgggcacagcctgcaggaccccagcacccaggctcacaccagagctctgaagtccctcatctccttcctcattctttatgctctgtcctttctgtccctgatcattgatgccgcaaaatttatctccatgcagaacgacttttactggccatggcaaattgcagtctacctgtgcatatctgtccatcccttcatcctcatcttcagcaacctcaagcttcgaagcgtgttctcacagctcctgttgttggcaaggggcttctgggtggcctga

SEQ ID NO: 2152 - protein, 307 aa, Homo sapiens
MQAALTAFFVLLFSLLSLLGIAANGFIVLVLGREWLRYGRLLPLDMILISLGASRFCLQLVGTVHNFYYSAQKVEYSGGLGRQFFHLHWHFLNSATFWFCSWLSVLFCVKIANITHSTFLWLKWRFLGWVPWLLLGSVLISFIITLLFFWVNYPVYQEFLIRKFSGNMTYKWNTRIETYYFPSLKLVIWSIPFSVFLVSIMLLINSLRRHTQRMQHNGHSLQDPSTQAHTRALKSLISFLILYALSFLSLIIDAAKFISMQNDFYWPWQIAVYLCISVHPFILIFSNLKLRSVFSQLLLLARGFWVA

SEQ ID NO: 2153 - DNA, 2355 bp, Homo sapiens
cgccagagcagcctcgacgctatggaggagcccggtgctacccctcagccctacctggggctggtcctggaggagctacgcagagttgtggcagcactacctgagagtatgagaccagatgagaatccttatggttttccatcggaactggtggtatgtgcagctgttattggattttttgttgttctcctttttttgtggagaagttttagatcggttaggagtcggctttacgtgggaagagagcaaaaacttggtgcaacgctttctggactaattgaagaaaaatgtaaactacttgaaaagtttagccttattcaaaaagagtatgaaggctatgaagtagagtcatctttagaggatgccagctttgagaaggcggcagcagaagaagcacgaagtttggaggcaacctgtgaaaagctgaacaggtccaattctgaacttgaggatgaaatcctctgtctagaaaaagacttaaaagaagagaaatctaaacattctcaacaagatgaattgatggcggatatttcaaaaagtatacagtctctagaagatgagtcaaaatccctcaaatcacaaatagctgaagccaaaatcatctgcaagacatttaaaatgagtgaagaacgacgggctatagcaataaaagatgctttgaatgaaaattctcaacttcagacaagccataaacagctttttcagcaagaagctgaagtatggaaaggacaagtgagtgaacttaataaacagaaaataacatttgaagactccaaagtacacgcagaacaagttctgaatgataaagaaaatcacatcaagaccctgactggacacttgccaatgatgaaagatcaggctgctgtgcttgaagaagacacaacggatgatgataacctggaattagaagtgaacagtcaatgggaaaatggtgctaacttagatgatcctctgaaaggagctttgaagaaactgattcatgctgctaagttaaatgtttctttaaaaagcttagaaggagaaagaaaccacattattattcagttatctgaagtggacaaaacaaaggaagagcttacagagcatattaaaaatcttcagactcaacaagcatctttgcaatcagaaaacatatattttgaaagtgagaatcagaagcttcaacagaaacttaaaataatgactgaattctatcaagaaaatgaaatgaaactctacaggaaattaacagtggaggaaaattaccgaatagaggaagaagagaagctttctagagtggaagaaaagctcagccgtgccactgaacagctggagacctatagaaagctagccaaagatcttgaagaagaattggagagaactgttcatttttatcaaaagcaggttatttcctacgagaaaagaggacatgataattggttggcagctcggactgctgaaagaaacctcagtgatttaaggaaagaaaatgctcacaacaaacaaaaattaactgaaacagagttgaaatttgaacttttagaaaaagatcctaatgcacttgatgtttcaaatacagcatttggcagagagcatgccccgaatggtcccgcaccattgggtcagcgttcatctgaaacgagagcttttctctctcctcaaactttgttggaggatccactgggactctcacctgtgcttccggagggaggaggaagaggcccaagaggcccagggaatcccctggaccatcagattaccaatgaaagaggagaaccaagctgtgacaggttaaccgatcctcacagggctccttctgacactgggtccctgtcatctccggtggaacaggactgtaagatgatgtttcctccaccaggacaatcatatcctgattcagctcttcctcctcaaagggaagacagattttattctaattctgaaagactgtctggatcagcagaacccagaagttttaaaatgacttctttggataaaatggatgggtcaatgccttcagaaatggaatccagtagaaatgatgccaaagatgatcttggtaatttaaatgtgcctgattcatctctccctgctgaaaatgaagcaactggccctggctttattcctccacctcttgctccagtcagaggaccattgtttccagtggatacaaggggcccgttcatgagaagaggacctcctttccccccacctcctccaggaaccatgtttggagcttctcgaggttattttccaccaagggatttcccaggtccaccacatgctccatttgcaatgagaaacatctacccaccgaggggtttacctccttactttcacccgagacctggattttaccccaaccccgcattctga

SEQ ID NO: 2154 - protein, 777 aa, Homo sapiens
MEEPGATPQPYLGLVLEELRRVVAALPESMRPDENPYGFPSELVVCAAVIGFFVVLLFLWRSFRSVRSRLYVGREQKLGATLSGLIEEKCKLLEKFSLIQKEYEGYEVESSLEDASFEKAAAEEARSLEATCEKLNRSNSELEDEILCLEKDLKEEKSKHSQQDELMADISKSIQSLEDESKSLKSQIAEAKIICKTFKMSEERRAIAIKDALNENSQLQTSHKQLFQQEAEVWKGQVSELNKQKITFEDSKVHAEQVLNDKENHIKTLTGHLPMMKDQAAVLEEDTTDDDNLELEVNSQWENGANLDDPLKGALKKLIHAAKLNVSLKSLEGERNHIIIQLSEVDKTKEELTEHIKNLQTQQASLQSENIYFESENQKLQQKLKIMTEFYQENEMKLYRKLTVEENYRIEEEEKLSRVEEKLSRATEQLETYRKLAKDLEEELERTVHFYQKQVISYEKRGHDNWLAARTAERNLSDLRKENAHNKQKLTETELKFELLEKDPNALDVSNTAFGREHAPNGPAPLGQRSSETRAFLSPQTLLEDPLGLSPVLPEGGGRGPRGPGNPLDHQITNERGEPSCDRLTDPHRAPSDTGSLSSPVEQDCKMMFPPPGQSYPDSALPPQREDRFYSNSERLSGSAEPRSFKMTSLDKMDGSMPSEMESSRNDAKDDLGNLNVPDSSLPAENEATGPGFIPPPLAPVRGPLFPVDTRGPFMRRGPPFPPPPPGTMFGASRGYFPPRDFPGPPHAPFAMRNIYPPRGLPPYFHPRPGFYPNPAF

SEQ ID NO: 2155 - DNA, 2955 bp, Homo sapiens
ggatctctctcggctgcttttttccactggtaacttctgaggctgagatcagcagctgatagaaccatggcgaccattgctgctgctgcgtttgaggccctcatggatggagtgacatgctgggatgtccccagaggccccatccccagtgaactccttcttattggagaagccgccttccccgtgatggtgaatgacaagggccaggtgctcattgctgcctcctcctacggccgaggccgcctcgtggttgtgtcccatgagggctacctgtcgcatgctggcttggctccatttctcctcaatgcagtgagctggctctgtccctgtcctggggctcccgtgggagtgcatccatccctggcacctctagtaaacatcctacaggatgctgggcttgaggcacaggtcaagccagaaccaggagagcccctaggggtttactgtatcaatgcctacaatgacaccttgactgcaacgctgatccagtttgtgaaacatggagggggcttgttaatcgggggccaggcctggtactgggccagccagcacggccctgacaaggtgctctccaggttccctgggaacaaggtgacaagtgtagccggagtgtacttcactgacacctatggggacagagaccggttcaaggtctctaagaaggtgcccaagatcccactccatgtcaggtatggggaggatgtcaggcaggaccagcagcagctcctggaggggatctcagagctggacatcaggacagggggagtcccctcacagctgcttgtacatggagccctggccttccctctggggctggatgcctcactcaactgcttcctggcggctgctcactatggccggggccgggtggtcctggctgcccacgagtgcctgctctgtgctcccaagatggggcccttcttgctcaatgcggtgcgctggctggccagaggccagacaggcaaagttggggtgaacacaaatctaaaagatctgtgtcctctcctatcggagcatggcctgcaatgcagcctggagccccatctgaacagcgacttgtgtgtctactgctgcaaggcgtacagtgacaaggaggctaagcagctgcaggagtttgtggctgagggtggggggctgctgattgggggccaggcctggtggtgggcctcccagaaccctggccactgccccttggctggcttccctggtaacatcatcctcaactgctttggcctcagcatcctgcctcagactctcaaagcaggctgcttccccgttcccacccctgagatgagaagctaccacttccgcaaggcgctctctcaattccaggctatactgaaccacgagaatgggaacttggaaaagagctgtctggcaaagttgagagttgatggtgcagccttcctacagattcctgcggagggggtccctgcttacatatccctgcacaggctcctgaggaagatgctacgagggtctggcctcccagctgtgagccgggaaaatccagttgccagtgactcctatgaggctgcggtgctctccctggccactgggctggctcactctggaactgactgctcccagctggcccaggggcttggcacctggacctgctcctccagtttgtacccctcaaaacaccccatcaccgtggagatcaatggaatcaacccaggcaacaatgattgctgggtgagtaccgggctctacctcctggaaggacaaaatgcagaagtctcactgtctgaagctgctgcctctgctggcctgagggtacagataggctgccacaccgatgaccttaccaaggccaggaagctatctcgagcccccgtggtgactcaccaatgctggatggacaggactgagcggtcagtctcctgcctctggggcggcctcctctacgtcatcgtgcccaagggcagccaactaggccctgtgcctgtcactatcaggggagctgtgcctgccccatactacaagctgggtaagacatcgctggaggagtggaagaggcagatgcaggagaacctggctccctggggagagctggccacggacaacatcatcctgacagtgccaaccacaaaccttcaggccctgaaggaccccgagcctgtgctccgcctctgggatgagatgatgcaggctgtggccaggctggcggctgagcccttccctttccgccgtcctgagaggattgtggctgatgtgcagatctcagctggctggatgcattcaggataccccatcatgtgccacctggagtctgtgaaggagatcatcaatgagatggacatgaggagcaggggtgtgtggggccccatccatgagctgggccacaaccaacagcggcatggatgggagttccccccacacactactgaggccacctgtaacctttggtcagtctacgtgcatgaaacagtcctggggatccccagggctcaggcccacgaggctctgagccctccagagcgggagaggagaatcaaggcccacctgggaaagggagcccccctgtgtgactggaatgtatggacagccctggaaacatatctacaggtactgagcagaaattctgggagaaggggatgaccagacccctcagtcatgtagcgacctggatcccagtagccctccacctccttcgccactccaccagcctggacctccacctcccctggaaatgagagggactgggccgcagggtggtgcttcttgggttatacccctctaaggcagagagaatggcacctgtctcactcaccttctgattttgcaatgtaagaggaaatgaaaaatattatgaaaaaaatagaaatatagcatattattcaagggcagaaactctgttagacattcctgcagctgaatcacagctcttgccctcattggttttgttcttggtctcctaataagtgttccataaatggtcattgctttgtt

SEQ ID NO: 2156 - protein, 845 aa, Homo sapiens
MATIAAAAFEALMDGVTCWDVPRGPIPSELLLIGEAAFPVMVNDKGQVLIAASSYGRGRLVVVSHEGYLSHAGLAPFLLNAVSWLCPCPGAPVGVHPSLAPLVNILQDAGLEAQVKPEPGEPLGVYCINAYNDTLTATLIQFVKHGGGLLIGGQAWYWASQHGPDKVLSRFPGNKVTSVAGVYFTDTYGDRDRFKVSKKVPKIPLHVRYGEDVRQDQQQLLEGISELDIRTGGVPSQLLVHGALAFPLGLDASLNCFLAAAHYGRGRVVLAAHECLLCAPKMGPFLLNAVRWLARGQTGKVGVNTNLKDLCPLLSEHGLQCSLEPHLNSDLCVYCCKAYSDKEAKQLQEFVAEGGGLLIGGQAWWWASQNPGHCPLAGFPGNIILNCFGLSILPQTLKAGCFPVPTPEMRSYHFRKALSQFQAILNHENGNLEKSCLAKLRVDGAAFLQIPAEGVPAYISLHRLLRKMLRGSGLPAVSRENPVASDSYEAAVLSLATGLAHSGTDCSQLAQGLGTWTCSSSLYPSKHPITVEINGINPGNNDCWVSTGLYLLEGQNAEVSLSEAAASAGLRVQIGCHTDDLTKARKLSRAPVVTHQCWMDRTERSVSCLWGGLLYVIVPKGSQLGPVPVTIRGAVPAPYYKLGKTSLEEWKRQMQENLAPWGELATDNIILTVPTTNLQALKDPEPVLRLWDEMMQAVARLAAEPFPFRRPERIVADVQISAGWMHSGYPIMCHLESVKEIINEMDMRSRGVWGPIHELGHNQQRHGWEFPPHTTEATCNLWSVYVHETVLGIPRAQAHEALSPPERERRIKAHLGKGAPLCDWNVWTALETYLQVLSRNSGRRG

SEQ ID NO: 2157 - DNA, 3172 bp, Homo sapiens
taattcatttaattatgaatggtctaccaagagacagataatagaagagtgtatgtaaaagtatgaccctttcttatatgtttcttgcatgctgtgtacaagaaactcacttgaaatttaccaatacagggcaggccaaattaacaggatgaaaaaagatatattacacaaacattaatgaaaggaaagcaagagtgcctgtatgtatatcagataaagcaaagaaaattaccagaaacagattatataatgatcaaaggtttaattcatgaagaagacagcaattttaaaagtgtattcaccaaaaaataaagcttcaaaatatgtgatgtgaaaactgccagaactaaggcgggccgggctcagaccagcgctgcctcaggatgtgaagtgtaacaagagggccaggggaggtggtgggggacaacatgggcctgtgaggcctgtgggtgcccgcgttccccagctccccccgcagcccgctccacagtggtccgctccggttggttgtcacgtgcgcattcgggttccagacccaaggctgcgtgttctccaccgcttgttgtggccagtgttactgcggtgaccgccagagcagcctcgacgctatggaggagcctggtgctacccctcagccctacctggggctggtcctggaggagctacgcagagttgtggcagcactacctgagagtatgagaccagatgagaatccttatggttttccatcggaactggtggtatgtgcagctgttattggattttttgttgttctcctttttttgtggagaagttttagatcggttaggagtcggctttacgtgggaagagagcaaaaacttggtgcaacgctttctggactaattgaagaaaaatgtaaactacttgaaaagtttagccttattcaaaaagagtatgaaggctatgaagtagagtcatctttagaggatgccagctttgagaaggcggcagcagaagaagcacgaagtttggaggcaacctgtgaaaagctgaacaggtccaattctgaacttgaggatgaaatcctctgtctagaaaaagacttaaaagaagagaaatctaaacattctcaacaagatgaattgatggcggatatttcaaaaagtatacagtctctagaagatgagtcaaaatccctcaaatcacaaatagctgaagccaaaatcatctgcaagacatttaaaatgagtgaagaacgacgggctatagcaataaaagatgctttgaatgaaaattctcaacttcagacaagccataaacagctttttcagcaagaagctgaagtatggaaaggagaagtgagtgaacttaataaacagaaaataacatttgaagactccaaagtacacgcagaacaagttctgaatgataaagaaaatcacatcaagaccctgactggacacttgccaatgatgaaagatcaggctgctgtgcttgaagaagacacaacggatgatgataacctggaattagaagtgaacagtcaatgggaaaatggtgctaacttagatgatcctctgaaaggagctttgaagaaactgattcatgctgctaagttaaatgtttctttaaaaagcttagaaggagaaagaaaccacattattattcagttatctgaagtggacaaaacaaaggaagagcttacagagcatattaaaaatcttcagactcaacaagaatctttgcaatcagaaaacatatattttgaaagtgagaatcagaagcttcaacagaaacttaaaataatgactgaattctatcaagaagatgaaatgaaactctataggaaattaacagtggaggaaaattaccgaatagaggaagaagagaagctttctaaagtggaagaaaagctcagccgtgccactgaacagctggagacctatagaaagctagccaaagatcttgaagaagaattggagagaactgttcatttttatcaaaagcaggttatttcctacgagaaaagaggacatgataattggttggcagctcggactgctgaaagaaacctcagtgatttaaggaaagaaaatgctcacaacaaacaaaaattaactgaaacagagttgaaatttgaacttttagaaaaagatcctaatgcacttgatgtttcaaatacagcatttggcagagagcatgccccgaatggtcccgcaccattgggtcagcgttcatctgaaacgagagcttttctctctcctcaaactttgttggaggatccactgggactctcacctgtgcttccggagggaggaggaagaggcccaagaggcccagggaatcccctggaccatcagattaccaatgaaagaggagaaccaagctgtgacaggttaaccgatcctcacagggctccttctgacactgggtccctgtcatctccggtggaacaggactgtaagatgatgtttcctccaccaggacaatcatatcctgattcagctcttcctcctcaaagggaagacagattttattctaattctgaaagactgtctggatcagcagaacccagaagttttaaaatgacttctttggataaaatggatgggtcaatgccttcagaaatggaatccagtagaaatgatgccaaagatgatcttggtaatttaaatgtgcctgattcatctctccctgctgaaaatgaagcaactggccctggctttattcctccacctcttgctccagtcagaggaccattgtttccagtggatacaaggggcccgttcatgagaagaggacctcctttccccccacctcctccaggaaccatgtttggagcttctcgaggttattttccaccaagggatttcccaggtccaccacatgctccatttgcaatgagaaacatctacccaccgaggggtttacctccttactttcacccgagacctggattttaccccaaccccgcattctgaaggtagaagcgagttcccttcaggattgattccgcctttaatgctactgaacatccaggaccacaaaagaaacctgacaatattgttgctttcttcaaaagtaattttgactgatctcattttcagtttaagtaactgctattacttaagtgattgcacttttgctcaaattgaagtttaatggaattataattctcaggatagtattttgtaaataaagatgttttaaa

SEQ ID NO: 2158 - protein, 777 aa, Homo sapiens
MEEPGATPQPYLGLVLEELRRVVAALPESMRPDENPYGFPSELVVCAAVIGFFVVLLFLWRSFRSVRSRLYVGREQKLGATLSGLIEEKCKLLEKFSLIQKEYEGYEVESSLEDASFEKAAAEEARSLEATCEKLNRSNSELEDEILCLEKDLKEEKSKHSQQDELMADISKSIQSLEDESKSLKSQIAEAKIICKTFKMSEERRAIAIKDALNENSQLQTSHKQLFQQEAEVWKGEVSELNKQKITFEDSKVHAEQVLNDKENHIKTLTGHLPMMKDQAAVLEEDTTDDDNLELEVNSQWENGANLDDPLKGALKKLIHAAKLNVSLKSLEGERNHIIIQLSEVDKTKEELTEHIKNLQTQQESLQSENIYFESENQKLQQKLKIMTEFYQEDEMKLYRKLTVEENYRIEEEEKLSKVEEKLSRATEQLETYRKLAKDLEEELERTVHFYQKQVISYEKRGHDNWLAARTAERNLSDLRKENAHNKQKLTETELKFELLEKDPNALDVSNTAFGREHAPNGPAPLGQRSSETRAFLSPQTLLEDPLGLSPVLPEGGGRGPRGPGNPLDHQITNERGEPSCDRLTDPHRAPSDTGSLSSPVEQDCKMMFPPPGQSYPDSALPPQREDRFYSNSERLSGSAEPRSFKMTSLDKMDGSMPSEMESSRNDAKDDLGNLNVPDSSLPAENEATGPGFIPPPLAPVRGPLFPVDTRGPFMRRGPPFPPPPPGTMFGASRGYFPPRDFPGPPHAPFAMRNIYPPRGLPPYFHPRPGFYPNPAF

SEQ ID NO: 2159 - DNA, 4076 bp, Homo sapiens
tagcaggttgctactgccccgaacccgcgctgcagggaacagcggggcaaacagtgagtggggttcagcgtagactctggaccaggagaggcccgcggtgaccgaggcctgggccccggaaaccaatagagccatggcgactccctctgctgccttcgaggcccttatgaatggtgtgacaagctgggatgtacccgaagatgctgttccatgtgaactgcttcttattggagaggcttcatttcctgtgatggtgaatgacatgggccaggtcctcattgctgcctcctcctatggccgtggccgcctggtggtcgtgtcccatgaggactacttggtggaagcccagctcacgccctttctcctgaacgcagtggggtggctttgctcttcccctggggctcccattggtgtacacccatccctggcacctttggccaaaatcctcgagggctctggagtggatgcaaaggttgagccagaagtgaaagactccctgggggtttactgtattgatgcctacaatgaaaccatgacagaaaagctggtcaagttcatgaaatgtggtggcggcttgctcataggaggacaagcctgggattgggccaaccagggggaggatgaaagggttctgttcacgttccctgggaacctcgtgaccagtgtggctggcatttactttactgacaacaaaggggacacgagtttctttaaagtctccaagaagatgcccaagatcccagtgttggttagttgtgaagatgacctctccgacgacagagaagagcttctgcatgggatttcagagctggacatcagcaactcggattgtttcccatcccagctgctagtgcatggggctttagcctttcctctagggttagattcctaccatggctgtgttatagcggctgcccgctatggccggggccgggtggttgtgactggccataaggtattattcactgttggtaaactgggcccctttctgctcaatgctgtccgctggctggatgggggccgcagaggcaagattgtggtgcagacagagctgagaaccctgagtggcctcctcgcagtggggggcatagacaccagcatcgagcccaatctgaccagtgatgcaagtgtctactgctttgaacccgtgagtgaagtgggggtcaaggaactgcaggagtttgtagcagagggtggcgggctatttgttggagcccaagcctggtggtgggccttcaagaaccccggagtgtcccctttggctcgattcccaggaaacctcctcctcaacccctttggcatcagcattacaagccaaagcctcaatccagggccctttcgtactcctaaagcagggataaggacctatcacttccgctccaccttggccgagttccaggttataatgggcaggaagagaggaaatgtggaaaagggctggttggcaaagctgggaccagatggtgcagctttcctgcagattcccgcagaagagatccctgcctacatgtctgtgcatcgactcctgaggaagctgctaagtcgatatcggcttccagtagcaacccgagagaaccctgttatcaatgactgctgcagaggtgctatgctttccctggccacagggctggcccactctggaagcgacctctctctgttagtcccagaaattgaagatatgtacagcagcccctatctgcgcccctcagaatctcctatcaccgtcgaggtcaactgcaccaatccaggcaccagatattgctggatgagtactgggctctacatacctggaaggcaaattatagaagtctcactgcctgaagctgctgcctctgccgacctgaagatacagattggctgccacacagatgacctgaccagggccagcaagcttttccgaggcccactcgtaattaaccggtgctgcttggacaaacccacaaaatcgatcacgtgcctctggggtggactcctctatataattgtgcctcagaacagcaaactgggttctgtgcctgtcaccgtgaagggggctgtgcatgctccatactacaagctgggggagaccaccctggaggagtggaagaggcgtatccaggagaatccagggccctggggagagctggccacggacaacatcattctgaccgtgccgaccgcaaatcttcgtactctggagaaccctgagccgctgctccgcctctgggatgaggtgatgcaggctgtggcgcgactgggagctgagcccttccctttgcgcctgcctcagaggattgttgccgacgtgcagatctcagtgggctggatgcatgcagggtaccccatcatgtgccatctggagtcagtgcaggagctcatcaacgagaagctcatcagaaccaaggggctgtggggccccgtccatgagctgggccgcaaccagcagcggcaggagtgggagttcccaccacacaccaccgaggccacctgcaacctgtggtgtgtgtatgtgcatgagacggtcttgggcattcctcgaagccgtgccaatattgctctgtggcccccagttcgggagaagagagtcagaatctacctgagcaagggtcccaatgtgaaaaactggaatgcatggaccgcactggaaacgtatttacagctccaggaagcctttggttgggagccattcatccgtctcttcaccgagtacaggaaccagaccaacttgcccacagaaaatgttgacaaaatgaatctgtgggtcaagatgttctcccaccaagtgcagaagaacctggctccgttctttgaggcctgggcctggcccatccagaaggaagtggctaccagcctggcctatctgcctgaatggaaggaaaatattatgaaattgtacctcctcacacagatgccccactgaaattgaagtcaagaaatgcaaaaaggaactgacacatctcagcaaagaaaactgaagggatttggttataagtggagaggatctcagcatatttctggaagatagaaagtggatgaagcatgataatgaaagagtgaagaacctttcagataaaatgtaagctgatctgaacaacataaccccaaagagacttgcgcacctgaaaagcttgtctactgaagaattactccagttgtaagattgagccctctcctactctcccccaactcttatgcacagaacacaggcagtctccactattgataccagttaaaaatttcttgttattgttgctgttgttgtttgtataaaggaattgaacaggctgcttgcagagagataagagttggtgctccagaaaaaaatttctcttctagtggaaataagtgcccctacccccagccggtcagctaattctctactgacagctgagacctcctactcaagtgcctgttgccttcaggtatagaagaggtttcctgaagaaacagacctaactgtacaacagcagaggaaacccatgccaactgttatacaagttaacagttatgttgattcttaaatgggaatggtgagttagaaattcccagacatgggcgatggggagggaagaggaataagaaaagttacgaggtagaattaggggccttgaaaatatgacaaactctgagggaaacaaagacaatgtggaaagaataacttaattttaattccatctccagagagatttgaggtgtatttaagatgaaaaacaggatactacaaagaaacggaaaactcaggagttcaagaccagcctaggcaagatggcaacatcccgtctctacaaaataatttttaaaaattagccaagcatggtggcatgtgcctgtggtcctagctacttgggaggctgaagtgggaagatcacttgagcccaggagttcaaggcttcagtgagccatgatggtgccactgcactccagcctgggggacagagtgagaccctgtctcttaaaaagcaagaaaagaaagagaagactgagaataagaagatctctttgaaaataaaataagactgctaaaagtatttggtatacagtctggaaaataaagttgagggaatctctccagataaagagcaaaaagaaatagatag

SEQ ID NO: 2160 - protein, 921 aa, Homo sapiens
MATPSAAFEALMNGVTSWDVPEDAVPCELLLIGEASFPVMVNDMGQVLIAASSYGRGRLVVVSHEDYLVEAQLTPFLLNAVGWLCSSPGAPIGVHPSLAPLAKILEGSGVDAKVEPEVKDSLGVYCIDAYNETMTEKLVKFMKCGGGLLIGGQAWDWANQGEDERVLFTFPGNLVTSVAGIYFTDNKGDTSFFKVSKKMPKIPVLVSCEDDLSDDREELLHGISELDISNSDCFPSQLLVHGALAFPLGLDSYHGCVIAAARYGRGRVVVTGHKVLFTVGKLGPFLLNAVRWLDGGRRGKIVVQTELRTLSGLLAVGGIDTSIEPNLTSDASVYCFEPVSEVGVKELQEFVAEGGGLFVGAQAWWWAFKNPGVSPLARFPGNLLLNPFGISITSQSLNPGPFRTPKAGIRTYHFRSTLAEFQVIMGRKRGNVEKGWLAKLGPDGAAFLQIPAEEIPAYMSVHRLLRKLLSRYRLPVATRENPVINDCCRGAMLSLATGLAHSGSDLSLLVPEIEDMYSSPYLRPSESPITVEVNCTNPGTRYCWMSTGLYIPGRQIIEVSLPEAAASADLKIQIGCHTDDLTRASKLFRGPLVINRCCLDKPTKSITCLWGGLLYIIVPQNSKLGSVPVTVKGAVHAPYYKLGETTLEEWKRRIQENPGPWGELATDNIILTVPTANLRTLENPEPLLRLWDEVMQAVARLGAEPFPLRLPQRIVADVQISVGWMHAGYPIMCHLESVQELINEKLIRTKGLWGPVHELGRNQQRQEWEFPPHTTEATCNLWCVYVHETVLGIPRSRANIALWPPVREKRVRIYLSKGPNVKNWNAWTALETYLQLQEAFGWEPFIRLFTEYRNQTNLPTENVDKMNLWVKMFSHQVQKNLAPFFEAWAWPIQKEVATSLAYLPEWKENIMKLYLLTQMPH

SEQ ID NO: 2161 - DNA, 954 bp, Homo sapiens
atggaaatagataaccagacgtgggtgagagaatttattctccttggcttatccagtgactggtgcactcagatatccctgttttccctgttcttggtcacatacctcatgacagtgctggggaactgtctcattgtccttctgatcagactggacagccgactccacactcccatgtatttctttctcaccaacctctcccttgtcgatgtctcctatgccacaagcgtagtcccccagctgctggcacattttcttgcagaacataaagccatcccattccagagctgtgcagcccagttatttttctccctggccttgggtgggattgagtttgttctcctggcagtgatggcctatgaccgccatgtggctgtgtctgaccgcctgcgatactcggccatcatgcatggagggctgtgtgctaggttggccatcacatcctgggtcagtggctccatcaactctcttgtgcagactgctatcacctttcagctgcccatgtgcactaacaagtttattgatcacatatcctgtgaactcctagctgtggtcaggctggcttgtgtggacacctcctccaatgaggctgccatcatggtgtctagcattgttcttctgatgacacctttctgcctggttctgttgtcctacatccggatcatctccaccatcctaaagatccagtccagagaaggaagaaagaaagccttccacacgtgtgcctctcacctcacggtggttgccctgtgctacggcacaacgattttcacttacatccagccccactctggtccctcagtccttcaagagaagctgatctctgtcttctatgccattgttatgcctctgctgaaccctgtgatttatagtctaaggaataaagaggtgaagggggcctggcataaactattagagaaattctctgggttaacatccaagctgggaacttga

SEQ ID NO: 2162 - protein, 317 aa, Homo sapiens
MEIDNQTWVREFILLGLSSDWCTQISLFSLFLVTYLMTVLGNCLIVLLIRLDSRLHTPMYFFLTNLSLVDVSYATSVVPQLLAHFLAEHKAIPFQSCAAQLFFSLALGGIEFVLLAVMAYDRHVAVSDRLRYSAIMHGGLCARLAITSWVSGSINSLVQTAITFQLPMCTNKFIDHISCELLAVVRLACVDTSSNEAAIMVSSIVLLMTPFCLVLLSYIRIISTILKIQSREGRKKAFHTCASHLTVVALCYGTTIFTYIQPHSGPSVLQEKLISVFYAIVMPLLNPVIYSLRNKEVKGAWHKLLEKFSGLTSKLGT

SEQ ID NO: 2163 - DNA, 3154 bp, Homo sapiens
agtttcctccccagcagcgcctgacacaggtgggaatgacagtttgctgcagtcccgtcaatgggggaatctgcccgagctctgcctgcattttgagcagcaaagcagctccagccaccaagaccgttgcctgcgctgtcttaggccagcccatgctgtctgccagccgcttgttgcgctgccttggggactgggaacacacccagccccggtccccatctgttgcagacatgcagtggcagcagctcggagcacagccgaaccctagaaattgcctgtgctgaaggggctgggaaaccccttctctgatggacctttcgagtgaggcagcaggatttgtcagagctgggagtgccgcccgtccccgtcactcgcatcctgccatccagcagcttacaagcctgcactgcttattagcatctggaagagaagacctccaggaccccttggggctgagacctgagctccttcgccatgccgctcctggacggagacctggagggttccggaaagcattcctctcgaaaggtggacagccccttcggcccgggcagcccctccaaagggttcttctccagaggcccccagccccggccctccagccccatgtctgcacctgtgaggcccaagaccagccccggctctcccaaaaccgtgttcccgttctcctaccaggagtccccgccacgctcccctcgacgcatgagcttcagtgggatcttccgctcctcctccaaagagtcttcccccaactccaaccctgctacctcgcccgggggcatcaggtttttctcccgctccagaaaaacctccggcctctcctcctctccgtcaacacccacccaagtgaccaagcagcacacgtttcccctggaatcctataagcacgagcctgaacggttagagaatcgcatctatgcctcgtcttcccccccggacacagggcagaggttctgcccgtcttccttccagagcccgaccaggcctccactggcatcaccgacacactatgctccctccaaagccgcggcgctggcggcggccctgggacccgcggaagccggcatgctggagaagctggagttcgaggacgaagcagtagaagactcagaaagtggtgtttacatgcgattcatgaggtcacacaagtgttatgacatcgttccaaccagttcaaagcttgttgtctttgatactacattacaagttaaaaaggccttctttgctttggtagccaacggtgtccgagcagcgccactgtgggagagtaaaaaacaaagttttgtaggaatgctaacaattacagatttcataaatatactacatagatactataaatcacctatggtacagatttatgaattagaggaacataaaattgaaacatggagggagctttatttacaagaaacatttaagcctttagtgaatatatctccagatgcaagcctcttcgatgctgtatactccttgatcaaaaataaaatccacagattgcccgttattgaccctatcagtgggaatgcactttatatacttacccacaaaagaatcctcaagttcctccagctttttatgtctgatatgccaaagcctgccttcatgaagcagaacctggatgagcttggaataggaacgtaccacaacattgccttcatacatccagacactcccatcatcaaagccttgaacatatttgtggaaagacgaatatcagctctgcctgttgtggatgagtcaggaaaagttgtagatatttattccaaatttgatgtaattaatcttgctgctgagaaaacatacaataacctagatatcacggtgacccaggcccttcagcaccgttcacagtattttgaaggtgttgtgaagtgcaataagctggaaatactggagaccatcgtggacagaatagtaagagctgaggtccatcggctggtggtggtaaatgaagcagatagtattgtgggtattatttccctgtcggacattctgcaagccctgatcctcacaccagcaggtgccaaacaaaaggagacagaaacggagtgaccgccgtgaatgtagacgccctaggaggagaacttgaacaaagtctctgggtcacgttttgcctcatgaacactggctgcaagtggttaagaatgtatatcagggtttaacaataggtatttcttccagtgatgttgaaattaagcttaaaaaagaaagattttatgtgcttgaagattcaggcttgcattaaaagactgttttcagacctttgtctgaaggattttaaatgctgtatgtcattaaagtgcactgtgtcctgaagttttcattatttttcatttcaaagaattcactggtatggaacaggtgatgtggcataaggtgagtgcacggtatgttcagatcacagtgccttatgtccgaatacagcaatatgtcaccgccgcagccggggcgcacgcgtgtgaaacaacaccgagcttgaatgtggaagtctttgaaccttttaccaaatcagtttgttttctttagatttgtcaaaaagttgtaatttgaatataaataattactttaaaattgtaatgacacttttacacgtaagtgttttgttctgggctaccgtgtcaacgaggctgctttacaacagctttatttatttttactttcatgcaatttttttacacatcttttggtggagtaaacttcaccacatccatgaataaactctcagttattttgaaatggcaaatttctcattatttaagtttggatctggaaaggacatgacttctgaaatagccgctgctgggttttaaaagctgaggtctctcaaagtgtggaggagacgttgccgtcaggcgggagccaagtgccgggaagatgtctattttttttcttgtgtattgaaatgtaaaatcatgatgtttgttatgactgctgatgcgattgtttttgtaaattttattgtggcatatacagtattgtcatacagttgaagagaaacaatgtttcctaatgtaagtgctctgaaaatgttgacactgtatatatatatatgaggatagtttgttttttttttgttttgggtttttttttttcagattgaaaaattaaaatagatcctactatctaccattttgttaaaaaaaaaaaaaaaaaa

SEQ ID NO: 2164 - protein, 525 aa, Homo sapiens
MPLLDGDLEGSGKHSSRKVDSPFGPGSPSKGFFSRGPQPRPSSPMSAPVRPKTSPGSPKTVFPFSYQESPPRSPRRMSFSGIFRSSSKESSPNSNPATSPGGIRFFSRSRKTSGLSSSPSTPTQVTKQHTFPLESYKHEPERLENRIYASSSPPDTGQRFCPSSFQSPTRPPLASPTHYAPSKAAALAAALGPAEAGMLEKLEFEDEAVEDSESGVYMRFMRSHKCYDIVPTSSKLVVFDTTLQVKKAFFALVANGVRAAPLWESKKQSFVGMLTITDFINILHRYYKSPMVQIYELEEHKIETWRELYLQETFKPLVNISPDASLFDAVYSLIKNKIHRLPVIDPISGNALYILTHKRILKFLQLFMSDMPKPAFMKQNLDELGIGTYHNIAFIHPDTPIIKALNIFVERRISALPVVDESGKVVDIYSKFDVINLAAEKTYNNLDITVTQALQHRSQYFEGVVKCNKLEILETIVDRIVRAEVHRLVVVNEADSIVGIISLSDILQALILTPAGAKQKETETE

SEQ ID NO: 2165 - DNA, 3423 bp, Homo sapiens
gcggccgcccgtagcctaattgcgcagagggctcgccttgcacctcctcttcccccgccgccctccctctcgcccagaaaggaggacggacccagctgcaggctccgagctggtttattctgcggccgaggattacatttatgcacgaacgggcttactggttccagattccccacttgggcacaggcataggaggcttgttttccaaattgctggttttaattgcacctgcctttcagattacctctgggaatctgtgggaggagccgagagggtggaaaatgtttcttagctttgcaaaaggaagaaaactttgtcacccagcgggagacctcagccacgagtaacccggggagacaccagaaccgggacgggctttgactgatttgcctacgagggttccgtaggaaaggacgcttgaattcggcgcttcggcggcggcggcggccgcgcgagttccctgctcaccctccctctccgcggaagtccccacgaggtggcttcagggtgtaacagagcgcgcggctccagtccgaaggcagcggccgggggagggaaggaggggaccgaacccccgaggagtttcgcagaatcaacttctggttagagttatgggaagcgcggttatggacaccaagaagaaaaaagatgtttccagccccggcgggagcggcggcaagaaaaatgccagccagaagaggcgttcgctgcgcgtgcacattccggacctgagctccttcgccatgccgctcctggacggagacctggagggttccggaaagcattcctctcgaaaggtggacagccccttcggcccgggcagcccctccaaagggttcttctccagaggcccccagccccggccctccagccccatgtctgcacctgtgaggcccaagaccagccccggctctcccaaaaccgtgttcccgttctcctaccaggagtccccgccacgctcccctcgacgcatgagcttcagtgggatcttccgctcctcctccaaagagtcttcccccaactccaaccctgctacctcgcccgggggcatcaggtttttctcccgctccagaaaaacctccggcctctcctcctctccgtcaacacccacccaagtgaccaagcagcacacgtttcccctggaatcctataagcacgagcctgaacggttagagaatcgcatctatgcctcgtcttcccccccggacacagggcagaggttctgcccgtcttccttccagagcccgaccaggcctccactggcatcaccgacacactatgctccctccaaagccgcggcgctggcggcggccctgggacccgcggaagccggcatgctggagaagctggagttcgaggacgaagcagtagaagactcagaaagtggtgtttacatgcgattcatgaggtcacacaagtgttatgacatcgttccaaccagttcaaagcttgttgtctttgatactacattacaagttaaaaaggccttctttgctttggtagccaacggtgtccgagcagcgccactgtgggagagtaaaaaacaaagttttgtaggaatgctaacaattacagatttcataaatatactacatagatactataaatcacctatggtacagatttatgaattagaggaacataaaattgaaacatggagggagctttatttacaagaaacatttaagcctttagtgaatatatctccagatgcaagcctcttcgatgctgtatactccttgatcaaaaataaaatccacagattgcccgttattgaccctatcagtgggaatgcactttatatacttacccacaaaagaatcctcaagttcctccagctttttatgtctgatatgccaaagcctgccttcatgaagcagaacctggatgagcttggaataggaacgtaccacaacattgccttcatacatccagacactcccatcatcaaagccttgaacatatttgtggaaagacgaatatcagctctgcctgttgtggatgagtcaggaaaagttgtagatatttattccaaatttgatgtaattaatcttgctgctgagaaaacatacaataacctagatatcacggtgacccaggcccttcagcaccgttcacagtattttgaaggtgttgtgaagtgcaataagctggaaatactggagaccatcgtggacagaatagtaagagctgaggtccatcggctggtggtggtaaatgaagcagatagtattgtgggtattatttccctgtcggacattctgcaagccctgatcctcacaccagcaggtgccaaacaaaaggagacagaaacggagtgaccgccgtgaatgtagacgccctaggaggagaacttgaacaaagtctctgggtcacgttttgcctcatgaacactggctgcaagtggttaagaatgtatatcagggtttaacaataggtatttcttccagtgatgttgaaattaagcttaaaaaagaaagattttatgtgcttgaagattcaggcttgcattaaaagactgttttcagacctttgtctgaaggattttaaatgctgtatgtcattaaagtgcactgtgtcctgaagttttcattatttttcatttcaaagaattcactggtatggaacaggtgatgtggcataaggtgagtgcacggtatgttcagatcacagtgccttatgtccgaatacagcaatatgtcaccgccgcagccggggcgcacgcgtgtgaaacaacaccgagcttgaatgtggaagtctttgaaccttttaccaaatcagtttgttttctttagatttgtcaaaaagttgtaatttgaatataaataattactttaaaattgtaatgacacttttacacgtaagtgttttgttctgggctaccgtgtcaacgaggctgctttacaacagctttatttatttttactttcatgcaatttttttacacatcttttggtggagtaaacttcaccacatccatgaataaactctcagttattttgaaatggcaaatttctcattatttaagtttggatctggaaaggacatgacttctgaaatagccgctgctgggttttaaaagctgaggtctctcaaagtgtggaggagacgttgccgtcaggcgggagccaagtgccgggaagatgtctattttttttcttgtgtattgaaatgtaaaatcatgatgtttgttatgactgctgatgcgattgtttttgtaaattttattgtggcatatacagtattgtcatacagttgaagagaaacaatgtttcctaatgtaagtgctctgaaaatgttgacactgtatatatatatatgaggatagtttgttttttttttgttttgggtttttttttttcagattgaaaaattaaaatagatcctactatctaccattttgttaaaaaaaaaaaaaaaaaa

SEQ ID NO: 2166 - protein, 569 aa, Homo sapiens
MGSAVMDTKKKKDVSSPGGSGGKKNASQKRRSLRVHIPDLSSFAMPLLDGDLEGSGKHSSRKVDSPFGPGSPSKGFFSRGPQPRPSSPMSAPVRPKTSPGSPKTVFPFSYQESPPRSPRRMSFSGIFRSSSKESSPNSNPATSPGGIRFFSRSRKTSGLSSSPSTPTQVTKQHTFPLESYKHEPERLENRIYASSSPPDTGQRFCPSSFQSPTRPPLASPTHYAPSKAAALAAALGPAEAGMLEKLEFEDEAVEDSESGVYMRFMRSHKCYDIVPTSSKLVVFDTTLQVKKAFFALVANGVRAAPLWESKKQSFVGMLTITDFINILHRYYKSPMVQIYELEEHKIETWRELYLQETFKPLVNISPDASLFDAVYSLIKNKIHRLPVIDPISGNALYILTHKRILKFLQLFMSDMPKPAFMKQNLDELGIGTYHNIAFIHPDTPIIKALNIFVERRISALPVVDESGKVVDIYSKFDVINLAAEKTYNNLDITVTQALQHRSQYFEGVVKCNKLEILETIVDRIVRAEVHRLVVVNEADSIVGIISLSDILQALILTPAGAKQKETETE

SEQ ID NO: 2167 - DNA, 2248 bp, Homo sapiens
aggcccctcctcccggcggcgcggcagagccaggccccagcgctcggccggccgcgagcccgccggccggggacgagcgtcgcagctcatgctgatcgctgtcctcctcctccccctcaggcggcgctggcggcggccctgggacccgcggaagccggcatgctggagaagctggagttcgaggacgaagcagtagaagactcagaaagtggtgtttacatgcgattcatgaggtcacacaagtgttatgacatcgttccaaccagttcaaagcttgttgtctttgatactacattacaagttaaaaaggccttctttgctttggtagccaacggtgtccgagcagcgccactgtgggagagtaaaaaacaaagttttgtaggaatgctaacaattacagatttcataaatatactacatagatactataaatcacctatggtacagatttatgaattagaggaacataaaattgaaacatggagggagctttatttacaagaaacatttaagcctttagtgaatatatctccagatgcaagcctcttcgatgctgtatactccttgatcaaaaataaaatccacagattgcccgttattgaccctatcagtgggaatgcactttatatacttacccacaaaagaatcctcaagttcctccagctttttatgtctgatatgccaaagcctgccttcatgaagcagaacctggatgagcttggaataggaacgtaccacaacattgccttcatacatccagacactcccatcatcaaagccttgaacatatttgtggaaagacgaatatcagctctgcctgttgtggatgagtcaggaaaagttgtagatatttattccaaatttgatgtaattaatcttgctgctgagaaaacatacaataacctagatatcacggtgacccaggcccttcagcaccgttcacagtattttgaaggtgttgtgaagtgcaataagctggaaatactggagaccatcgtggacagaatagtaagagctgaggtccatcggctggtggtggtaaatgaagcagatagtattgtgggtattatttccctgtcggacattctgcaagccctgatcctcacaccagcaggtgccaaacaaaaggagacagaaacggagtgaccgccgtgaatgtagacgccctaggaggagaacttgaacaaagtctctgggtcacgttttgcctcatgaacactggctgcaagtggttaagaatgtatatcagggtttaacaataggtatttcttccagtgatgttgaaattaagcttaaaaaagaaagattttatgtgcttgaagattcaggcttgcattaaaagactgttttcagacctttgtctgaaggattttaaatgctgtatgtcattaaagtgcactgtgtcctgaagttttcattatttttcatttcaaagaattcactggtatggaacaggtgatgtggcataaggtgagtgcacggtatgttcagatcacagtgccttatgtccgaatacagcaatatgtcaccgccgcagccggggcgcacgcgtgtgaaacaacaccgagcttgaatgtggaagtctttgaaccttttaccaaatcagtttgttttctttagatttgtcaaaaagttgtaatttgaatataaataattactttaaaattgtaatgacacttttacacgtaagtgttttgttctgggctaccgtgtcaacgaggctgctttacaacagctttatttatttttactttcatgcaatttttttacacatcttttggtggagtaaacttcaccacatccatgaataaactctcagttattttgaaatggcaaatttctcattatttaagtttggatctggaaaggacatgacttctgaaatagccgctgctgggttttaaaagctgaggtctctcaaagtgtggaggagacgttgccgtcaggcgggagccaagtgccgggaagatgtctattttttttcttgtgtattgaaatgtaaaatcatgatgtttgttatgactgctgatgcgattgtttttgtaaattttattgtggcatatacagtattgtcatacagttgaagagaaacaatgtttcctaatgtaagtgctctgaaaatgttgacactgtatatatatatatgaggatagtttgttttttttttgttttgggtttttttttttcagattgaaaaattaaaatagatcctactatctaccattttgttaaaaaaaaaaaaaaaaaa

SEQ ID NO: 2168 - protein, 328 aa, Homo sapiens
MLEKLEFEDEAVEDSESGVYMRFMRSHKCYDIVPTSSKLVVFDTTLQVKKAFFALVANGVRAAPLWESKKQSFVGMLTITDFINILHRYYKSPMVQIYELEEHKIETWRELYLQETFKPLVNISPDASLFDAVYSLIKNKIHRLPVIDPISGNALYILTHKRILKFLQLFMSDMPKPAFMKQNLDELGIGTYHNIAFIHPDTPIIKALNIFVERRISALPVVDESGKVVDIYSKFDVINLAAEKTYNNLDITVTQALQHRSQYFEGVVKCNKLEILETIVDRIVRAEVHRLVVVNEADSIVGIISLSDILQALILTPAGAKQKETETE

SEQ ID NO: 2169 - DNA, 1861 bp, Homo sapiens
tgagggccgagccccgcgccggcttcgctgtagtccgcagcccccggcggctttgtgggcgcagcacgctcctcagccgcccgcccacctgggcctgggccccggttgtttccctgcggtggctgtggtcgttcccgttccagggtctcgagcgcaccgccccttcgctgcgctgttagtcgagggcagttttctgggggatcccccgatccccccgcgccgctcaggcgtcttggctcgcggaagcgcaggcgccgactgcctggcgtcgtccgtgactcctggcccttctctgtggatccctttgcttctcgttgcgggttgtgtttcctgcttcgtgggcctggccgtttgcgtttggatgcaggcccgggtgagccctgcgtggcccgctggccttttcctgctccctaggtgactgagccgcgtgtgtgacacatcggagtgaattgaggcaacgcgttcctttccaggcttgcagcgggcggtgtcgttcacgctcctgagcagagccttccggtgctttactcgacgccacaaatagtgcagggttcctcccaggggctgtcgcgagctagaactcttccccgcccctgtgagctcgggctgttcttcctcctccgcgtggctcactccagcctcggatgtttcctcgctgcacagacctgctcgggaagactcgagaaggccaccccaggactccagctctccccggaagggcttcccctcggattgcgtcttggcccctggaaccctccctctgtatcctctgctgttcctctcttggcctccatttgggttgtggcctggatactctggctcgctgcttcccttctcttaaggatcacagccctgcactgcctgtcgtccggtgcctggaaaccattgtattttttggtctgattttgtagttgtttgagaacttaagtctggtccctcacactccatgcccagaagcagaaatgagtaaagtttgttttatcttttcttaatatgacaattattgtgttggttcaacttatgttgtactttaattagaagaaatttggccgaaaatacaaggaaaatatacaaatgcaagtaattttttttaaacttccctgaaagcagggtctaaagaaattaccaaccaacttagactggatctagaagaaaaggaagggtctttgcagtcttaggactcttccgttccgcgacgtaggtgttaggataacagccataaatggttgtaagactttgggctcagataagtagacttaagttcaaattttgacttattttacaagtgtgtgatttttggcaagctcatcttcctaaaccatgagctccttatttgtaaaggggacattagccactctccagcaacagccctggtacttcttcagtcctgggatgggacgtatgattagcctaagcgaaccagaaaatccaggcccgtgaccagtgacttgatcagggctggcgatatatctaggtaggccaaccaggtggactcagtatttttgtgggtgctactggaaaatttatttaattctaactgaatgtagaaccagcaacagacatgaaatggcagttgtattgctgtcttatcatgaggtgagggcctgaagctatggtagccaccctgtgaaccttggaaggagggttctacaggaactggcagagctgagactgggacgcaacccatgtcctggtgacgtatttgagtcctgaggctggccctcctgttagtcttttctcttactggcttcagccagatggggtctggttttctgttacttgcaacaggaaaaattggaatgatatctatgcatgctattaccgccttatggctgtggtgagattaaaacatgatactgtg

SEQ ID NO: 2170 - protein, 88 aa, Homo sapiens
MFPRCTDLLGKTREGHPRTPALPGRASPRIASWPLEPSLCILCCSSLGLHLGCGLDTLARCFPSLKDHSPALPVVRCLETIVFFGLIL

SEQ ID NO: 2171 - DNA, 1757 bp, Homo sapiens
gagcgcggaggcgggcgttgctacggcaacggtgggcggccagggagttgcctgagggaaaaggggcagacgtccctgggttccggtgttcgcggaggagtcgagcagaagaatagaaggaaggtgataggatgtgatgatagaatttgtgatagccaagcaacaacttttcctaattcggcatgttaaaaaataagggtcactcatctaagaaagataacttggcagtcaatgcagttgctttacaagatcacattttacatgatcttcaacttcgaaatctttcagttgcagatcattctaagacacaagtacaaaagaaagagaacaaatctctaaaaagagatacaaaggcaataatagatactggacttaaaaaaactacacagtgccccaaactagaagactcagaaaaagaatatgttcttgatcccaaaccgccgccgttgactttggcacagaagttgggcctcattgggcctccaccacctccactgtcatcagatgaatgggagaaggtgaaacagcgctctctcctgcaaggggactccgtgcaaccatgccccatctgtaaagaagaattcgagcttcgtcctcaggtgctgctttcatgctcccatgtgttccacaaagcatgtcttcaggcttttgaaaagttcacaaataagaaaacctgtcctctctgtagaaagaaccagtatcaaacccgagtgatacacgatggggcccgcctgttcagaatcaagtgtgtgaccagaatccaagcctactggagaggatgtgttgttagaaagtggtacagaaacctgaggaaaacagtacctcccacagatgccaagttaagaaaaaaattctttgaaaaaaagttcacagaaatcagccaccgcatcctgtgctcatacaacaccaacattgaagagctctttgcagaaatcgatcagtgcttggccataaatcgaagtgttcttcagcagttggaagaaaaatgtggccatgagatcacagaagaggaatgggagaaaatccaagtgcaggctctgcgccgggagacccacgagtgctccatctgcctggcccctctctccgctgctggcggtcagcgcgtgggtgcaggcaggcgttccagagagatggccctcctgtcctgctcacatgtgttccaccatgcgtgtctgctggcactagaggagttctccgtgggagacaggcctcctttccatgcctgtcctctctgccgctcctgctaccagaagaagattcttgaatgttgaattcatagtcaaggaaagttaggtaattctgaggaaaaaagtttaccatcattttggatgaactgcatgagttctgggttaagtactacaatgtaatctgtttcccagggaaataagctattggtagttgtaggaaatcttagtatattttaaaagctgacatcccacctaattttaatctttggtctctaaaaagtaaatttcaaatttatgagtttaatcacttcaaatatgaatagcaaaaaatgagagcttgcttacttctaaaaattgaggttaagatatagctagtgtctgaacgacactccttaaagtaagttccaaatgtaaaacactccttaagttccaaatgttttccgctaatagtctgtcctaaagcctttgccattcctaatactcgttttgtaataattgctgtatttctgtgtaataaaatataaaaataaaatattcagtggtattcaacatcaaaaaaaaaaaaaaaaa

SEQ ID NO: 2172 - protein, 362 aa, Homo sapiens
MLKNKGHSSKKDNLAVNAVALQDHILHDLQLRNLSVADHSKTQVQKKENKSLKRDTKAIIDTGLKKTTQCPKLEDSEKEYVLDPKPPPLTLAQKLGLIGPPPPPLSSDEWEKVKQRSLLQGDSVQPCPICKEEFELRPQVLLSCSHVFHKACLQAFEKFTNKKTCPLCRKNQYQTRVIHDGARLFRIKCVTRIQAYWRGCVVRKWYRNLRKTVPPTDAKLRKKFFEKKFTEISHRILCSYNTNIEELFAEIDQCLAINRSVLQQLEEKCGHEITEEEWEKIQVQALRRETHECSICLAPLSAAGGQRVGAGRRSREMALLSCSHVFHHACLLALEEFSVGDRPPFHACPLCRSCYQKKILEC

SEQ ID NO: 2173 - DNA, 2781 bp, Homo sapiens
gccggtgtcgtggtcgcggtacctgttccaacacggctcgcgggcccgtgccggctccggtccccggcgcggctgtccgagcccctgcggcgggcggacgatggtgtggcggagcacgcggacgcgggcggcgcggcggcgggcatgaaggaggatggaagggcaggacgaggtgtcggcgcgggagcagcacttccacagccaagtgcgggagtccacgatatgtttccttctttttgccattctctacgttgtttcctacttcatcatcacaagatacaagagaaaatcagatgaacaagaagatgaagatgccatcgtcaacaggatttcgttgtttttgagcacgttcactctcgcagtgtcagctggggctgttttgcttttacccttctcaatcatcagcaatgaaatcctgctttcttttcctcagaactactatattcagtggctaaatggctccctgattcatggtttgtggaatcttgcttcccttttttccaacctttgtttatttgtattgatgccctttgcctttttctttctggaatcagaaggctttgctggcctgaaaaagggaatccgagcccgcattttagagactttggtcatgcttcttcttcttgcgttactcattcttgggatagtgtgggtagcttcagcactcattgacaacgatgccgcaagcatggaatctttatatgatctctgggagttctatctaccctatttatattcctgtatatcattgatgggatgtttgttacttctcttgtgtacaccagttggcctttctcgtatgttcacagtgatgggtcagttgctagtgaagccaacaattcttgaagacctggatgaacaaatttatatcattaccttagaggaagaagcactccagagacgactaaatgggctgtcttcatcggtggaatacaacataatggagttggaacaagaacttgaaaatgtaaagactcttaagacaaaattagagaggcgaaaaaaggcttcagcatgggaaagaaatttggtgtatcccgctgttatggttctccttcttattgagacatccatctcggtcctcttggtggcttgtaatattctttgcctattggttgatgaaacagcaatgccaaaaggaacaagggggcctggaataggaaatgcctctctttctacgtttggttttgtgggagctgcgcttgaaatcattttgattttctatcttatggtgtcctctgttgtcggcttctatagccttcgattttttggaaactttactcccaagaaagatgacacaactatgacaaagatcattggaaattgtgtgtccatcttggttttgagctctgctctgcctgtgatgtcgagaacactgggaatcactagatttgatctacttggcgactttggaaggtttaattggctgggaaatttctatattgtattatcctacaatttgctttttgctattgtgacaacattgtgtctggtccgaaaattcacctctgcagttcgagaagaacttttcaaggccctagggcttcataaacttcacttaccaaatacttcaagggattcagaaacagccaagccttctgtaaatgggcatcagaaagcactgtgagacgcacagacggcgtcttctgccaccaagagacccgagaactccagattcacgacattcctgtcccatgtagaagcatttccattcaaccgtggcccctcttcagaacctagacctatcagtgccatttttttttcataatctacgaagaacttggctatggctgatcttttttaaatttaactttctgatggaccctgtagtttccagttaagtgcagattccttacagacatatagaacagcgcattcttctgtagacatttgctcatgttggtaaatacaatcacccatatgaaaaaattgttttcacctgatatgaaaatgttagaaaaggcaaactccgggacttctaaagatttacttaaatcccattatgtactttattcagaatgtagaagctgacttgaaaggcatccttggtactaagtgaagcttattcagaaaatgcatttttcaaatgcaatggcaactgcttgtagatatcatttttgcagtgtatgttggagctgtaatggttgcaattatgtttcttatttccttaaaagcaaaaagcgtagtttctgatttatgttatagaatgatactgattagactttgagccaaggggaaaatactaaattcttttaaacctggagccttagagagccacaggaatatcttctgttgtacagtctaataagctgtggtaggaagtatcatgtaatcacagtttaatgacagtttatgtatatatataattcagtattccctctgataacatagttgccagtgtttaatacacttgtaacttggatttttaccttataggctatatgtatactcagttttttaaagcatttttttcagagatcacttaattccccatgcttctgcaatgcatataaaaactataaatgccgagtggtagaaactcctctttcttcatagtcctcaggctttggttacatttgcatatgccatttgaagcctccagcttttaccagtttaacatccaaagttcacagcatcagcattcatggtgtaagaacagttttgcagtataacacgatctgataatcattcagttattaaattgtaaataattattgggatggtttcttggctttaagtccactgaataaaaactatgaaattgcaaaaaaaaaaaaaaaa

SEQ ID NO: 2174 - protein, 490 aa, Homo sapiens
MEGQDEVSAREQHFHSQVRESTICFLLFAILYVVSYFIITRYKRKSDEQEDEDAIVNRISLFLSTFTLAVSAGAVLLLPFSIISNEILLSFPQNYYIQWLNGSLIHGLWNLASLFSNLCLFVLMPFAFFFLESEGFAGLKKGIRARILETLVMLLLLALLILGIVWVASALIDNDAASMESLYDLWEFYLPYLYSCISLMGCLLLLLCTPVGLSRMFTVMGQLLVKPTILEDLDEQIYIITLEEEALQRRLNGLSSSVEYNIMELEQELENVKTLKTKLERRKKASAWERNLVYPAVMVLLLIETSISVLLVACNILCLLVDETAMPKGTRGPGIGNASLSTFGFVGAALEIILIFYLMVSSVVGFYSLRFFGNFTPKKDDTTMTKIIGNCVSILVLSSALPVMSRTLGITRFDLLGDFGRFNWLGNFYIVLSYNLLFAIVTTLCLVRKFTSAVREELFKALGLHKLHLPNTSRDSETAKPSVNGHQKAL

SEQ ID NO: 2175 - DNA, 6082 bp, Homo sapiens
cacgcgtttcgaaagatggcggcgtccaggagcgcgggagaggccggcccgggcggctcccagggacgcgtggtccgcatgaagcgcagaggcgggcgcgggccgcgccgcggtcctgctggcggtggggagaaggccctgaagaggctgaagctagcggtggaggagttcgtgcacgcgacttcggaaggcgaggctcccgggggttgcgaggggcgcggcgccccggtgagctttcgcccgggagggagaaaaagccgtaaggaactgaggaaggagaagcggcacctgcggaaagcacgccggctgcagaggacggcgggccccgaacagggtcccggcctgggaggccgaagcggagccgaagaagccagcggtcaccggcaggacacggaggagcgcgcccgcccagcccctagtcgggacccctcgcctcccaggaagccgcggccgtcccgggtcaaggccaaggccacggccgccaccgcaaagaccagaccctccgcagccgccaccgccgctgcccggaaacgggcgcttttagcggcgaacgaggaggaggaccgagagatccgaaagctggagcgttgcctcggtttgaacaagcgcaaaaagaaggacggcagcagctccgtgccgctgagctttgcacgcgacggtcttgactatattctgggagccctggagtctgggaaaaatagcggcttgtacgacagcagtggtgaggaggaggaagatgccggacagacactccccgaaagtgacttagagagtgactcccaggacgaaagtgaggaggaggaggagggagacgtagaaaaggaaaagaaggcgcaggaagcagaagcgcagagcgaggacgacgacgaggatacagaagaggaacagggggaagaaaaggaaaagggagcgcaggagaaaaggagggggaagagagtccgttttgcagaagatgaagaaaagagtgaaaattcctcggaggacggtgacataacggataagagtctttgtggaagtggtgaaaagtacatcccacctcatgtgaggcaagctgaggagacagtggacttcaagaaaaaggaagaactagaaaggctgaagaaacatgtaaaaggtctacttaacaggttgagtgaacccaacatggcttccatcagtgggcagctggaggaactgtacatggcccacagcagaaaggacatgaatgacaccctgacctccgctctcatgggtgcctgcgtcactgcctcggccatgcccagcagactgatgatggagcatgttctcttagtcagcatccttcaccacacagttggaatcgaggtcggtgcccactttctggaggcagtggtgaggaagttcgatgccatctataaatacggaagcgaagggaaagagtgtgacaacctgttcaccgtcattgcccatttatacaacttccacgtggtacagtctctcctcatcttcgacattttgaaaaaactgattggaactttcaccgaaaaagatattgaactgatcttgttaatgctgaaaaacgtgggtttttcattgaggaaagatgatgctttatcacttaaggaattgatcactgaagcccagaccaaagccagcggggcaggcagcgagtttcaggaccagaccaggattcggtttatgctagagacgatgttggccctgaagaacaatgacatgcgcaaaattccaggctatgaccccgagcccgtggagaagctgaggaaactgcagagagctttggtccgcaacgccggctcaggttctgagacgcagcttcgcgtctcctgggacagtgtcttgagtgcggagcagacgggtcgctggtggattgtggggtccgcctggagtggggccccgatgatcgacaacagtcaccatacgcacctgcagaagcagcttgtggggacggtcagttcaaagatcctagaactcgcccggaagcagaggatgaacacagacatccggagaaacatattctgcacaataatgacaagtgaagattttttggatgcttttgaaaagcttctgaagcttggacttaaggatcagcaggagagagaaatcattcacgttctcatggattgctgccttcaagagaaaacttacaatcccttctatgctttcctggctagcaaattctgtgaatatgaaaggagatttcagatgactttccagttcagcatatgggacaaatttcgggacttggaaaacttgccagctacgaatttctctaatttggttcatctggtggcccacttgttgaagacaaaatcgctttccctttccatcttaaaggtagttgaattcagtgaattggacaaacccagagtccgttttttacgaaaagtattaagtatcctattaatggaaacagaagttgaagacctcagtttaattttcacaagagtatctgacaacccaaagctgggggtgttacgtgagggtttgaagcttttcatcagccacttcttgctaaagaacgcacaggcccacagaagcgccgacgaagccaacgtgctgagagagaaagctgaccttgcaacgaagtgtctgcaaggaaaagcttccctgagaatgtagtcagggaaggaaggagggcaggtggccctttgactgtaaaatgtccttggtaaacccaaaggcttattctgttgcctgcgtgtgaatgtttggtagagctatatcattgtctgttaatgtattatattttgagattttttttgatctaaggttttattgtttgtatttcaagccattttcaaataactatcttgggggtgagaggagaaggagggagggaaaaggggtcaggcacactggacagggttctctaagcagtgaggctggtgtgtatgattgtcttaaaattttttaatagatatggccgagcgtgatggctcacccctgtaatcccagcactttgtgaggccaaggtgggcggatcacttgaggccaggaatttgaaaccagcctgggcaaaaccctgtctctactaaaaatataaaaattagccaggcatgatggcacatgctggtaatagcagctactgaggtggctgaggcacaagaattgcttggaccctggaggtagaggctgcagtgagccaagattgtaccactgtactccagcctgggctggacagtgagacttttgacagtgagactgtcaaaaaaaaaaaaaaaattaatagataaaacaggccactagagggtgcagttataaagaaattgatgaggtttttacctttttaaaatattggttagaagttcaaaaaccatcccttaaaggtgattgtttttttgagacagagtcttgctctgtcacccagagtggagtgcagtgtcctgtaatctcagctcactgcaacctctacctcccgggttcaagcgattctcctgcctcagcctctttagctgggactacaggcgcacgccaccacgcccggctaatttttgtattttagtagagatgggtttcaccatgttggcaaggctggtcttgaactcctgacctcaggtgatacacccatctcggcctcccaaagtgctgggattacaggcttgagccaccacgcccagcttaaatgtgattcttgatactgttttaagtatttaggttgcaattaactttggcaaagtcagtcgacataagccctgtggatatggccttatgtacactgtaatgcagacaggtgcttttcatcattcatgtaacattctcacacagttgaggatattcatctcctcaccaattccagattgtaaatgtaccatcttaaacaactctgaggtcaccaaacagtagttatttgactgttaataggtgctacttgcttgcaaggatttggagatgtaaacatgaagaaaatatagttactgcctgcaaagaattaacatccgtctagtgggagaaacaaacacaccccactcactaagtatggaaaactgattctgggaggaagcagaaatgtccctagataacagcatgtattgcagatacccaaatgtttattgttttctcagcccttcaattttgcttttctctctcaaatgctacagactcaatttaaatcttacctttgattgttgaaaaaagtcactaagatgtgaatacagaatagacattgagaggttatatatgtccaaaactcatctgtccagcagtcaccgtcctcttcagagtggtcacgttgggcagatgggcacaggtgctggtgatgcctctcctgggcaaaacgccccatttgtggcactttcagatactatttatttactttttaagagagagacaggctcactctgtcacccaggccagagtgcagtggcacgatcatagttaccgcagcatcaaattcctggactgaagcggtccttttgcctcagcctcgcggatagctaggaccacaagcagtagagacaagatctccgtatgttatacaggctggcctcaagtgatcctcttaccttggcctcccaaacaccgggattataggcgtgagcccccgtgcctggcctcaaattttattttagctcgaccctatggcagtttgtgtttggaaatcgtgatgtgaagtcatcagtatctgtgcatatccctaaactaatggtttaagctttgaagcatgcgcaagcaacatgaacaactgaatacagaaagtaactgaaagcagcacagagactgtgtcgtccctacagacttctaaccctgcattcagcaacatcattcgacccgaagccagattcaaaccctatgtcttctagcaggttctgaatttagaggacaaataaggtgacaggtactaagagaagagtgaattaagtgaaaatcttccctttgttaaggagctttttaacaagagtgtctttgctgggtggtgattgggatgtaacagatcagttctactggacttgtagcttgatagtgaaataaggagcttgggctaaggtataaatcaacacactgcttccttcctccagaaggtcttactgtgaaggaaaaaatgtcagttgaactaaattgtgcttcacgcctcggtagatttgcattctgatgcaagcccccaacctcacggaccaagaggatccctggctgcctgtgaatggcccacatttgagtggtgctaacttgatgtgagtaggcattaattatgggtgcggctactaagatgggaaaaactatcacgacagtggcaccacctgatttcatgatgtaccatatgcagtaacccatgtttgaggtacagaattgaagctgatttttctgcaaaagatgaatttctataaacaatcccatttttatattttattattaaaacaaaaatacctctctttgctagagagttatatgtatgacttaaattattagctatggtttgcatttagtacatggcagattgcctgtaagtctgttcattttaacaacatacagggctgggcacggtggctcacgcctgtaatcccagcactttgggaggttgcgggtggatcacttgaggtcaggagttcgagaccagcctggccaacatggcaaaaccccgtctctatgaaaaatataaaaattagctgggcatggtggcaggcacctgtaatcccagctactcgggaggctgaggcaggagaatcgcttgaacctgggaggcggatgttgcagtgagcagagatcgtgccattgcactccagcctgggaacaagagtgaaactctcaaaagcagaaacaaaaacccaacatatatgggctgttagatagtaattgtaatttcgtataaatagtaaatgagtacatcttgattaaaagctatgaattcagaattgcttttaaatatatagggggttttttgaaatttattacagtgcaattgaaaatacacttaaaatactgcaggatgcttagtgctcagtgttatgtatgaacttgtggactttacaatgcaggttgagaactgctaatgtatagaatgactaaacagctgtctttcagggtatcatttttaaaggtataaggaacaaactttaatgtattgaaatgcataaataaaatttattttttatattttgtttagaaaaaa

SEQ ID NO: 2176 - protein, 860 aa, Homo sapiens
MAASRSAGEAGPGGSQGRVVRMKRRGGRGPRRGPAGGGEKALKRLKLAVEEFVHATSEGEAPGGCEGRGAPVSFRPGGRKSRKELRKEKRHLRKARRLQRTAGPEQGPGLGGRSGAEEASGHRQDTEERARPAPSRDPSPPRKPRPSRVKAKATAATAKTRPSAAATAAARKRALLAANEEEDREIRKLERCLGLNKRKKKDGSSSVPLSFARDGLDYILGALESGKNSGLYDSSGEEEEDAGQTLPESDLESDSQDESEEEEEGDVEKEKKAQEAEAQSEDDDEDTEEEQGEEKEKGAQEKRRGKRVRFAEDEEKSENSSEDGDITDKSLCGSGEKYIPPHVRQAEETVDFKKKEELERLKKHVKGLLNRLSEPNMASISGQLEELYMAHSRKDMNDTLTSALMGACVTASAMPSRLMMEHVLLVSILHHTVGIEVGAHFLEAVVRKFDAIYKYGSEGKECDNLFTVIAHLYNFHVVQSLLIFDILKKLIGTFTEKDIELILLMLKNVGFSLRKDDALSLKELITEAQTKASGAGSEFQDQTRIRFMLETMLALKNNDMRKIPGYDPEPVEKLRKLQRALVRNAGSGSETQLRVSWDSVLSAEQTGRWWIVGSAWSGAPMIDNSHHTHLQKQLVGTVSSKILELARKQRMNTDIRRNIFCTIMTSEDFLDAFEKLLKLGLKDQQEREIIHVLMDCCLQEKTYNPFYAFLASKFCEYERRFQMTFQFSIWDKFRDLENLPATNFSNLVHLVAHLLKTKSLSLSILKVVEFSELDKPRVRFLRKVLSILLMETEVEDLSLIFTRVSDNPKLGVLREGLKLFISHFLLKNAQAHRSADEANVLREKADLATKCLQGKASLRM

SEQ ID NO: 2177 - DNA, 2176 bp, Homo sapiens
cagcggcctccgcgcggtcgcctgagggctgcagcgcaaagaaccgggctcccgggcccggacgcggggaagcactcgcgtgggagtttgtgcgagcgcggcccggggcggggcccgcacggaggaggcgccgggaccatggtcaccctcggctgagtttccggcggcgactttgattattggcaaataaccaccataacaataccgagcccccgggcttgcaccgcacgcactgactccgcgagcccgcacacggccgcgtcgcccgccaccgggccctgagcgccagccccaaacgagccgatggaaaaatccaaaaatttccgcatcgacgccctgctggcggtggaccccccacgagccgcctctgcgcagagcgcgccgctggccttggtcacgtcgctcgccgccgccgcatctggcaccggaggtggcggcggcggcggcggggcgagcggcgggactagcggcagctgcagccccgcgtcctcggagccgccggctgcgcccgccgaccgcctgcgcgccgagagcccgtcgccgccgcgcctgctggccgcgcactgcgcgctgctgcccaagccgggcttcctgggcgcgggcggcggcggcggcggcacgggcggcgggcacggggggccccaccaccacgcgcatccgggcgcagcggccgctgccgccgccgccgccgccgccgccgccgctgggggcctggcgctggggctgcaccctgggggcgcgcagggcggcgcgggcctcccggcgcaggcggcgctctacggccacccggtctacggctactccgcggcggcggcggcggctgcgctggcgggccagcacccggcgctctcctactcgtacccgcaggtgcaaggcgcgcaccccgcgcaccccgccgaccccatcaagctgggcgccggcaccttccagctggaccagtggctgcgcgcgtccaccgcgggcatgatcctgcctaagatgcccgacttcaactcccaggcgcagtcgaacctcctggggaagtgccgccggccgcgcaccgccttcaccagccagcagctgctggagctggagcaccagttcaagctcaacaagtacctgtcgcggcccaagcgcttcgaggtggccacctcgctcatgctcaccgagacccaggtgaagatttggttccagaaccggcggatgaaatggaaacgcagcaaaaaggccaaagagcaggcggcgcaggaagcggagaaacagaagggcggcggcgggggcgcggggaagggcggcgcggaggagccgggagccgaggagctgctggggccgccagcgcccggagacaagggcagcggacgccgcctgcgggacttgagggacagtgaccccgaggaggacgaggacgaggacgacgaggaccatttcccctacagcaacggcgccagcgtccacgccgcctcctccgactgctcctcggaggacgactcgccgcccccgcggcccagccaccagcccgcgccccagtaggagccccgcggcccagcaggtgcggcgcgcacggagcgccccggccggcggcttctcccggaggccccggcgcccgcacccacccggcccggccccgagagcaggctcgaccgccgccccatggacccctcgcccaggccggggctggagggattcggccgcggctccggtcctgggcgcttcccttttaagcaagggcgcctcacctgctcttcaagaaacagcgagagggagacccagggggctgaaacttgaactctggttcttttaaaattaattttggttggtgttgggggaggcgcgagtgcgtgtgagaagaaccgacccaccccgcgcaaggggaagcctcctgtctcccctttccccgcgtccgagaaggcggaaacccacagtgttacctgacttatgaaacttgaaaccgcctctggagccgccattctgcagagtatttggaaaaagaaaaaagggtttatgcttacgtctctggggtcggggggattatgtcacgagcgttcaaactgctggaaatctcaaaactgtactgtctttatttttgtatattgtatttatatataaaaagaaacgtctacgtatgcatgctaaattattatttagcttctcccatcgcccacgatggaatgtaaaataaattggttttgtactggat

SEQ ID NO: 2178 - protein, 401 aa, Homo sapiens
MEKSKNFRIDALLAVDPPRAASAQSAPLALVTSLAAAASGTGGGGGGGGASGGTSGSCSPASSEPPAAPADRLRAESPSPPRLLAAHCALLPKPGFLGAGGGGGGTGGGHGGPHHHAHPGAAAAAAAAAAAAAAGGLALGLHPGGAQGGAGLPAQAALYGHPVYGYSAAAAAAALAGQHPALSYSYPQVQGAHPAHPADPIKLGAGTFQLDQWLRASTAGMILPKMPDFNSQAQSNLLGKCRRPRTAFTSQQLLELEHQFKLNKYLSRPKRFEVATSLMLTETQVKIWFQNRRMKWKRSKKAKEQAAQEAEKQKGGGGGAGKGGAEEPGAEELLGPPAPGDKGSGRRLRDLRDSDPEEDEDEDDEDHFPYSNGASVHAASSDCSSEDDSPPPRPSHQPAPQ

SEQ ID NO: 2179 - DNA, 5595 bp, Homo sapiens
cgggggacgcgggggacgcgggggacggcggggaacggcgggggacggcggggaacagcgggggacggcggggaacagcgggggacggcggggaacagcaggggactgcgggtcgcgtcctggccgccgaggagctccttcccttaacagagctgagagaggcatctggagctgcagcatggaccagcgagagcccctgcctcccgctcctgcagaaaatgaaatgaaatatgataccaataataatgaagaggaagagggagaacagttcgattttgacagtggagatgaaatcccagaagcggacagacaggccccatccgcccctgagacaggaggtgctggagccagtgaagcccctgcacccacaggaggtgaggatggagctggagcagaaaccaccccagtggcagagcctactaagctggtgctcccgatgaaagtcaacccatattctgtcatcgacatcacgccattccaggaggaccagccgcccacccccgtgcccagcgctgaggaggagaatgtgggtctccatgtgccctgcgggtacttggtgcctgtaccctgcggctatgcggtgccctccaacctgcccctcctgctgcccgcctactccagcccggtcatcatctgcgccacgtccctggacgaagaagaaacaccagaagtcacagaagatcgccagcccaattctctgagttccgaggagcctccaaccagtgaagatcaagtcggtcgagaggacagcgcacttgcccgctgggccgcagacccggccaacacagcctggatggagaatccagaggaagcaatttacgatgacgttccaagggaaaactcagactctgaaccagatgaaatgatttatgatgatgttgagaatggggatgaaggtggaaacagctccttggaatacggatggagttcgagtgaatttgaaagttacgaagagcagagtgactcggagtgcaagaatgggattcccaggtccttcctgcgcagcaaccacaaaaagcaactttctcatgacctaacccgtttaaaggagcactatgagaaaaagatgagagatttgatggcaagcacggtgggcgtggtggagattcagcagctcaggcagaagcatgaactgaagatgcagaagctcgtgaaggccgcgaaggacggcaccaaggacgggctggagaggaccagggcagccgtgaagaggggccgctccttcatcaggaccaagtctctcatcgcacaggatcacagatcttctcttgaggaagaacagaatttgttcattgatgttgactgcaagcacccggaagccatcttgaccccgatgcccgagggtttatctcagcagcaggttgtaagaagatatatactgggttcagttgtcgacagtgaaaagaactacgtagatgctcttaagaggattttggagcaatatgagaagccgctgtctgagatggagccaaaggttctgagtgagaggaagctgaagacggtgttctaccgagtcaaagagatcctgcagtgccactcgctatttcagatcgcgctggccagccgcgtttccgagtgggactccgtggaaatgataggcgatgtcttcgtggcttcgttttctaagtccatggtgctggatgcatacagtgaatatgtgaacaatttcagcacagccgtggcagtcctcaagaaaacatgtgccacaaagcccgcttttcttgaatttttaaagcaggaacaggaggccagccccgatcgaaccacgctctacagcctgatgatgaagcccatccagaggttcccacagttcatcctcctgctccaggacatgctgaagaacacctccaaaggccaccccgacaggctgcctcttcagatggccctgacagagctcgaaacactagcagagaagttaaatgaaagaaagagagatgctgatcaacgctgtgaagtgaagcaaatagccaaagccataaacgaaagatacctgaacaagcttctcagcagtggaagccgatacctcattcgatcagatgatatgatagaaacagtttacaacgacagaggagagattgttaaaaccaaagaacgccgagtcttcatgttaaatgatgtgttaatgtgtgccaccgtcagctcacgcccctctcatgacagccgtgtgatgagcagccagaggtacttgctgaagtggagcgttccactgggacatgtggacgccatcgagtatggcagcagcgcaggcacgggcgagcacagcaggcaccttgccgttcacccgccggagagcctggccgtggttgctaacgcgaaaccaaacaaagtttacatggggccaggacaactgtatcaagatttacaaaacttgttgcatgacttaaatgtaattggccaaatcactcagctgataggaaaccttaaaggaaactatcagaacttaaaccagtcagtagcccatgactggacatcaggtttacaaaggcttattttgaagaaagaagatgaaatcagagctgcggactgctgcagaattcagttacagcttcccgggaagcaggacaaatctgggcgaccgacgttctttacagctgtgttcaatacgttcacccctgccatcaaggagtcctgggtcaacagcttacagatggccaagctcgccctagaagaggagaaccacatgggctggttctgtgtggaagacgatgggaatcacattaaaaaggagaagcatcctctcctcgtcggacacatgcccgtgatggtggccaagcagcaggagttcaagattgaatgtgctgcttataaccctgaaccttacctaaataatgaaagccagccagattcattttccacggcacatggtttcctgtggatcggaagttgcacccatcaaatgggtcagattgccatcgtctcgtttcaaaattccactcccaaagtcattgagtgcttcaacgtggaatctcgcatcctgtgcatgctgtacgttcccgtcgaggagaagcgcagagagcctggggcacccccggaccccgagaccccggccgtgagagcttctgatgtccccacgatctgtgtagggacggaggagggaagcatttccatttataaaagcagtcaaggctccaagaaagtgagacttcagcactttttcactcctgagaagtccacagtcatgagcctggcttgcacgtctcagagcctgtacgctggcctggtcaacggggcagtcgccagctacgccagagccccagatggatcctgggattcagaacctcaaaaagtgatcaagttaggcgtcctaccagttagaagtctactcatgatggaagacacgttgtgggcggcttccggaggtcaagtcttcatcatcagtgtggagactcatgctgtagagggtcagctggaggcccaccaggaggaaggcatggtgatctcccacatggccgtgtccggcgtcgggatctggattgccttcacctcagggtccacgctccgcctttttcacacggaaactctcaagcacctgcaggacatcaacatcgccacccctgttcacaacatgctgccagggcaccagcggctgtcggtgacgagcctgctcgtctgccacggattgctgatggtcggcaccagcctgggagtcctcgtggccctgccggtcccacgtctgcaagggattcccaaagtgaccggaagaggcatggtctcctaccatgcacacaacagtcctgtcaaattcatcgtcctggccacggctctgcacgagaaagacaaggacaaatccagggacagcctggctcctggccccgagcctcaggacgaagaccagaaggacgcacttccgagtggaggagctggttcatctctgagccagggtgaccctgacgcagccatctggttgggagattcgctgggatcgatgactcagaaaagcgacctgtcctcctcatctgggtccctgagcttgtctcacggctccagctctctagagcacagatcagaggacagcaccatctatgatctcctgaaggatcctgtctcgctgagaagcaaagcacgccgggccaagaaagccaaggccagctcggcgctggtggtctgtggagggcagggccaccgccgggtgcacaggaaggcccggcagccccaccaggaagagctggcgccgaccgtcatggtctggcagatccctctgctgaatatataagcaggacggccgccttctgctgtcagaatttgcaatcaagggtgacttctcagctaatcctacagcctgagtggttaagctgtgtctacactggttgggaataaattaaaaacagtatttgggggagaaacgtgcaatagcgtaatggtggtgtccctgccaattccttccttctcttctgtacagcagaagtaattacaagcacttctcacgaaggcagaagactgatgcaattttcgagtaattgagtgcagttctgggaaaataccacattctttttgactgctgtagtccatatatgaatactaaatgttaaacttcatcagcgtcagacctattgtatcatattagagaatttgcagactaagaatttatgagaaaatatatgtattcagtagtgcaggcatttattaacaattcttaaaagttttacctgattcagattcacgacttttatttatattctatatttttgaatttcagagtaaaatttgttaacaattttaaaagccaggtaacacctaccagtccagttagcatgatttgctttcagaagtgagctgggttttccaaagtggtataatgtgtgtactgtatattttaacaaagtaatatttttgtattgcatttttctattaaaaaattaacagttaatgtttcagtcaatgtattatctgtagcatttcacaaataatgtttgctttgaaccaaaatgctcagtgcctatcaacatttggactcaagcatcaacaccaaattattcctcccttctcgtataaatagagtgactatccacaggagaaaagtgtgtgctttagtattagaggagataggcagagaagtcttgcttagttccttcgtgcagcttcttgcccctgttgacgtggaatgctgtgtctgctttagcacgcacgctccgaatgactcctggtgctaggccatgctggctgctgtcactgagcgggactcaggccaagaggcgtgacctcgggccagcctgtctgttgtgcagacgcctcctctgcagaacgcatcagtttctattctgcagttgcagagccagccccgcgtgagaacgtgcataatgagtgcacaccatcatgtcaaggtgcatacttagtgagcgccatcctgctgaacgtgtatttcagtgtttcacttactggacggataacaagaaaaaaatcctaacacaggcaggcaccagaaataaatgtctcagcactttacagatgactaaaaatgttaattttatgacttagccaaatatgttctaggttgcatatatcccccatgtgaaagtgatttcttcccaagcttctcaaactgttagctgctgtctgacttcatcaataaagtatttttattttaaaatgcaaaaa

SEQ ID NO: 2180 - protein, 1344 aa, Homo sapiens
MDQREPLPPAPAENEMKYDTNNNEEEEGEQFDFDSGDEIPEADRQAPSAPETGGAGASEAPAPTGGEDGAGAETTPVAEPTKLVLPMKVNPYSVIDITPFQEDQPPTPVPSAEEENVGLHVPCGYLVPVPCGYAVPSNLPLLLPAYSSPVIICATSLDEEETPEVTEDRQPNSLSSEEPPTSEDQVGREDSALARWAADPANTAWMENPEEAIYDDVPRENSDSEPDEMIYDDVENGDEGGNSSLEYGWSSSEFESYEEQSDSECKNGIPRSFLRSNHKKQLSHDLTRLKEHYEKKMRDLMASTVGVVEIQQLRQKHELKMQKLVKAAKDGTKDGLERTRAAVKRGRSFIRTKSLIAQDHRSSLEEEQNLFIDVDCKHPEAILTPMPEGLSQQQVVRRYILGSVVDSEKNYVDALKRILEQYEKPLSEMEPKVLSERKLKTVFYRVKEILQCHSLFQIALASRVSEWDSVEMIGDVFVASFSKSMVLDAYSEYVNNFSTAVAVLKKTCATKPAFLEFLKQEQEASPDRTTLYSLMMKPIQRFPQFILLLQDMLKNTSKGHPDRLPLQMALTELETLAEKLNERKRDADQRCEVKQIAKAINERYLNKLLSSGSRYLIRSDDMIETVYNDRGEIVKTKERRVFMLNDVLMCATVSSRPSHDSRVMSSQRYLLKWSVPLGHVDAIEYGSSAGTGEHSRHLAVHPPESLAVVANAKPNKVYMGPGQLYQDLQNLLHDLNVIGQITQLIGNLKGNYQNLNQSVAHDWTSGLQRLILKKEDEIRAADCCRIQLQLPGKQDKSGRPTFFTAVFNTFTPAIKESWVNSLQMAKLALEEENHMGWFCVEDDGNHIKKEKHPLLVGHMPVMVAKQQEFKIECAAYNPEPYLNNESQPDSFSTAHGFLWIGSCTHQMGQIAIVSFQNSTPKVIECFNVESRILCMLYVPVEEKRREPGAPPDPETPAVRASDVPTICVGTEEGSISIYKSSQGSKKVRLQHFFTPEKSTVMSLACTSQSLYAGLVNGAVASYARAPDGSWDSEPQKVIKLGVLPVRSLLMMEDTLWAASGGQVFIISVETHAVEGQLEAHQEEGMVISHMAVSGVGIWIAFTSGSTLRLFHTETLKHLQDINIATPVHNMLPGHQRLSVTSLLVCHGLLMVGTSLGVLVALPVPRLQGIPKVTGRGMVSYHAHNSPVKFIVLATALHEKDKDKSRDSLAPGPEPQDEDQKDALPSGGAGSSLSQGDPDAAIWLGDSLGSMTQKSDLSSSSGSLSLSHGSSSLEHRSEDSTIYDLLKDPVSLRSKARRAKKAKASSALVVCGGQGHRRVHRKARQPHQEELAPTVMVWQIPLLNI

SEQ ID NO: 2181 - DNA, 7389 bp, Homo sapiens
gtcgccttcgtcagacgtcagaatgattccttgcagagccgcgctgacctttgcccgatgtctgatccggagaaaaatcgtgaccctggacagtctagaagacaccaaattatgccgctgcttatccaccatggacctcattgccctgggcgttggaagcacccttggggccggggtttatgtcctcgctggggaggtggccaaggcagactcgggccccagcatcgtggtgtccttcctcattgctgccctggcttcagtgatggctggcctctgctatgccgaatttggggcccgtgttcccaagacggggtctgcatatttgtacacctacgtgactgtcggagagctgtgggccttcatcactggctggaatctcattttatcgtatgtgataggtacatcaagtgttgcaagagcctggagtggcacctttgatgaacttcttagcaaacagattggtcagtttttgaggacatacttcagaatgaattacactggtcttgcagaatatcccgatttttttgctgtgtgccttatattacttctagcaggtcttttgtcttttggagtaaaagagtctgcttgggtgaataaagtcttcacagctgttaatattctcgtccttctgtttgtgatggttgctgggtttgtgaaaggaaatgtggcaaactggaagattagtgaagagtttctcaaaaatatatcagcaagtgccagagagccaccttctgaaaacggaacaagtatctatggggctggtggctttatgccttatggctttacgggaacgttggctggtgctgcaacttgcttttatgcctttgtgggatttgactgcattgcaacaactggtgaagaagttcggaatccccagaaagctattcccattggaattgtgacgtctttgcttgtttgctttatggcctattttggggtctctgcagctttaacacttatgatgccgtactacctcctcgatgaaaaaagcccccttcctgtagcgtttgaatatgtgggatggggtcctgccaaatatgtcgtcgcagctggttctctctgcgccttgtcaacaagtcttcttggatccattttcccaatgcctcgtgtaatctatgctatggcggaggatgggttgcttttcaaatgtctagctcaaatcaattccaaaacgaagacaccaataattgctactttatcatcgggtgcagtggcagctttgatggcctttctgtttgacctgaaggcgcttgtggacatgatgtccattggcacactcatggcctactctctggtggcagcctgtgttctcatcctcaggtaccagcctggcttatcttacgaccagcccaaatgttctcctgagaaagatggtctgggatcgtctcccagggtaacctcgaagagtgagtcccaggtcaccatgctgcagagacagggcttcagcatgcggaccctcttctgcccctcccttctgccaacacagcagtcagcttctctcgtgagctttctggtaggattcctagctttcctcgtgttgggcctgagtgtcttgaccacttacggagttcatgccatcaccaggctggaggcctggagcctcgctctcctcgcgctgtttcttgttctcttcgttgccatcgttctcaccatctggaggcagccccagaatcagcaaaaagtagccttcatggttccattcttaccatttttgccagcgttcagcatcttggtgaacatttacttgatggtccagttaagtgcagacacttgggtcagattcagcatttggatggcaattggcttcctgatttacttttcttatggcattagacacagcctggagggtcatctgagagatgaaaacaatgaagaagatgcttatccagacaacgttcatgcagcagcagaagaaaaatctgccattcaagcaaatgaccatcacccaagaaatctcagttcacctttcatattccatgaaaagacaagtgaattctaacacttgcaggagcagagctggtcatcgtcttagcatacatatcctacactgagtaaaccgtaacgggatgtcatcagcatgctgggttgtcatgggtttgctgcatacatagttcaccctaatttatacttactcatctggacagcatctcctcagatggtgaattatgtgcacggggaaacctcctgagtggaagtttcattcatcagtgatgaatagcccccaaacagtgggagtgtgtatgtatgtgtgtatgtatgtatctatgtatatgcttgggaacatgagtgttacaagttagctggtgttttactattattgtgttacatttttccagtgtcgtcattaatcggtggcatatactgcacatactgaaatagagggaaatcactgaatgtaaagaggtttcatctatgccccctgcagttggggaaatactagtagctttaccttgtttgacttcattaatgtcagtttaggggatgccaaaaatgcagttactcatcatggtgtctgtcactggttaggggtaagatgaggggataaggaaagagacttttcaataagttgtgaatgccaacagtgggtttaatgcaaattttttttcctgtgaggtatgacagtttgctcaaacttcagccaacaggggtgtctgcttctgctgcactacacaggccaggagtggcattccatgccactagttggcatccttttgaacttttgtctcctttgcaaacagtggtcctaaaatacgaggtcttcacttgctgtgaatgacgtatccccagtcagggacttaagagaggcactgtgatatacttgggaccctttaaattaaaaagtgaagatagtcaccagggccagaaagctcatggagtggccgtaatgagaatatgtttgaagatcaaagagttagaccaatgcttgaataagtagaccccaagcatccttttctaaaaagtgacttaaaataagccaacagactctcccagaccacacaactagtggaatgattcctcctttttccattacttacttaatcacagtttagtttttttcttaacctcgtcaggcccagagttcacttctttgtttctctgtttcttttgtcttgtcttagagatgagggggctacagcagcatcatgcaaagagggaaagatgaagggatagaagaagagaaaatccccctgttctgataggaacggcctgttccattgttaaatggcaaatggcccaatttaagggctttggatctaatttgcctctgatgtttcctttggaaacatttaggaatatttttctccccctaccccataaattgtgtagcactttttattccatttgctttcaaatgactacactaagcctaataatacaagctccagtgttatacaataacccatcagtgattggggaatcaaacattttggtttaaaaaacatgattatttaaaactggaaactaaaaagaatcaaattgaattaaagctatataaacacagttaacccttgtaaatgagtaaacaaatttttacatgtaagattctctaattgtcatattttactttttaggattccctaatagtggactgtttatttgcagtgtatttgcttctcatgaactatttctcgtacaaatcattaaatagttcattggatgaggctgggtgacatttcccaggacagcatggtgaacattaccaggcatgctagctggcccgtgtaatcccaagacaaggaaaacattcgttttcctcatgggtcttccaagaaatgagctattttattgatgccattaaaaagcaagttgcgatggttttgtatagccaggagtttattgtgattaaacatcaaagaaacaggtagaaagcctgggtttctggctgctagcgttatagcatccatgacacagaactcattacggacattccacaacttccagggtgcacatggtaaaatctgaagcccagaattttctctcaagctgcgtggtttactggagagaaggagttggataagcacaggctcgggtattttggtagggactgtaggcatgctcataaatccttgctgttgtcacagtacgctgaaaacccgtttgattctatacccaatcaagaatagacccttcacacaggaaatgtgaacaattgttatatatgaacactcaaatcttttactgtaacgaaaccaagaaacttgtttagaatgtgataggcagctaaaactgttatgcccactgtgctcaatttgaagcagaattcagtgaaaaattatttttccacattgaaacactttgcagacacaaatatctatgaaaagatgctttgtcagccactgtgcctttttttctgtgaagactcaacggatgtgtgtgtttgtatgtttgttaacagttacatatgtttgtatgagtgtatatatatatctgtgtgtgtgtatctctaacgtcagtgtataagtaagttgggtttatggtgggctttgactatgtcattaggtgggtacaaaacccaactgatgtggagaaaaattgatgtttgatgttgatagatatgcttatacctaatttttagtttttaaactattttaaaatatactatgattttatatgtatatttcctatagactctttaagatgtatttataatgtttctaatatgaaatcactaaactctagtacattatagcaggtgctttgtaatctggaatggagaagaggtaggggcatttggggattcctgtttacttgctgctgccacaccttttccgactgatctgtcctggtaggtgtttattagcaaaagtcagtatcaccagctctttggcacctttctgtttctgcttgtgaattcataatgttttcaactaaattttttttttactttctcagaattacctaaatgttttgtagagttttgactagtaatcaatcaaaattatataaagtcttctccagtaattaagaaatacatatgcaaattcttttgtgattgagtaaaagcagcttaaattacttttcttttctacattaagaaatatattctcaacattttcagtgagaatttcttgtaatggcacctcaaattttatactcttaaaaaaaaacaataatttgtgaattaccaccaaaaggcaatggcagtcctacatttaagaatagagctatgcaaactctgttaaaaactatgaggaaaacttatattagaacttttgatatatactaaaatactgattatcttaatcacattttccccagagataaacattgagagaacgaaagccaaagtgtcatttaagagagatatatatgaaaaagtaacattaatatatagaactttaccatcaccagccgtagttgatagaaaatattagtttcagaattaccctcctttaaaaaataagagactatttgttttcttttaatttctatgaataaaagaaatttttaaaaactttaaaattttaaatattagtcaaaatactttttaagtcctgagtgcttacaggtagttgttaaaaaaattttaaggccaggcatggtggctcgctcacacctataatcctaggatcttgggaggtcgaggcaagctgatcgcttgagcccaggagtttaagaccggcctgagtagcatagcaagaccctgtctctacaaaaaaaacaaaaattagctgggcatggtggcatgcacatgtagtcagagctactgggggtgctgaggtgggaggatcgcttgagcccaggagagtgaggctgcagtgagctgagattacgccactgcactctagcctgggcaacggtgagaccctgcctcaaaaaaaataaaaataaaaataaaacactttaattagaatctatttttacctattttctaaatttatttaaatgcttagcaggaagcataaggaaaagccatcggcctccaatacccatgatgacagagggagcacttgagccttgccttccctcctcttaaatcagggtgtgttccgagattacagaacatcacaccttggcgtgatgaaatcatgccaagattctgactctccctttccggtgatactgctcatgatttctcctaatacgcttcaagcaactgttaccacaaaaaatacagtttccgcagggctttaaaggattgagtttagcatgtatatcatgcgttattaaagttcacgtgattcatgtgaaattaactgtcctttttgctagtgccaaaacagtgccttctctgcacactttacttgtttataaagttctcccacatgtccttaaatatcaagggggaaagtatggatattcgcgtagcaataatgccagcaaaggtcattttcattttttagtcatatagatatgaaaataagttcatatagatatgaaattgcttgactttattgttttggggagattttttttccttacatgattatattaaacactttaaaatagccttccggtttctggattttgagaagcctgatctgttattgttgtggttgttggtgtttgtaatattcattattgtttgtatatacacggtttagtcttactgatttcaaatgcattttgttattgctcaacccaactggtaacactgtttgctgggagcattatacttaactttgattcaccatggttgatgccactgccatgatcgctgggtcttaaagagctttccctagccactgacagccccgtggagatcataatcagggccccaggctggttccaggatcaggcagcctatagagtgtgagcatctatgtgtagctacccttgttgggtgggctcttagactgatggggtaggatatgaagtgaaagacttcaaatgcaagtaaggtagtttgggctccttaattccaaacatcccatgagtatatcaagatgaataaggaccaagggacctctgtgactcatagaagggctggctgaatcctgaagtagcatagtgggacctggtctacaatttatgcacatgcactgacagccttgctgtgccacgtgtctcaccaagacccagttgggaaagagcgtcatattgccaacaggttgggtttctctggcctacacctgattaatgggccctttatctttggtgtcccctaggagtgtccagttgttttattgctgtattttgttattgcagtacttaataaaaattgttgatagggcccaaaaccctacagaaattctatgtctgtaaaaaccaacaaaggcattggacttgtgtgaatgtacagggtttttttagtagtaattttaaatttaaatgttttaagtgatcatcagtgttcctttttacttataaagttggattcttttttagaatttgtaataaataaaaactgctgctttaccactgtaaaaaaaaaaaaaaaaaaaaaaa

SEQ ID NO: 2182 - protein, 658 aa, Homo sapiens
MIPCRAALTFARCLIRRKIVTLDSLEDTKLCRCLSTMDLIALGVGSTLGAGVYVLAGEVAKADSGPSIVVSFLIAALASVMAGLCYAEFGARVPKTGSAYLYTYVTVGELWAFITGWNLILSYVIGTSSVARAWSGTFDELLSKQIGQFLRTYFRMNYTGLAEYPDFFAVCLILLLAGLLSFGVKESAWVNKVFTAVNILVLLFVMVAGFVKGNVANWKISEEFLKNISASAREPPSENGTSIYGAGGFMPYGFTGTLAGAATCFYAFVGFDCIATTGEEVRNPQKAIPIGIVTSLLVCFMAYFGVSAALTLMMPYYLLDEKSPLPVAFEYVGWGPAKYVVAAGSLCALSTSLLGSIFPMPRVIYAMAEDGLLFKCLAQINSKTKTPIIATLSSGAVAALMAFLFDLKALVDMMSIGTLMAYSLVAACVLILRYQPGLSYDQPKCSPEKDGLGSSPRVTSKSESQVTMLQRQGFSMRTLFCPSLLPTQQSASLVSFLVGFLAFLVLGLSVLTTYGVHAITRLEAWSLALLALFLVLFVAIVLTIWRQPQNQQKVAFMVPFLPFLPAFSILVNIYLMVQLSADTWVRFSIWMAIGFLIYFSYGIRHSLEGHLRDENNEEDAYPDNVHAAAEEKSAIQANDHHPRNLSSPFIFHEKTSEF

SEQ ID NO: 2183 - DNA, 7514 bp, Homo sapiens
agatgtctcaccacgaaactagcaactggaatgaagatagaaacaagtggttataactcagacaaactaatttgtcgagggtttattggaacacctgccccaccggtttgcgacagcaagtttctcctgtcgccttcgtcagacgtcagaatgattccttgcagagccgcgctgacctttgcccgatgtctgatccggagaaaaatcgtgaccctggacagtctagaagacaccaaattatgccgctgcttatccaccatggacctcattgccctgggcgttggaagcacccttggggccggggtttatgtcctcgctggggaggtggccaaggcagactcgggccccagcatcgtggtgtccttcctcattgctgccctggcttcagtgatggctggcctctgctatgccgaatttggggcccgtgttcccaagacggggtctgcatatttgtacacctacgtgactgtcggagagctgtgggccttcatcactggctggaatctcattttatcgtatgtgataggtacatcaagtgttgcaagagcctggagtggcacctttgatgaacttcttagcaaacagattggtcagtttttgaggacatacttcagaatgaattacactggtcttgcagaatatcccgatttttttgctgtgtgccttatattacttctagcaggtcttttgtcttttggagtaaaagagtctgcttgggtgaataaagtcttcacagctgttaatattctcgtccttctgtttgtgatggttgctgggtttgtgaaaggaaatgtggcaaactggaagattagtgaagagtttctcaaaaatatatcagcaagtgccagagagccaccttctgaaaacggaacaagtatctatggggctggtggctttatgccttatggctttacgggaacgttggctggtgctgcaacttgcttttatgcctttgtgggatttgactgcattgcaacaactggtgaagaagttcggaatccccagaaagctattcccattggaattgtgacgtctttgcttgtttgctttatggcctattttggggtctctgcagctttaacacttatgatgccgtactacctcctcgatgaaaaaagcccccttcctgtagcgtttgaatatgtgggatggggtcctgccaaatatgtcgtcgcagctggttctctctgcgccttgtcaacaagtcttctgggctctatgtttcctttaccccgaattctgtttgccatggcccgggatggcttactgtttagatttcttgccagagtgagtaagaggcagtcaccagttgctgccacgttgactgcaggggtcatttctgctttgatggcctttctgtttgacctgaaggcgcttgtggacatgatgtccattggcacactcatggcctactctctggtggcagcctgtgttctcatcctcaggtaccagcctggcttatcttacgaccagcccaaatgttctcctgagaaagatggtctgggatcgtctcccagggtaacctcgaagagtgagtcccaggtcaccatgctgcagagacagggcttcagcatgcggaccctcttctgcccctcccttctgccaacacagcagtcagcttctctcgtgagctttctggtaggattcctagctttcctcgtgttgggcctgagtgtcttgaccacttacggagttcatgccatcaccaggctggaggcctggagcctcgctctcctcgcgctgtttcttgttctcttcgttgccatcgttctcaccatctggaggctgccccagaatcagcaaaaagtagccttcatggttccattcttaccatttttgccagcgttcagcatcttggtgaacatttacttgatggtccagttaagtgcagacacttgggtcagattcagcatttggatggcaattggcttcctgatttacttttcttatggcattagacacagcctggagggtcatctgagagatgaaaacaatgaagaagatgcttatccagacaacgttcatgcagcagcagaagaaaaatctgccattcaagcaaatgaccatcacccaagaaatctcagttcacctttcatattccatgaaaagacaagtgaattctaacacttgcaggagcagagctggtcatcgtcttagcatacatatcctacactgagtaaaccgtaacgggatgtcatcagcatgctgggttgtcatgggtttgctgcatacatagttcaccctaatttatacttactcatctggacagcatctcctcagatggtgaattatgtgcacggggaaacctcctgagtggaagtttcattcatcagtgatgaatagcccccaaacagtgggagtgtgtatgtatgtgtgtatgtatgtatctatgtatatgcttgggaacatgagtgttacaagttagctggtgttttactattattgtgttacatttttccagtgtcgtcattaatcggtggcatatactgcacatactgaaatagagggaaatcactgaatgtaaagaggtttcatctatgccccctgcagttggggaaatactagtagctttaccttgtttgacttcattaatgtcagtttaggggatgccaaaaatgcagttactcatcatggtgtctgtcactggttaggggtaagatgaggggataaggaaagagacttttcaataagttgtgaatgccaacagtgggtttaatgcaaattttttttcctgtgaggtatgacagtttgctcaaacttcagccaacaggggtgtctgcttctgctgcactacacaggccaggagtggcattccatgccactagttggcatccttttgaacttttgtctcctttgcaaacagtggtcctaaaatacgaggtcttcacttgctgtgaatgacgtatccccagtcagggacttaagagaggcactgtgatatacttgggaccctttaaattaaaaagtgaagatagtcaccagggccagaaagctcatggagtggccgtaatgagaatatgtttgaagatcaaagagttagaccaatgcttgaataagtagaccccaagcatccttttctaaaaagtgacttaaaataagccaacagactctcccagaccacacaactagtggaatgattcctcctttttccattacttacttaatcacagtttagtttttttcttaacctcgtcaggcccagagttcacttctttgtttctctgtttcttttgtcttgtcttagagatgagggggctacagcagcatcatgcaaagagggaaagatgaagggatagaagaagagaaaatccccctgttctgataggaacggcctgttccattgttaaatggcaaatggcccaatttaagggctttggatctaatttgcctctgatgtttcctttggaaacatttaggaatatttttctccccctaccccataaattgtgtagcactttttattccatttgctttcaaatgactacactaagcctaataatacaagctccagtgttatacaataacccatcagtgattggggaatcaaacattttggtttaaaaaacatgattatttaaaactggaaactaaaaagaatcaaattgaattaaagctatataaacacagttaacccttgtaaatgagtaaacaaatttttacatgtaagattctctaattgtcatattttactttttaggattccctaatagtggactgtttatttgcagtgtatttgcttctcatgaactatttctcgtacaaatcattaaatagttcattggatgaggctgggtgacatttcccaggacagcatggtgaacattaccaggcatgctagctggcccgtgtaatcccaagacaaggaaaacattcgttttcctcatgggtcttccaagaaatgagctattttattgatgccattaaaaagcaagttgcgatggttttgtatagccaggagtttattgtgattaaacatcaaagaaacaggtagaaagcctgggtttctggctgctagcgttatagcatccatgacacagaactcattacggacattccacaacttccagggtgcacatggtaaaatctgaagcccagaattttctctcaagctgcgtggtttactggagagaaggagttggataagcacaggctcgggtattttggtagggactgtaggcatgctcataaatccttgctgttgtcacagtacgctgaaaacccgtttgattctatacccaatcaagaatagacccttcacacaggaaatgtgaacaattgttatatatgaacactcaaatcttttactgtaacgaaaccaagaaacttgtttagaatgtgataggcagctaaaactgttatgcccactgtgctcaatttgaagcagaattcagtgaaaaattatttttccacattgaaacactttgcagacacaaatatctatgaaaagatgctttgtcagccactgtgcctttttttctgtgaagactcaacggatgtgtgtgtttgtatgtttgttaacagttacatatgtttgtatgagtgtatatatatatctgtgtgtgtgtatctctaacgtcagtgtataagtaagttgggtttatggtgggctttgactatgtcattaggtgggtacaaaacccaactgatgtggagaaaaattgatgtttgatgttgatagatatgcttatacctaatttttagtttttaaactattttaaaatatactatgattttatatgtatatttcctatagactctttaagatgtatttataatgtttctaatatgaaatcactaaactctagtacattatagcaggtgctttgtaatctggaatggagaagaggtaggggcatttggggattcctgtttacttgctgctgccacaccttttccgactgatctgtcctggtaggtgtttattagcaaaagtcagtatcaccagctctttggcacctttctgtttctgcttgtgaattcataatgttttcaactaaattttttttttactttctcagaattacctaaatgttttgtagagttttgactagtaatcaatcaaaattatataaagtcttctccagtaattaagaaatacatatgcaaattcttttgtgattgagtaaaagcagcttaaattacttttcttttctacattaagaaatatattctcaacattttcagtgagaatttcttgtaatggcacctcaaattttatactcttaaaaaaaaacaataatttgtgaattaccaccaaaaggcaatggcagtcctacatttaagaatagagctatgcaaactctgttaaaaactatgaggaaaacttatattagaacttttgatatatactaaaatactgattatcttaatcacattttccccagagataaacattgagagaacgaaagccaaagtgtcatttaagagagatatatatgaaaaagtaacattaatatatagaactttaccatcaccagccgtagttgatagaaaatattagtttcagaattaccctcctttaaaaaataagagactatttgttttcttttaatttctatgaataaaagaaatttttaaaaactttaaaattttaaatattagtcaaaatactttttaagtcctgagtgcttacaggtagttgttaaaaaaattttaaggccaggcatggtggctcgctcacacctataatcctaggatcttgggaggtcgaggcaagctgatcgcttgagcccaggagtttaagaccggcctgagtagcatagcaagaccctgtctctacaaaaaaaacaaaaattagctgggcatggtggcatgcacatgtagtcagagctactgggggtgctgaggtgggaggatcgcttgagcccaggagagtgaggctgcagtgagctgagattacgccactgcactctagcctgggcaacggtgagaccctgcctcaaaaaaaataaaaataaaaataaaacactttaattagaatctatttttacctattttctaaatttatttaaatgcttagcaggaagcataaggaaaagccatcggcctccaatacccatgatgacagagggagcacttgagccttgccttccctcctcttaaatcagggtgtgttccgagattacagaacatcacaccttggcgtgatgaaatcatgccaagattctgactctccctttccggtgatactgctcatgatttctcctaatacgcttcaagcaactgttaccacaaaaaatacagtttccgcagggctttaaaggattgagtttagcatgtatatcatgcgttattaaagttcacgtgattcatgtgaaattaactgtcctttttgctagtgccaaaacagtgccttctctgcacactttacttgtttataaagttctcccacatgtccttaaatatcaagggggaaagtatggatattcgcgtagcaataatgccagcaaaggtcattttcattttttagtcatatagatatgaaaataagttcatatagatatgaaattgcttgactttattgttttggggagattttttttccttacatgattatattaaacactttaaaatagccttccggtttctggattttgagaagcctgatctgttattgttgtggttgttggtgtttgtaatattcattattgtttgtatatacacggtttagtcttactgatttcaaatgcattttgttattgctcaacccaactggtaacactgtttgctgggagcattatacttaactttgattcaccatggttgatgccactgccatgatcgctgggtcttaaagagctttccctagccactgacagccccgtggagatcataatcagggccccaggctggttccaggatcaggcagcctatagagtgtgagcatctatgtgtagctacccttgttgggtgggctcttagactgatggggtaggatatgaagtgaaagacttcaaatgcaagtaaggtagtttgggctccttaattccaaacatcccatgagtatatcaagatgaataaggaccaagggacctctgtgactcatagaagggctggctgaatcctgaagtagcatagtgggacctggtctacaatttatgcacatgcactgacagccttgctgtgccacgtgtctcaccaagacccagttgggaaagagcgtcatattgccaacaggttgggtttctctggcctacacctgattaatgggccctttatctttggtgtcccctaggagtgtccagttgttttattgctgtattttgttattgcagtacttaataaaaattgttgatagggcccaaaaccctacagaaattctatgtctgtaaaaaccaacaaaggcattggacttgtgtgaatgtacagggtttttttagtagtaattttaaatttaaatgttttaagtgatcatcagtgttcctttttacttataaagttggattcttttttagaatttgtaataaataaaaactgctgctttaccactgtaaaaaaaaaaaaaaaaaaaaaaa

SEQ ID NO: 2184 - protein, 697 aa, Homo sapiens
MKIETSGYNSDKLICRGFIGTPAPPVCDSKFLLSPSSDVRMIPCRAALTFARCLIRRKIVTLDSLEDTKLCRCLSTMDLIALGVGSTLGAGVYVLAGEVAKADSGPSIVVSFLIAALASVMAGLCYAEFGARVPKTGSAYLYTYVTVGELWAFITGWNLILSYVIGTSSVARAWSGTFDELLSKQIGQFLRTYFRMNYTGLAEYPDFFAVCLILLLAGLLSFGVKESAWVNKVFTAVNILVLLFVMVAGFVKGNVANWKISEEFLKNISASAREPPSENGTSIYGAGGFMPYGFTGTLAGAATCFYAFVGFDCIATTGEEVRNPQKAIPIGIVTSLLVCFMAYFGVSAALTLMMPYYLLDEKSPLPVAFEYVGWGPAKYVVAAGSLCALSTSLLGSMFPLPRILFAMARDGLLFRFLARVSKRQSPVAATLTAGVISALMAFLFDLKALVDMMSIGTLMAYSLVAACVLILRYQPGLSYDQPKCSPEKDGLGSSPRVTSKSESQVTMLQRQGFSMRTLFCPSLLPTQQSASLVSFLVGFLAFLVLGLSVLTTYGVHAITRLEAWSLALLALFLVLFVAIVLTIWRLPQNQQKVAFMVPFLPFLPAFSILVNIYLMVQLSADTWVRFSIWMAIGFLIYFSYGIRHSLEGHLRDENNEEDAYPDNVHAAAEEKSAIQANDHHPRNLSSPFIFHEKTSEF

SEQ ID NO: 2185 - DNA, 1502 bp, Homo sapiens
cctgcgtccccgccccgcgcagccgccgcgctcctgcgctccgaggtccgaggttcccgagatgaaggtctggctgctgcttggtcttctgctggtgcacgaagcgctggaggatgttactggccaacaccttcccaagaacaagcgtccaaaagaaccaggagagaatagaatcaaacctaccaacaagaaggtgaagcccaaaattcctaaaatgaaggacagggactcagccaattcagcaccaaagacgcagtctatcatgatgcaagtgctggataaaggtcgcttccagaaacccgccgctaccctgagtctgctggcggggcaaactgtagagcttcgatgtaaagggagtagaattgggtggagctaccctgcgtatctggacacctttaaggattctcgcctcagcgtcaagcagaatgagcgctacggccagttgactctggtcaactccacctcggcagacacaggtgaattcagctgctgggtgcagctctgcagcggctacatctgcaggaaggacgaggccaaaacgggctccacctacatcttttttacagagaaaggagaactctttgtaccttctcccagctacttcgatgttgtctacttgaacccggacagacaggctgtggttccttgtcgggtgaccgtgctgtcggccaaagtcacgctccacagggaattcccagccaaggagatcccagccaatggaacggacattgtttatgacatgaagcggggctttgtgtatctgcaacctcattccgagcaccagggtgtggtttactgcagggcggaggccgggggcagatctcagatctccgtcaagtaccagctgctctacgtggcggttcccagtggccctccctcaacaaccatcttggcttcttcaaacaaagtgaaaagtggggacgacatcagtgtgctctgcactgtcctgggggagcccgatgtggaggtggagttcacctggatcttcccagggcagaaggatgaaaggcctgtgacgatccaagacacttggaggttgatccacagaggactgggacacaccacgagaatctcccagagtgtcattacagtggaagacttcgagacgattgatgcaggatattacatttgcactgctcagaatcttcaaggacagaccacagtagctaccactgttgagttttcctgacttggaaaaggaaatgtaatgaacttatggaaagcccatttgtgtacacagtcagctttggggttccttttattagtgctttgccagaggctgatgtcaagcaccacaccccaaccccagcgtctcgtgagtccgacccagacatccaaactaaaaggaagtcatccagtctattcacagaagtgttaacttttctaacagaaagcatgattttgattgcttacctacatacgtgttcctagtttttatacatgtgtaaacaattttatataatcaatcatttctattaaatgagcacgtttttgtaaaaaat

SEQ ID NO: 2186 - protein, 375 aa, Homo sapiens
MKVWLLLGLLLVHEALEDVTGQHLPKNKRPKEPGENRIKPTNKKVKPKIPKMKDRDSANSAPKTQSIMMQVLDKGRFQKPAATLSLLAGQTVELRCKGSRIGWSYPAYLDTFKDSRLSVKQNERYGQLTLVNSTSADTGEFSCWVQLCSGYICRKDEAKTGSTYIFFTEKGELFVPSPSYFDVVYLNPDRQAVVPCRVTVLSAKVTLHREFPAKEIPANGTDIVYDMKRGFVYLQPHSEHQGVVYCRAEAGGRSQISVKYQLLYVAVPSGPPSTTILASSNKVKSGDDISVLCTVLGEPDVEVEFTWIFPGQKDERPVTIQDTWRLIHRGLGHTTRISQSVITVEDFETIDAGYYICTAQNLQGQTTVATTVEFS

SEQ ID NO: 2187 - DNA, 6391 bp, Homo sapiens
cgtgggccagcgcagagcctgcggaagggacggatgcggatctcgtcgctgtcaccttgaaagtgaccgaggggcttgactgtggactccttacgccgcccacccgggcccggcggtcccagccttctcgcagggccccttctcagcagaagcaagcggggccgagaaagcgggtggaatagggttgctgcaggtcccaaagacccctcgtggcgcctcgctactttctgcagcttgtttgcactttttcacgctctagaaaaatctcatcttaattaagggaacaacaaatcatttaatcttcagagcatcttagactgaaaacctttcaactgtgctgaaaaacctagaagacagaccattttgcccaccctctcatttaaaaggaattgaagaagaaataaaatggcagaggtttaaggttactattcaggatgactgatgataattcagatgataaaatagaagatgaattgcaaaccttctttaccagtgataaagatggaaatacacatgcatacaacccgaaatcaccacctacacaaaactcttcagccagcagtgtgaactggaattctgccaacccagatgacatggtggttgattatgaaactgaccctgctgtagttactggtgaaaatatttctttaagccttcagggtgttgaagtatttggtcatgaaaagtcttctagtgatttcattagtaagcaggtgttagatatgcataaagattctatttgtcagtgtcctgcacttgtaggtactgagaagcccaaatatctgcaacacagttgtcattccctagaagcagttgagggccagagtgttgagccatctttgccttttgtgtggaagcctaatgacaatttgaactgtgcaggctactgtgatgccttggagctaaaccaaacatttgacatgacagtggataaagttaactgcacctttatatcacatcatgccatcggaaagagtcagtccttccatactgctggaagcctgccaccaactggtaggagaagtggaagtacatcttctttatcctattccacttggacatcttcccattctgataagacgcatgcaagagaaactacttatgatagagaaagctttgaaaaccctcaagtcacaccatcagaagcccaagacatgacttacacagcattttctgatgtggtgatgcaaagtgaggtttttgtttcagatattggaaatcagtgtgcatgttcttcaggaaaggtcaccagtgagtacacagatggatcacaacaaagactagttggagaaaaggagacacaagcactaacaccagtttctgatggcatggaagtccccaatgattctgcattacaagagttcttttgtttatcccatgatgaatccaatagcgaaccacattcacagagctcatacaggcacaaggaaatgggccaaaatctgagagagacagtgtcctattgtcttattgatgatgaatgccctttaatggtgccagcttttgataagagcgaagctcaagtgctgaacccagagcataaagtcactgagactgaagacacacaaatggtctccaaaggaaaggatttgggaacccaaaatcatacctcagaattgattctaagtagcccgccaggacaaaaggtgggctcgtcatttggactgacttgggatgcaaatgatatggtcattagcacagacaaaacgatgtgcatgtcaacaccagtcctagaacccacaaaagtaaccttttctgtttcaccgattgaagcgacggagaaatgtaagaaagtggagaagggtaatcgagggcttaaaaacataccagactcgaaggaggcacctgtgaacctgtgtaaacccagtttaggaaaatcaacaatcaaaacgaataccccaataggctgcaaagttagaaaaactgaaattataagttacccaagaccaaacttcaagaatgtcaaagcaaaagttatgtctagagcagtgttgcagcccaaagatgctgctttatcaaaggtcacgcccagacctcagcagaccagtgcctcatcaccctcatcagtgaattcaagacaacaaacagtcttgagcagaacaccgagatctgacttgaatgcagacaaaaaagcagaaattctaattaacaagacacataagcagcagtttaataaactcattactagccaggctgtgcatgttacaactcattctaaaaatgcttcacacagggttccaagaacaacatctgccgtgaaatcgaatcaggaagatgttgacaaagccagttcttctaactcagcatgcgagaccgggtccgtttctgcgttgtttcagaagatcaaaggcatactccctgttaaaatggaaagtgcagaatgtttggaaatgacctatgttcccaacattgataggattagccctgaaaagaagggtgaaaaagaaaatgggacatctatggaaaaacaagagctgaaacaagagattatgaatgagacttttgaatatggttctctgtttttgggctctgcttcaaaaacaacgaccacctcaggtaggaatatatccaagcctgactcctgcggtttgaggcaaatagctgctccaaaagccaaagtggggccccctgtttcctgtttgaggcggaacagtgacaatagaaatcccagtgctgatcgagccgtatctcctcagaggatcaggcgtgtgtccagttctggaaagcctacatccttgaaaactgcacagtcgtcatgggtgaatttgcctagaccacttcctaaatccaaagcatctttgaaaagtcctgcgctgcggaggacaggaagcaccccctcaatagccagcacccacagtgagctgagcacttacagcaacaattctggtaatgccgctgtcatcaaatatgaggagaaacctccaaaaccagcatttcagaatggttcctcaggatccttttatttgaagcctttggtatccagggctcatgttcacttgatgaaaactcctccaaaaggtccttcgagaaaaaatttatttacagctcttaatgcagttgaaaagagcaggcaaaagaatcctcgaagcttatgtatccagccacagacagctcccgatgcgctgccccctgagaaaacacttgaattgacgcaatataaaacaaaatgtgaaaaccaaagtggatttatcctgcagctcaagcagcttcttgcctgtggtaataccaagtttgaggcattgacagttgtgattcagcacctgctgtctgagcgggaggaagcactgaaacaacacaaaaccctatctcaagaacttgttaacctccggggagagctagtcactgcttcaaccacctgtgagaaattagaaaaagccaggaatgagttacaaacagtgtatgaagcattcgtccagcagcaccaggctgaaaaaacagaacgagagaatcggcttaaagagttttacaccagggagtatgaaaagcttcgggacacttacattgaagaagcagagaagtacaaaatgcaattgcaagagcagtttgacaacttaaatgctgcgcatgaaacctctaagttggaaattgaagctagccactcagagaaacttgaattgctaaagaaggcctatgaagcctccctttcagaaattaagaaaggccatgaaatagaaaagaaatcgcttgaagatttactttctgagaagcaggaatcgctagagaagcaaatcaatgatctgaagagtgaaaatgatgctttaaatgaaaaattgaaatcagaagaacaaaaaagaagagcaagagaaaaagcaaatttgaaaaatcctcagatcatgtatctagaacaggagttagaaagcctgaaagctgtgttagagatcaagaatgagaaactgcatcaacaggacatcaagttaatgaaaatggagaaactggtggacaacaacacagcattggttgacaaattgaagcgtttccagcaggagaatgaagaattgaaagctcggatggacaagcacatggcaatctcaaggcagctttccacggagcaggctgttctgcaagagtcgctggagaaggagtcgaaagtcaacaagcgactctctatggaaaacgaggagcttctgtggaaactgcacaatggggacctgtgtagccccaagagatcccccacatcctccgccatccctttgcagtcaccaaggaattcgggctccttccctagccccagcatttcacccagatgacacctccccaaagtccacagactctctgaaagcattttgatgcaggtctgcaggactgaccccaaggaggaacgtgggcacaagaggtatatcagcacacgtgtgatcaccgtagggtaactggagcgtcaccaccggcggaatcgcagcttctgagactggaactctggaggaagacttttgcctccgtccaaaagattcctccaaaaaaagatttaaaaaaagatttcggcatcgacacggacgttgttgcacaaagcacttaaagaacgagagcatcttgttcattgcctttttcacctaagcatagggggaaaaactctcagggccctattaagatttataacctttgtaatgttcttcaccacagacaccttcttgtgagttttcagtctgactgtgggggtggggggtgtgaatgaaatggatgtcacagagtgtcatgtgtctgatgcagcctcctctgctgtgtattaaatgtcaaaatctgaatatatctggatatgtactaatcaaataataatcaatcaatcagcatatacatttcagccaaagccatagaagaaaaagcaatagttgcttgaattatgatcatctaccaccaactctgctcagccctgtaacagggtagggagagggtataacaggaagagctttgacttgtccctgtctatacattctctgtatcttttgggggtaacttcttggcagtttttcagtgttcagccatgtcagttgaaactagatttttctgtagattttttacttacccatgtgagcctaacactatcctgtaattcattttctcaggctatgtgtaaatgtagaaccctaatttttctataaaaaaacaaactaactaactgtgtaaagaaagaaaaagggaagtaccaatgggtttttccaccttatttttacctttgatctacccttgcagatttaacctgtcttcttccctcccattattctcattttccttttacctttctccaccatccagagccacaaaagcaaaccttctacctcctacctacttttctctgggacaaggataaaggaatatgattttccagagccccagagccagctcatcttccaggtgctgaaaccactttccaaataaactaaagcctggatttgatattacaaattttgggaaatcttagaataaagaacgagaacaaggaagtcattggctagtataattaagaaaggtaggattcagtgcttaccgatgatgcagtacttgatagaagaaaacagtctgggaggatagcgctcatttttcagttaccctttaaggagtccctttgtctttgggaaagtagcagaatggtccgcttctttcccatgagtggaaaatgtggcttgtccaactctcctccaggttgcatttcagtttctttccaaaacttattacctcccctaatcctgagactttggaaaaggtggaaggaagaactgttgctttatctccccctccctgcatgtgtcaacattgtgatgtcagtatttactaatctacattcagtggctgtacaaataacagctgtagtaagaagagattcaggatgctagaggtgaatatttgggtcatttacatgtacactacatagcaagttgatactcatgttgcatgttcttttaaattagtgattttgtgtcttaagtctttaacttccaatacttcatcatgtatgtaaccttccatgtttgcttctgataaatggaaatgtaggttcactgccacttcatgagatatctctgctcacgcttccaagttgttctcaatgacattagccaaagttgggtttgccattcatcccctaggcatggtaaatcttgtgttgttccctgctgtcctccgtattacgtgaccggcaaataaatctcatagcagttaatataaaacatctttggaggatgggagagaacaggagggaagatgggaaacaaaatagagaattcttaagattttgtttaaaccaaatgtttcatgtagaatgcaaaatgttggcacgtcaaaaatatgaatgtgtagacaactgtagttgtgctcagtttgtagtgatgggaagtgtattttactctgatcaaataaataatgctggaatactcaagaattgcaaaaaaaaaaaaaaaaa

SEQ ID NO: 2188 - protein, 1270 aa, Homo sapiens
MTDDNSDDKIEDELQTFFTSDKDGNTHAYNPKSPPTQNSSASSVNWNSANPDDMVVDYETDPAVVTGENISLSLQGVEVFGHEKSSSDFISKQVLDMHKDSICQCPALVGTEKPKYLQHSCHSLEAVEGQSVEPSLPFVWKPNDNLNCAGYCDALELNQTFDMTVDKVNCTFISHHAIGKSQSFHTAGSLPPTGRRSGSTSSLSYSTWTSSHSDKTHARETTYDRESFENPQVTPSEAQDMTYTAFSDVVMQSEVFVSDIGNQCACSSGKVTSEYTDGSQQRLVGEKETQALTPVSDGMEVPNDSALQEFFCLSHDESNSEPHSQSSYRHKEMGQNLRETVSYCLIDDECPLMVPAFDKSEAQVLNPEHKVTETEDTQMVSKGKDLGTQNHTSELILSSPPGQKVGSSFGLTWDANDMVISTDKTMCMSTPVLEPTKVTFSVSPIEATEKCKKVEKGNRGLKNIPDSKEAPVNLCKPSLGKSTIKTNTPIGCKVRKTEIISYPRPNFKNVKAKVMSRAVLQPKDAALSKVTPRPQQTSASSPSSVNSRQQTVLSRTPRSDLNADKKAEILINKTHKQQFNKLITSQAVHVTTHSKNASHRVPRTTSAVKSNQEDVDKASSSNSACETGSVSALFQKIKGILPVKMESAECLEMTYVPNIDRISPEKKGEKENGTSMEKQELKQEIMNETFEYGSLFLGSASKTTTTSGRNISKPDSCGLRQIAAPKAKVGPPVSCLRRNSDNRNPSADRAVSPQRIRRVSSSGKPTSLKTAQSSWVNLPRPLPKSKASLKSPALRRTGSTPSIASTHSELSTYSNNSGNAAVIKYEEKPPKPAFQNGSSGSFYLKPLVSRAHVHLMKTPPKGPSRKNLFTALNAVEKSRQKNPRSLCIQPQTAPDALPPEKTLELTQYKTKCENQSGFILQLKQLLACGNTKFEALTVVIQHLLSEREEALKQHKTLSQELVNLRGELVTASTTCEKLEKARNELQTVYEAFVQQHQAEKTERENRLKEFYTREYEKLRDTYIEEAEKYKMQLQEQFDNLNAAHETSKLEIEASHSEKLELLKKAYEASLSEIKKGHEIEKKSLEDLLSEKQESLEKQINDLKSENDALNEKLKSEEQKRRAREKANLKNPQIMYLEQELESLKAVLEIKNEKLHQQDIKLMKMEKLVDNNTALVDKLKRFQQENEELKARMDKHMAISRQLSTEQAVLQESLEKESKVNKRLSMENEELLWKLHNGDLCSPKRSPTSSAIPLQSPRNSGSFPSPSISPR

SEQ ID NO: 2189 - DNA, 6229 bp, Homo sapiens
cgtgggccagcgcagagcctgcggaagggacggatgcggatctcgtcgctgtcaccttgaaagtgaccgaggggcttgactgtggactccttacgccgcccacccgggcccggcggtcccagccttctcgcagggccccttctcagcagaagcaagcggggccgagaaagcgggtggaatagggttgctgcaggtcccaaagacccctcgtggcgcctcgctactttctgcagcttgtttgcactttttcacgctctagaaaaatctcatcttaattaagggaacaacaaatcatttaatcttcagagcatcttagactgaaaacctttcaactgtgctgaaaaacctagaagacagaccattttgcccaccctctcatttaaaaggaattgaagaagaaataaaatggcagaggtttaaggttactattcaggatgactgatgataattcagatgataaaatagaagatgaattgcaaaccttctttaccagtgataaagatggaaatacacatgcatacaacccgaaatcaccacctacacaaaactcttcagccagcagtgtgaactggaattctgccaacccagatgacatggtggttgattatgaaactgaccctgctgtagttactggtgaaaatatttctttaagccttcagggtgttgaagtatttggtcatgaaaagtcttctagtgatttcattagtaagcaggtgttagatatgcataaagattctatttgtcagtgtcctgcacttgtaggtactgagaagcccaaatatctgcaacacagttgtcattccctagaagcagttgagggccagagtgttgagccatctttgccttttgtgtggaagcctaatgacaatttgaactgtgcaggctactgtgatgccttggagctaaaccaaacatttgacatgacagtggataaagttaactgcacctttatatcacatcatgccatcggaaagagtcagtccttccatactgctggaagcctgccaccaactggtaggagaagtggaagtacatcttctttatcctattccacttggacatcttcccattctgataagacgcatgcaagagaaactacttatgatagagaaagctttgaaaaccctcaagtcacaccatcagaagcccaagacatgacttacacagcattttctgatgtggtgatgcaaagtgaggtttttgtttcagatattggaaatcagtgtgcatgttcttcaggaaaggtcaccagtgagtacacagatggatcacaacaaagactagttggagaaaaggagacacaagcactaacaccagtttctgatggcatggaagtccccaatgattctgcattacaagagttcttttgtttatcccatgatgaatccaatagcgaaccacattcacagagctcatacaggcacaaggaaatgggccaaaatctgagagagacagtgtcctattgtcttattgatgatgaatgccctttaatggtgccagcttttgataagagcgaagctcaagtgctgaacccagagcataaagtcactgagactgaagacacacaaatggtctccaaaggaaaggatttgggaacccaaaatcatacctcagaattgattctaagtagcccgccaggacaaaaggtgggctcgtcatttggactgacttgggatgcaaatgatatggtcattagcacagacaaaacgatgtgcatgtcaacaccagtcctagaacccacaaaagtaaccttttctgtttcaccgattgaagcgacggagaaatgtaagaaagtggagaagggtaatcgagggcttaaaaacataccagactcgaaggaggcacctgtgaacctgtgtaaacccagtttaggaaaatcaacaatcaaaacgaataccccaataggctgcaaagttagaaaaactgaaattataagttacccaagaccaaacttcaagaatgtcaaagcaaaagttatgtctagagcagtgttgcagcccaaagatgctgctttatcaaaggtcacgcccagacctcagcagaccagtgcctcatcaccctcatcagtgaattcaagacaacaaacagtcttgagcagaacaccgagatctgacttgaatgcagacaaaaaagcagaaattctaattaacaagacacataagcagcagtttaataaactcattactagccaggctgtgcatgttacaactcattctaaaaatgcttcacacagggttccaagaacaacatctgccgtgaaatcgaatcaggaagatgttgacaaagccagttcttctaactcagcatgcgagaccgggtccgtttctgcgttgtttcagaagatcaaaggcatactccctgttaaaatggaaagtgcagaatgtttggaaatgacctatgttcccaacattgataggattagccctgaaaagaagggtgaaaaagaaaatgggacatctatggaaaaacaagagctgaaacaagagattatgaatgagacttttgaatatggttctctgtttttgggctctgcttcaaaaacaacgaccacctcaggtaggaatatatccaagcctgactcctgcggtttgaggcaaatagctgctccaaaagccaaagtggggccccctgtttcctgtttgaggcggaacagtgacaatagaaatcccagtgctgatcgagccgtatctcctcagaggatcaggcgtgtgtccagttctgctggtaatgccgctgtcatcaaatatgaggagaaacctccaaaaccagcatttcagaatggttcctcaggatccttttatttgaagcctttggtatccagggctcatgttcacttgatgaaaactcctccaaaaggtccttcgagaaaaaatttatttacagctcttaatgcagttgaaaagagcaggcaaaagaatcctcgaagcttatgtatccagccacagacagctcccgatgcgctgccccctgagaaaacacttgaattgacgcaatataaaacaaaatgtgaaaaccaaagtggatttatcctgcagctcaagcagcttcttgcctgtggtaataccaagtttgaggcattgacagttgtgattcagcacctgctgtctgagcgggaggaagcactgaaacaacacaaaaccctatctcaagaacttgttaacctccggggagagctagtcactgcttcaaccacctgtgagaaattagaaaaagccaggaatgagttacaaacagtgtatgaagcattcgtccagcagcaccaggctgaaaaaacagaacgagagaatcggcttaaagagttttacaccagggagtatgaaaagcttcgggacacttacattgaagaagcagagaagtacaaaatgcaattgcaagagcagtttgacaacttaaatgctgcgcatgaaacctctaagttggaaattgaagctagccactcagagaaacttgaattgctaaagaaggcctatgaagcctccctttcagaaattaagaaaggccatgaaatagaaaagaaatcgcttgaagatttactttctgagaagcaggaatcgctagagaagcaaatcaatgatctgaagagtgaaaatgatgctttaaatgaaaaattgaaatcagaagaacaaaaaagaagagcaagagaaaaagcaaatttgaaaaatcctcagatcatgtatctagaacaggagttagaaagcctgaaagctgtgttagagatcaagaatgagaaactgcatcaacaggacatcaagttaatgaaaatggagaaactggtggacaacaacacagcattggttgacaaattgaagcgtttccagcaggagaatgaagaattgaaagctcggatggacaagcacatggcaatctcaaggcagctttccacggagcaggctgttctgcaagagtcgctggagaaggagtcgaaagtcaacaagcgactctctatggaaaacgaggagcttctgtggaaactgcacaatggggacctgtgtagccccaagagatcccccacatcctccgccatccctttgcagtcaccaaggaattcgggctccttccctagccccagcatttcacccagatgacacctccccaaagtccacagactctctgaaagcattttgatgcaggtctgcaggactgaccccaaggaggaacgtgggcacaagaggtatatcagcacacgtgtgatcaccgtagggtaactggagcgtcaccaccggcggaatcgcagcttctgagactggaactctggaggaagacttttgcctccgtccaaaagattcctccaaaaaaagatttaaaaaaagatttcggcatcgacacggacgttgttgcacaaagcacttaaagaacgagagcatcttgttcattgcctttttcacctaagcatagggggaaaaactctcagggccctattaagatttataacctttgtaatgttcttcaccacagacaccttcttgtgagttttcagtctgactgtgggggtggggggtgtgaatgaaatggatgtcacagagtgtcatgtgtctgatgcagcctcctctgctgtgtattaaatgtcaaaatctgaatatatctggatatgtactaatcaaataataatcaatcaatcagcatatacatttcagccaaagccatagaagaaaaagcaatagttgcttgaattatgatcatctaccaccaactctgctcagccctgtaacagggtagggagagggtataacaggaagagctttgacttgtccctgtctatacattctctgtatcttttgggggtaacttcttggcagtttttcagtgttcagccatgtcagttgaaactagatttttctgtagattttttacttacccatgtgagcctaacactatcctgtaattcattttctcaggctatgtgtaaatgtagaaccctaatttttctataaaaaaacaaactaactaactgtgtaaagaaagaaaaagggaagtaccaatgggtttttccaccttatttttacctttgatctacccttgcagatttaacctgtcttcttccctcccattattctcattttccttttacctttctccaccatccagagccacaaaagcaaaccttctacctcctacctacttttctctgggacaaggataaaggaatatgattttccagagccccagagccagctcatcttccaggtgctgaaaccactttccaaataaactaaagcctggatttgatattacaaattttgggaaatcttagaataaagaacgagaacaaggaagtcattggctagtataattaagaaaggtaggattcagtgcttaccgatgatgcagtacttgatagaagaaaacagtctgggaggatagcgctcatttttcagttaccctttaaggagtccctttgtctttgggaaagtagcagaatggtccgcttctttcccatgagtggaaaatgtggcttgtccaactctcctccaggttgcatttcagtttctttccaaaacttattacctcccctaatcctgagactttggaaaaggtggaaggaagaactgttgctttatctccccctccctgcatgtgtcaacattgtgatgtcagtatttactaatctacattcagtggctgtacaaataacagctgtagtaagaagagattcaggatgctagaggtgaatatttgggtcatttacatgtacactacatagcaagttgatactcatgttgcatgttcttttaaattagtgattttgtgtcttaagtctttaacttccaatacttcatcatgtatgtaaccttccatgtttgcttctgataaatggaaatgtaggttcactgccacttcatgagatatctctgctcacgcttccaagttgttctcaatgacattagccaaagttgggtttgccattcatcccctaggcatggtaaatcttgtgttgttccctgctgtcctccgtattacgtgaccggcaaataaatctcatagcagttaatataaaacatctttggaggatgggagagaacaggagggaagatgggaaacaaaatagagaattcttaagattttgtttaaaccaaatgtttcatgtagaatgcaaaatgttggcacgtcaaaaatatgaatgtgtagacaactgtagttgtgctcagtttgtagtgatgggaagtgtattttactctgatcaaataaataatgctggaatactcaagaattgcaaaaaaaaaaaaaaaaa

SEQ ID NO: 2190 - protein, 1216 aa, Homo sapiens
MTDDNSDDKIEDELQTFFTSDKDGNTHAYNPKSPPTQNSSASSVNWNSANPDDMVVDYETDPAVVTGENISLSLQGVEVFGHEKSSSDFISKQVLDMHKDSICQCPALVGTEKPKYLQHSCHSLEAVEGQSVEPSLPFVWKPNDNLNCAGYCDALELNQTFDMTVDKVNCTFISHHAIGKSQSFHTAGSLPPTGRRSGSTSSLSYSTWTSSHSDKTHARETTYDRESFENPQVTPSEAQDMTYTAFSDVVMQSEVFVSDIGNQCACSSGKVTSEYTDGSQQRLVGEKETQALTPVSDGMEVPNDSALQEFFCLSHDESNSEPHSQSSYRHKEMGQNLRETVSYCLIDDECPLMVPAFDKSEAQVLNPEHKVTETEDTQMVSKGKDLGTQNHTSELILSSPPGQKVGSSFGLTWDANDMVISTDKTMCMSTPVLEPTKVTFSVSPIEATEKCKKVEKGNRGLKNIPDSKEAPVNLCKPSLGKSTIKTNTPIGCKVRKTEIISYPRPNFKNVKAKVMSRAVLQPKDAALSKVTPRPQQTSASSPSSVNSRQQTVLSRTPRSDLNADKKAEILINKTHKQQFNKLITSQAVHVTTHSKNASHRVPRTTSAVKSNQEDVDKASSSNSACETGSVSALFQKIKGILPVKMESAECLEMTYVPNIDRISPEKKGEKENGTSMEKQELKQEIMNETFEYGSLFLGSASKTTTTSGRNISKPDSCGLRQIAAPKAKVGPPVSCLRRNSDNRNPSADRAVSPQRIRRVSSSAGNAAVIKYEEKPPKPAFQNGSSGSFYLKPLVSRAHVHLMKTPPKGPSRKNLFTALNAVEKSRQKNPRSLCIQPQTAPDALPPEKTLELTQYKTKCENQSGFILQLKQLLACGNTKFEALTVVIQHLLSEREEALKQHKTLSQELVNLRGELVTASTTCEKLEKARNELQTVYEAFVQQHQAEKTERENRLKEFYTREYEKLRDTYIEEAEKYKMQLQEQFDNLNAAHETSKLEIEASHSEKLELLKKAYEASLSEIKKGHEIEKKSLEDLLSEKQESLEKQINDLKSENDALNEKLKSEEQKRRAREKANLKNPQIMYLEQELESLKAVLEIKNEKLHQQDIKLMKMEKLVDNNTALVDKLKRFQQENEELKARMDKHMAISRQLSTEQAVLQESLEKESKVNKRLSMENEELLWKLHNGDLCSPKRSPTSSAIPLQSPRNSGSFPSPSISPR

SEQ ID NO: 2191 - DNA, 6452 bp, Homo sapiens
cgtgggccagcgcagagcctgcggaagggacggatgcggatctcgtcgctgtcaccttgaaagtgaccgaggggcttgactgtggactccttacgccgcccacccgggcccggcggtcccagccttctcgcagggccccttctcagcagaagcaagcggggccgagaaagcgggtggaatagggttgctgcaggtcccaaagacccctcgtggcgcctcgctactttctgcagcttgtttgcactttttcacgctctagaaaaatctcatcttaattaagggaacaacaaatcatttaatcttcagagcatcttagactgaaaacctttcaactgtgctgaaaaacctagaagacagaccattttgcccaccctctcatttaaaaggaattgaagaagaaataaaatggcagaggtttaaggttactattcaggatgactgatgataattcagatgataaaatagaagatgaattgcaaaccttctttaccagtgataaagatggaaatacacatgcatacaacccgaaatcaccacctacacaaaactcttcagccagcagtgtgaactggaattctgccaacccagatgacatggtggttgattatgaaactgaccctgctgtagttactggtgaaaatatttctttaagccttcagggtgttgaagtatttggtcatgaaaagtcttctagtgatttcattagtaagcaggtgttagatatgcataaagattctatttgtcagtgtcctgcacttgtaggtactgagaagcccaaatatctgcaacacagttgtcattccctagaagcagttgagggccagagtgttgagccatctttgccttttgtgtggaagcctaatgacaatttgaactgtgcaggctactgtgatgccttggagctaaaccaaacatttgacatgacagtggataaagttaactgcacctttatatcacatcatgccatcggaaagagtcagtccttccatactgctggaagcctgccaccaactggtaggagaagtggaagtacatcttctttatcctattccacttggacatcttcccattctgataagacgcatgcaagagaaactacttatgatagagaaagctttgaaaaccctcaagtcacaccatcagaagcccaagacatgacttacacagcattttctgatgtggtgatgcaaagtgaggtttttgtttcagatattggaaatcagtgtgcatgttcttcaggaaaggtcaccagtgagtacacagatggatcacaacaaagactagttggagaaaaggagacacaagcactaacaccagtttctgatggcatggaagtccccaatgattctgcattacaagagttcttttgtttatcccatgatgaatccaatagcgaaccacattcacagagctcatacaggcacaaggaaatgggccaaaatctgagagagacagtgtcctattgtcttattgatgatgaatgccctttaatggtgccagcttttgataagagcgaagctcaagtgctgaacccagagcataaagtcactgagactgaagacacacaaatggtctccaaaggaaaggatttgggaacccaaaatcatacctcagaattgattctaagtagcccgccaggacaaaaggtgggctcgtcatttggactgacttgggatgcaaatgatatggtcattagcacagacaaaacgatgtgcatgtcaacaccagtcctagaacccacaaaagtaaccttttctgtttcaccgattgaagcgacggagaaatgtaagaaagtggagaagggtaatcgagggcttaaaaacataccagactcgaaggaggcacctgtgaacctgtgtaaacccagtttaggaaaatcaacaatcaaaacgaataccccaataggctgcaaagttagaaaaactgaaattataagttacccaagaccaaacttcaagaatgtcaaagcaaaagttatgtctagagcagtgttgcagcccaaagatgctgctttatcaaaggtcacgcccagacctcagcagaccagtgcctcatcaccctcatcagtgaattcaagacaacaaacagtcttgagcagaacaccgagatctgacttgaatgcagacaaaaaagcagaaattctaattaacaagacacataagcagcagtttaataaactcattactagccaggctgtgcatgttacaactcattctaaaaatgcttcacacagggttccaagaacaacatctgccgtgaaatcgaatcaggaagatgttgacaaagccagttcttctaactcagcatgcgagaccgggtccgtttctgcgttgtttcagaagatcaaaggcatactccctgttaaaatggaaagtgcagaatgtttggaaatgacctatgttcccaacattgataggattagccctgaaaagaagggtgaaaaagaaaatgggacatctatggaaaaacaagagctgaaacaagagattatgaatgagacttttgaatatggttctctgtttttgggctctgcttcaaaaacaacgaccacctcaggtaggaatatatccaagcctgactcctgcggtttgaggcaaatagctgctccaaaagccaaagtggggccccctgtttcctgtttgaggcggaacagtgacaatagaaatcccagtgctgatcgagccgtatctcctcagaggatcaggcgtgtgtccagttctgttttgccaaaagctgctttctcatgattattctgattgatcatctccttcagagaacatgtgaaagcctacatccttgaaaactgcacagtcgtcatgggtgaatttgcctagaccacttcctaaatccaaagcatctttgaaaagtcctgcgctgcggaggacaggaagcaccccctcaatagccagcacccacagtgagctgagcacttacagcaacaattctggtaatgccgctgtcatcaaatatgaggagaaacctccaaaaccagcatttcagaatggttcctcaggatccttttatttgaagcctttggtatccagggctcatgttcacttgatgaaaactcctccaaaaggtccttcgagaaaaaatttatttacagctcttaatgcagttgaaaagagcaggcaaaagaatcctcgaagcttatgtatccagccacagacagctcccgatgcgctgccccctgagaaaacacttgaattgacgcaatataaaacaaaatgtgaaaaccaaagtggatttatcctgcagctcaagcagcttcttgcctgtggtaataccaagtttgaggcattgacagttgtgattcagcacctgctgtctgagcgggaggaagcactgaaacaacacaaaaccctatctcaagaacttgttaacctccggggagagctagtcactgcttcaaccacctgtgagaaattagaaaaagccaggaatgagttacaaacagtgtatgaagcattcgtccagcagcaccaggctgaaaaaacagaacgagagaatcggcttaaagagttttacaccagggagtatgaaaagcttcgggacacttacattgaagaagcagagaagtacaaaatgcaattgcaagagcagtttgacaacttaaatgctgcgcatgaaacctctaagttggaaattgaagctagccactcagagaaacttgaattgctaaagaaggcctatgaagcctccctttcagaaattaagaaaggccatgaaatagaaaagaaatcgcttgaagatttactttctgagaagcaggaatcgctagagaagcaaatcaatgatctgaagagtgaaaatgatgctttaaatgaaaaattgaaatcagaagaacaaaaaagaagagcaagagaaaaagcaaatttgaaaaatcctcagatcatgtatctagaacaggagttagaaagcctgaaagctgtgttagagatcaagaatgagaaactgcatcaacaggacatcaagttaatgaaaatggagaaactggtggacaacaacacagcattggttgacaaattgaagcgtttccagcaggagaatgaagaattgaaagctcggatggacaagcacatggcaatctcaaggcagctttccacggagcaggctgttctgcaagagtcgctggagaaggagtcgaaagtcaacaagcgactctctatggaaaacgaggagcttctgtggaaactgcacaatggggacctgtgtagccccaagagatcccccacatcctccgccatccctttgcagtcaccaaggaattcgggctccttccctagccccagcatttcacccagatgacacctccccaaagtccacagactctctgaaagcattttgatgcaggtctgcaggactgaccccaaggaggaacgtgggcacaagaggtatatcagcacacgtgtgatcaccgtagggtaactggagcgtcaccaccggcggaatcgcagcttctgagactggaactctggaggaagacttttgcctccgtccaaaagattcctccaaaaaaagatttaaaaaaagatttcggcatcgacacggacgttgttgcacaaagcacttaaagaacgagagcatcttgttcattgcctttttcacctaagcatagggggaaaaactctcagggccctattaagatttataacctttgtaatgttcttcaccacagacaccttcttgtgagttttcagtctgactgtgggggtggggggtgtgaatgaaatggatgtcacagagtgtcatgtgtctgatgcagcctcctctgctgtgtattaaatgtcaaaatctgaatatatctggatatgtactaatcaaataataatcaatcaatcagcatatacatttcagccaaagccatagaagaaaaagcaatagttgcttgaattatgatcatctaccaccaactctgctcagccctgtaacagggtagggagagggtataacaggaagagctttgacttgtccctgtctatacattctctgtatcttttgggggtaacttcttggcagtttttcagtgttcagccatgtcagttgaaactagatttttctgtagattttttacttacccatgtgagcctaacactatcctgtaattcattttctcaggctatgtgtaaatgtagaaccctaatttttctataaaaaaacaaactaactaactgtgtaaagaaagaaaaagggaagtaccaatgggtttttccaccttatttttacctttgatctacccttgcagatttaacctgtcttcttccctcccattattctcattttccttttacctttctccaccatccagagccacaaaagcaaaccttctacctcctacctacttttctctgggacaaggataaaggaatatgattttccagagccccagagccagctcatcttccaggtgctgaaaccactttccaaataaactaaagcctggatttgatattacaaattttgggaaatcttagaataaagaacgagaacaaggaagtcattggctagtataattaagaaaggtaggattcagtgcttaccgatgatgcagtacttgatagaagaaaacagtctgggaggatagcgctcatttttcagttaccctttaaggagtccctttgtctttgggaaagtagcagaatggtccgcttctttcccatgagtggaaaatgtggcttgtccaactctcctccaggttgcatttcagtttctttccaaaacttattacctcccctaatcctgagactttggaaaaggtggaaggaagaactgttgctttatctccccctccctgcatgtgtcaacattgtgatgtcagtatttactaatctacattcagtggctgtacaaataacagctgtagtaagaagagattcaggatgctagaggtgaatatttgggtcatttacatgtacactacatagcaagttgatactcatgttgcatgttcttttaaattagtgattttgtgtcttaagtctttaacttccaatacttcatcatgtatgtaaccttccatgtttgcttctgataaatggaaatgtaggttcactgccacttcatgagatatctctgctcacgcttccaagttgttctcaatgacattagccaaagttgggtttgccattcatcccctaggcatggtaaatcttgtgttgttccctgctgtcctccgtattacgtgaccggcaaataaatctcatagcagttaatataaaacatctttggaggatgggagagaacaggagggaagatgggaaacaaaatagagaattcttaagattttgtttaaaccaaatgtttcatgtagaatgcaaaatgttggcacgtcaaaaatatgaatgtgtagacaactgtagttgtgctcagtttgtagtgatgggaagtgtattttactctgatcaaataaataatgctggaatactcaagaattgcaaaaaaaaaaaaaaaaa

SEQ ID NO: 2192 - protein, 770 aa, Homo sapiens
MTDDNSDDKIEDELQTFFTSDKDGNTHAYNPKSPPTQNSSASSVNWNSANPDDMVVDYETDPAVVTGENISLSLQGVEVFGHEKSSSDFISKQVLDMHKDSICQCPALVGTEKPKYLQHSCHSLEAVEGQSVEPSLPFVWKPNDNLNCAGYCDALELNQTFDMTVDKVNCTFISHHAIGKSQSFHTAGSLPPTGRRSGSTSSLSYSTWTSSHSDKTHARETTYDRESFENPQVTPSEAQDMTYTAFSDVVMQSEVFVSDIGNQCACSSGKVTSEYTDGSQQRLVGEKETQALTPVSDGMEVPNDSALQEFFCLSHDESNSEPHSQSSYRHKEMGQNLRETVSYCLIDDECPLMVPAFDKSEAQVLNPEHKVTETEDTQMVSKGKDLGTQNHTSELILSSPPGQKVGSSFGLTWDANDMVISTDKTMCMSTPVLEPTKVTFSVSPIEATEKCKKVEKGNRGLKNIPDSKEAPVNLCKPSLGKSTIKTNTPIGCKVRKTEIISYPRPNFKNVKAKVMSRAVLQPKDAALSKVTPRPQQTSASSPSSVNSRQQTVLSRTPRSDLNADKKAEILINKTHKQQFNKLITSQAVHVTTHSKNASHRVPRTTSAVKSNQEDVDKASSSNSACETGSVSALFQKIKGILPVKMESAECLEMTYVPNIDRISPEKKGEKENGTSMEKQELKQEIMNETFEYGSLFLGSASKTTTTSGRNISKPDSCGLRQIAAPKAKVGPPVSCLRRNSDNRNPSADRAVSPQRIRRVSSSVLPKAAFS

SEQ ID NO: 2193 - DNA, 4018 bp, Homo sapiens
agtactgtgtctgatgctcctaaggaggctgtaaagtgcttttgtccattcctttttgtcttttaacaaaggggtttaccatacacccacagagcctgtctagtggcgatgtgttcctgttgcggattaagcattcaaatcagtgagtctctttcttagtttgatttgctagctggtttaatctgttttgtgtagtgccttggagcttacgcatttttttttttttccctccattcgaattcactaagagcaagcatgagggatatgagagtgaacatggctgcagtttttcctgcttaagcttgctttgatccttttaaatgactgtaccaggaggatttcgcagttgtacagaaactgatatttcttcaaaaatctttatcaattctacactcaccccaccggctggttcagagaggcactatgatgctaccttattgacactgctggtcgtgggatcgtacagcctttgtataattcctttgttagccacgtttactgggaaaaaaactggtaatgccgctgtcatcaaatatgaggagaaacctccaaaaccagcatttcagaatggttcctcaggatccttttatttgaagcctttggtatccagggctcatgttcacttgatgaaaactcctccaaaaggtccttcgagaaaaaatttatttacagctcttaatgcagttgaaaagagcaggcaaaagaatcctcgaagcttatgtatccagccacagacagctcccgatgcgctgccccctgagaaaacacttgaattgacgcaatataaaacaaaatgtgaaaaccaaagtggatttatcctgcagctcaagcagcttcttgcctgtggtaataccaagtttgaggcattgacagttgtgattcagcacctgctgtctgagcgggaggaagcactgaaacaacacaaaaccctatctcaagaacttgttaacctccggggagagctagtcactgcttcaaccacctgtgagaaattagaaaaagccaggaatgagttacaaacagtgtatgaagcattcgtccagcagcaccaggctgaaaaaacagaacgagagaatcggcttaaagagttttacaccagggagtatgaaaagcttcgggacacttacattgaagaagcagagaagtacaaaatgcaattgcaagagcagtttgacaacttaaatgctgcgcatgaaacctctaagttggaaattgaagctagccactcagagaaacttgaattgctaaagaaggcctatgaagcctccctttcagaaattaagaaaggccatgaaatagaaaagaaatcgcttgaagatttactttctgagaagcaggaatcgctagagaagcaaatcaatgatctgaagagtgaaaatgatgctttaaatgaaaaattgaaatcagaagaacaaaaaagaagagcaagagaaaaagcaaatttgaaaaatcctcagatcatgtatctagaacaggagttagaaagcctgaaagctgtgttagagatcaagaatgagaaactgcatcaacaggacatcaagttaatgaaaatggagaaactggtggacaacaacacagcattggttgacaaattgaagcgtttccagcaggagaatgaagaattgaaagctcggatggacaagcacatggcaatctcaaggcagctttccacggagcaggctgttctgcaagagtcgctggagaaggagtcgaaagtcaacaagcgactctctatggaaaacgaggagcttctgtggaaactgcacaatggggacctgtgtagccccaagagatcccccacatcctccgccatccctttgcagtcaccaaggaattcgggctccttccctagccccagcatttcacccagatgacacctccccaaagtccacagactctctgaaagcattttgatgcaggtctgcaggactgaccccaaggaggaacgtgggcacaagaggtatatcagcacacgtgtgatcaccgtagggtaactggagcgtcaccaccggcggaatcgcagcttctgagactggaactctggaggaagacttttgcctccgtccaaaagattcctccaaaaaaagatttaaaaaaagatttcggcatcgacacggacgttgttgcacaaagcacttaaagaacgagagcatcttgttcattgcctttttcacctaagcatagggggaaaaactctcagggccctattaagatttataacctttgtaatgttcttcaccacagacaccttcttgtgagttttcagtctgactgtgggggtggggggtgtgaatgaaatggatgtcacagagtgtcatgtgtctgatgcagcctcctctgctgtgtattaaatgtcaaaatctgaatatatctggatatgtactaatcaaataataatcaatcaatcagcatatacatttcagccaaagccatagaagaaaaagcaatagttgcttgaattatgatcatctaccaccaactctgctcagccctgtaacagggtagggagagggtataacaggaagagctttgacttgtccctgtctatacattctctgtatcttttgggggtaacttcttggcagtttttcagtgttcagccatgtcagttgaaactagatttttctgtagattttttacttacccatgtgagcctaacactatcctgtaattcattttctcaggctatgtgtaaatgtagaaccctaatttttctataaaaaaacaaactaactaactgtgtaaagaaagaaaaagggaagtaccaatgggtttttccaccttatttttacctttgatctacccttgcagatttaacctgtcttcttccctcccattattctcattttccttttacctttctccaccatccagagccacaaaagcaaaccttctacctcctacctacttttctctgggacaaggataaaggaatatgattttccagagccccagagccagctcatcttccaggtgctgaaaccactttccaaataaactaaagcctggatttgatattacaaattttgggaaatcttagaataaagaacgagaacaaggaagtcattggctagtataattaagaaaggtaggattcagtgcttaccgatgatgcagtacttgatagaagaaaacagtctgggaggatagcgctcatttttcagttaccctttaaggagtccctttgtctttgggaaagtagcagaatggtccgcttctttcccatgagtggaaaatgtggcttgtccaactctcctccaggttgcatttcagtttctttccaaaacttattacctcccctaatcctgagactttggaaaaggtggaaggaagaactgttgctttatctccccctccctgcatgtgtcaacattgtgatgtcagtatttactaatctacattcagtggctgtacaaataacagctgtagtaagaagagattcaggatgctagaggtgaatatttgggtcatttacatgtacactacatagcaagttgatactcatgttgcatgttcttttaaattagtgattttgtgtcttaagtctttaacttccaatacttcatcatgtatgtaaccttccatgtttgcttctgataaatggaaatgtaggttcactgccacttcatgagatatctctgctcacgcttccaagttgttctcaatgacattagccaaagttgggtttgccattcatcccctaggcatggtaaatcttgtgttgttccctgctgtcctccgtattacgtgaccggcaaataaatctcatagcagttaatataaaacatctttggaggatgggagagaacaggagggaagatgggaaacaaaatagagaattcttaagattttgtttaaaccaaatgtttcatgtagaatgcaaaatgttggcacgtcaaaaatatgaatgtgtagacaactgtagttgtgctcagtttgtagtgatgggaagtgtattttactctgatcaaataaataatgctggaatactcaagaattgcaaaaaaaaaaaaaaaaa

SEQ ID NO: 2194 - protein, 517 aa, Homo sapiens
MTVPGGFRSCTETDISSKIFINSTLTPPAGSERHYDATLLTLLVVGSYSLCIIPLLATFTGKKTGNAAVIKYEEKPPKPAFQNGSSGSFYLKPLVSRAHVHLMKTPPKGPSRKNLFTALNAVEKSRQKNPRSLCIQPQTAPDALPPEKTLELTQYKTKCENQSGFILQLKQLLACGNTKFEALTVVIQHLLSEREEALKQHKTLSQELVNLRGELVTASTTCEKLEKARNELQTVYEAFVQQHQAEKTERENRLKEFYTREYEKLRDTYIEEAEKYKMQLQEQFDNLNAAHETSKLEIEASHSEKLELLKKAYEASLSEIKKGHEIEKKSLEDLLSEKQESLEKQINDLKSENDALNEKLKSEEQKRRAREKANLKNPQIMYLEQELESLKAVLEIKNEKLHQQDIKLMKMEKLVDNNTALVDKLKRFQQENEELKARMDKHMAISRQLSTEQAVLQESLEKESKVNKRLSMENEELLWKLHNGDLCSPKRSPTSSAIPLQSPRNSGSFPSPSISPR

SEQ ID NO: 2195 - DNA, 3738 bp, Homo sapiens
gtggttcagaggcagcttctagacctgcaggagggagattgtattcagaggaagagcatcattttggcaacatctgaaagtgaaaacggaagccagaaacacttggccagccctgggggatttttttcttctatgcctctctggtggaatgacatttgctgtgtaggcatctttcctctgactgtatttcttggccttgaagagtactgagtttaaaaagacagtatgtgacagtccatggaaattgcctcttctgtgaaatctcgccacctgctccgaagacatgttgttgtctcccaaattctccttatccaccattcacatacgactgacggccaaaggattgcttcgaaaccttcgacttccttcagggtttaggagaagcactgttgttttccacacagttgaaaagagcaggcaaaagaatcctcgaagcttatgtatccagccacagacagctcccgatgcgctgccccctgagaaaacacttgaattgacgcaatataaaacaaaatgtgaaaaccaaagtggatttatcctgcagctcaagcagcttcttgcctgtggtaataccaagtttgaggcattgacagttgtgattcagcacctgctgtctgagcgggaggaagcactgaaacaacacaaaaccctatctcaagaacttgttaacctccggggagagctagtcactgcttcaaccacctgtgagaaattagaaaaagccaggaatgagttacaaacagtgtatgaagcattcgtccagcagcaccaggctgaaaaaacagaacgagagaatcggcttaaagagttttacaccagggagtatgaaaagcttcgggacacttacattgaagaagcagagaagtacaaaatgcaattgcaagagcagtttgacaacttaaatgctgcgcatgaaacctctaagttggaaattgaagctagccactcagagaaacttgaattgctaaagaaggcctatgaagcctccctttcagaaattaagaaaggccatgaaatagaaaagaaatcgcttgaagatttactttctgagaagcaggaatcgctagagaagcaaatcaatgatctgaagagtgaaaatgatgctttaaatgaaaaattgaaatcagaagaacaaaaaagaagagcaagagaaaaagcaaatttgaaaaatcctcagatcatgtatctagaacaggagttagaaagcctgaaagctgtgttagagatcaagaatgagaaactgcatcaacaggacatcaagttaatgaaaatggagaaactggtggacaacaacacagcattggttgacaaattgaagcgtttccagcaggagaatgaagaattgaaagctcggatggacaagcacatggcaatctcaaggcagctttccacggagcaggctgttctgcaagagtcgctggagaaggagtcgaaagtcaacaagcgactctctatggaaaacgaggagcttctgtggaaactgcacaatggggacctgtgtagccccaagagatcccccacatcctccgccatccctttgcagtcaccaaggaattcgggctccttccctagccccagcatttcacccagatgacacctccccaaagtccacagactctctgaaagcattttgatgcaggtctgcaggactgaccccaaggaggaacgtgggcacaagaggtatatcagcacacgtgtgatcaccgtagggtaactggagcgtcaccaccggcggaatcgcagcttctgagactggaactctggaggaagacttttgcctccgtccaaaagattcctccaaaaaaagatttaaaaaaagatttcggcatcgacacggacgttgttgcacaaagcacttaaagaacgagagcatcttgttcattgcctttttcacctaagcatagggggaaaaactctcagggccctattaagatttataacctttgtaatgttcttcaccacagacaccttcttgtgagttttcagtctgactgtgggggtggggggtgtgaatgaaatggatgtcacagagtgtcatgtgtctgatgcagcctcctctgctgtgtattaaatgtcaaaatctgaatatatctggatatgtactaatcaaataataatcaatcaatcagcatatacatttcagccaaagccatagaagaaaaagcaatagttgcttgaattatgatcatctaccaccaactctgctcagccctgtaacagggtagggagagggtataacaggaagagctttgacttgtccctgtctatacattctctgtatcttttgggggtaacttcttggcagtttttcagtgttcagccatgtcagttgaaactagatttttctgtagattttttacttacccatgtgagcctaacactatcctgtaattcattttctcaggctatgtgtaaatgtagaaccctaatttttctataaaaaaacaaactaactaactgtgtaaagaaagaaaaagggaagtaccaatgggtttttccaccttatttttacctttgatctacccttgcagatttaacctgtcttcttccctcccattattctcattttccttttacctttctccaccatccagagccacaaaagcaaaccttctacctcctacctacttttctctgggacaaggataaaggaatatgattttccagagccccagagccagctcatcttccaggtgctgaaaccactttccaaataaactaaagcctggatttgatattacaaattttgggaaatcttagaataaagaacgagaacaaggaagtcattggctagtataattaagaaaggtaggattcagtgcttaccgatgatgcagtacttgatagaagaaaacagtctgggaggatagcgctcatttttcagttaccctttaaggagtccctttgtctttgggaaagtagcagaatggtccgcttctttcccatgagtggaaaatgtggcttgtccaactctcctccaggttgcatttcagtttctttccaaaacttattacctcccctaatcctgagactttggaaaaggtggaaggaagaactgttgctttatctccccctccctgcatgtgtcaacattgtgatgtcagtatttactaatctacattcagtggctgtacaaataacagctgtagtaagaagagattcaggatgctagaggtgaatatttgggtcatttacatgtacactacatagcaagttgatactcatgttgcatgttcttttaaattagtgattttgtgtcttaagtctttaacttccaatacttcatcatgtatgtaaccttccatgtttgcttctgataaatggaaatgtaggttcactgccacttcatgagatatctctgctcacgcttccaagttgttctcaatgacattagccaaagttgggtttgccattcatcccctaggcatggtaaatcttgtgttgttccctgctgtcctccgtattacgtgaccggcaaataaatctcatagcagttaatataaaacatctttggaggatgggagagaacaggagggaagatgggaaacaaaatagagaattcttaagattttgtttaaaccaaatgtttcatgtagaatgcaaaatgttggcacgtcaaaaatatgaatgtgtagacaactgtagttgtgctcagtttgtagtgatgggaagtgtattttactctgatcaaataaataatgctggaatactcaagaattgcaaaaaaaaaaaaaaaaa

SEQ ID NO: 2196 - protein, 436 aa, Homo sapiens
MLLSPKFSLSTIHIRLTAKGLLRNLRLPSGFRRSTVVFHTVEKSRQKNPRSLCIQPQTAPDALPPEKTLELTQYKTKCENQSGFILQLKQLLACGNTKFEALTVVIQHLLSEREEALKQHKTLSQELVNLRGELVTASTTCEKLEKARNELQTVYEAFVQQHQAEKTERENRLKEFYTREYEKLRDTYIEEAEKYKMQLQEQFDNLNAAHETSKLEIEASHSEKLELLKKAYEASLSEIKKGHEIEKKSLEDLLSEKQESLEKQINDLKSENDALNEKLKSEEQKRRAREKANLKNPQIMYLEQELESLKAVLEIKNEKLHQQDIKLMKMEKLVDNNTALVDKLKRFQQENEELKARMDKHMAISRQLSTEQAVLQESLEKESKVNKRLSMENEELLWKLHNGDLCSPKRSPTSSAIPLQSPRNSGSFPSPSISPR

SEQ ID NO: 2197 - DNA, 1438 bp, Homo sapiens
agcacttcctcatagaccttggatgtgggaggattgcattcagtctagttcctggttgccggctgaaataacctgaattcaagccaggaagaagcagcaatctgtcttctggattaaaactgaagatcaacctactttcaacttactaagaaaggggatcatggacattgaagcatatcttgaaagaattggctataagaagtctaggaacaaattggacttggaaacattaactgacattcttcaacaccagatccgagctgttccctttgagaaccttaacatccattgtggggatgccatggacttaggcttagaggccatttttgatcaagttgtgagaagaaatcggggtggatggtgtctccaggtcaatcatcttctgtactgggctctgaccactattggttttgagaccacgatgttgggagggtatgtttacagcactccagccaaaaaatacagcactggcatgattcaccttctcctgcaggtgaccattgatggcaggaactacattgtcgatgctgggtttggacgctcataccagatgtggcagcctctggagttaatttctgggaaggatcagcctcaggtgccttgtgtcttccgtttgacggaagagaatggattctggtatctagaccaaatcagaagggaacagtacattccaaatgaagaatttcttcattctgatctcctagaagacagcaaataccgaaaaatctactcctttactcttaagcctcgaacaattgaagattttgagtctatgaatacatacctgcagacatctccatcatctgtgtttactagtaaatcattttgttccttgcagaccccagatggggttcactgtttggtgggcttcaccctcacccataggagattcaattataaggacaatacagatctaatagagttcaagactctgagtgaggaagaaatagaaaaagtgctgaaaaatatatttaatatttccttgcagagaaagcttgtgcccaaacatggtgatagattttttactatttagaataaggagtaaaacaatcttgtctatttgtcatccagctcaccagttatcaactgacgacctatcatgtatcttctgtacccttaccttattttgaagaaaatcctagacatcaaatcatttcacctataaaaatgtcatcatatataattaaacagctttttaaagaaacataaccacaaaccttttcaaataataataataataataataaaaaatgtattttaaagatggcctgtggttatcttggaaattggtgatttatgctagaaagcttttaatgttggtttattgttgaattcctagaaaagttttattggtagatgagtaaataaaatattgtaaaaaaacttattgtctataaagtatattaaaacattgttggctaataaaaaaaaaaaaaaa

SEQ ID NO: 2198 - protein, 290 aa, Homo sapiens
MDIEAYLERIGYKKSRNKLDLETLTDILQHQIRAVPFENLNIHCGDAMDLGLEAIFDQVVRRNRGGWCLQVNHLLYWALTTIGFETTMLGGYVYSTPAKKYSTGMIHLLLQVTIDGRNYIVDAGFGRSYQMWQPLELISGKDQPQVPCVFRLTEENGFWYLDQIRREQYIPNEEFLHSDLLEDSKYRKIYSFTLKPRTIEDFESMNTYLQTSPSSVFTSKSFCSLQTPDGVHCLVGFTLTHRRFNYKDNTDLIEFKTLSEEEIEKVLKNIFNISLQRKLVPKHGDRFFTI

SEQ ID NO: 2199 - DNA, 1276 bp, Homo sapiens
tgagatcacttcccttgcacagtttggaagggagagcactttattacagaccttggaagcaagaggattgcattcagcctagttcctggttgctggccaaagggatcatggacattgaagcatattttgaaagaattggctataagaactctaggaacaaattggacttggaaacattaactgacattcttgagcaccagatccgggctgttccctttgagaaccttaacatgcattgtgggcaagccatggagttgggcttagaggctatttttgatcacattgtaagaagaaaccggggtgggtggtgtctccaggtcaatcaacttctgtactgggctctgaccacaatcggttttcagaccacaatgttaggagggtatttttacatccctccagttaacaaatacagcactggcatggttcaccttctcctgcaggtgaccattgacggcaggaattacattgtcgatgctgggtctggaagctcctcccagatgtggcagcctctagaattaatttctgggaaggatcagcctcaggtgccttgcattttctgcttgacagaagagagaggaatctggtacctggaccaaatcaggagagagcagtatattacaaacaaagaatttcttaattctcatctcctgccaaagaagaaacaccaaaaaatatacttatttacgcttgaacctcgaacaattgaagattttgagtctatgaatacatacctgcagacgtctccaacatcttcatttataaccacatcattttgttccttgcagaccccagaaggggtttactgtttggtgggcttcatcctcacctatagaaaattcaattataaagacaatacagatctggtcgagtttaaaactctcactgaggaagaggttgaagaagtgctgaaaaatatatttaagatttccttggggagaaatctcgtgcccaaacctggtgatggatcccttactatttagaataaggaacaaaataaacccttgtgtatgtatcacccaactcactaattatcaacttatgtgctatcagatatcctctctaccctcacgttattttgaagaaaatcctaaacatcaaatactttcatccataaaaatgtcagcatttattaaaaaacaataactttttaaagaaacataaggacacattttcaaattaataaaaataaaggcattttaaggatggcctgtgattatcttgggaagcagagtgattcatgctagaaaacatttaatattgatttattgttgaattc

SEQ ID NO: 2200 - protein, 290 aa, Homo sapiens
MDIEAYFERIGYKNSRNKLDLETLTDILEHQIRAVPFENLNMHCGQAMELGLEAIFDHIVRRNRGGWCLQVNQLLYWALTTIGFQTTMLGGYFYIPPVNKYSTGMVHLLLQVTIDGRNYIVDAGSGSSSQMWQPLELISGKDQPQVPCIFCLTEERGIWYLDQIRREQYITNKEFLNSHLLPKKKHQKIYLFTLEPRTIEDFESMNTYLQTSPTSSFITTSFCSLQTPEGVYCLVGFILTYRKFNYKDNTDLVEFKTLTEEEVEEVLKNIFKISLGRNLVPKPGDGSLTI

SEQ ID NO: 2201 - DNA, 8192 bp, Homo sapiens
aacaaagagcacgcggcgctggccgccggcactcgcgccctgaggctgcggccccggagcgcccggcggcggtttcggcgcgcggccgggctggcgatggaagatggaaggaaggagcgcagcggcagagacatttgtttgggtgaacaatgcatctgcacattcccagagtgttgccaaggccaaatatgaatttttatttggcagatctgaagggaaagctccagatactagtgatcatggaggaagcactttactcccaccaaatgtcacaaatgaatttccagaatatgggaccatggaggaaggtggagaaggcctaagggcttctctggaatttgatggtgaggctctgccatgccacccacaagagcagcagggtgtccagcctcttactggctgccactctgggctcgacagtgttacagaaggaccaaaagatgtcagagaggccccctctcaaagtcatctcaaggaacaaagtttacagcccattgactctttgatttcagctctgaaagccacagaagccagaatcatttccggaacattacaggctacaaaggtactggaccaagatgctgtttctagtttttcagttcagcaggtggaaaaagagctggacactgccagtcgtaaaacacagagagtcaacaaactgctccctgctggccaaaaaaatttaccagaaatacctctttcagctgaagtaacaacggaggaaagtttttatttgagcatccagaaagatctcaccgcgctgttaactggagacactcaggcagagatttcccagataatgaataatgggaggaaaggggctgtctgtgtgcaggagccatcttgtcctttggcctccctcgggagctcagcagtgacctgccactctgcaggcagtgttggtttcttgaaagagcagaggtctgctcttgggagagagcacccagggggatgtgatcgaagcagctccatgggacgcccaggccgggtcaaacatgtggaatttcaaggagtggaaatactgtggacaggaggagacaagagagagacccagcatcctatagattttgagacatcactgcaaagaacagcctctcctgacagcaaagagtcttccaaagtgccacgccatctcatctcatcagctggtttgtgtaattcaagtagtttaactgagaatgtttgggatgaatcctggaaagctccttcagagaggcctggcactagctcggggacattttcccctgtgcgtcttgatgagagtggagaggatgaagtcttcctacaggaaaacaaacagcatcttgagaagacacctaaaccagagagagacagggaaaggatcagcgaacaagaggagcacgttaagggggaagatgaagacatccttgggcctggatatacggaggactccaccgacgtgtacagctcccagtttgaaaccattttggacaacacttctttatactacagtgcagagtccctggagacattatactcagagcctgatagctattttagctttgaaatgcccctcactccaatgatacaacagcgcattaaagaaggtggtcagttcttggagaggacatcagggggaggacatcaggatatcctgagtgtgtctgcagatggtggcatcgtgatgggctattctagtggcgtcaccaatgggctgaatgatgccagcgactccatctacacgaaaggcaccccggagattgctttctggggaagcaatgctggggtgaaaacaacacggctagaagctcattctgaaatggggagcactgaaattttggaaaaggagaccccagaaaatctcagtaatggtaccagcagcaatgtggaagcagccaaaaggttggccaaacgcctttatcagctggacagattcaaaagatcagatgttgcaaaacaccttggcaagaacaacgaatttagcaaactagttgcagaagaatatctgaagttttttgattttacaggaatgacgctggatcagtcactcaggtatttctttaaagcattctctcttgtgggagaaactcaagaacgagagagagttttaatacacttctccaatagatatttttattgtaacccagataccattgcttcacaagatggagtccattgccttacctgtgcaataatgcttcttaataccgatctacatggccaaatattggaaagaagatgacctgtcaggagttcattgcaaatctgcaaggggtaaatgagggtgttgatttctccaaggatctgctgaaagctctgtacaactcaatcaagaatgagaagcttgaatgggcagtagatgatgaagagaaaaaaaagtctccctcagaaagtactgaggagaaagctaacggaacacatccaaagaccatcagtcgtattggaagtactactaacccatttttggacattcctcatgatccaaatgctgctgtgtacaaaagtggattcttggctcggaaaattcatgcagatatggatggaaagaagactccaagaggaaaacgaggatggaaaaccttttatgctgtactgaagggaacagttctttacttgcaaaaggatgaatacaagccagaaaaggccttgtctgaagaggacttgaaaaacgctgtgagtgtgcaccacgcattggcatccaaggccacggactatgagaagaaaccaaacgtgtttaaacttaaaactgccgactggagggtcttgctttttcaaactcagagcccagaggaaatgcaagggtggataaacaaaatcaattgtgtggcagctgtattttctgcaccaccatttccagcagcaatcggctctcagaagaagtttagccgcccacttctgcctgccactacaacaaaactgtctcaggaggagcaactgaagtcacatgaaagtaagctgaagcagatcaccaccgagctggccgagcaccgctcatatccccccgacaagaaggtcaaagccaaggacgtcgatgagtacaaactgaaagaccactatctggagtttgagaaaacccgctatgaaatgtatgtcagcattctcaaggaaggaggcaaagagctactgagtaacgatgaaagcgaggctgcaggactgaagaagtcgcactcgagtccttcgctgaacccggatacttctccaatcactgccaaagtcaagcgtaacgtgtcagagaggaaggatcaccgacctgaaacaccaagcattaagcaaaaagttacttagagtccatctgcggccaggaagtgctggtcatggagcaaaatagggtttttcaagatctttctggtaatccgtgaatatatttaaaaaaaaaaagtctgtgacaaaacggtgcattagtaattttttctattgtatatttttgttagtttctgtacagattgtctttgctcttgatttcttttgctttgatgatttttgcaacttgatagctaatgcaccttttctgtgaggaggaggggatcgtgatttcagaatgaattatgtatcccttctcttttggttttctcttgtttgcagtctgctcagttgttttatgtattctcatatcaactgttaaacttttttttaaggttaaagaatttaatccattgtgaaacacttaactggacaaactgtagttttagtaaattctagctggagttaatatacgcctttatatgtgaaatcttgcccagtcacagaggtagaattgagcactcacagatgctccagtaagaatcacagtgctgggaatctagttgctccaatatgaggcagcttcatgtgcagcttagcacttgttgttgagatcggaccctgctggaagcagggaaaagaagcgtgaagatcgtaggattgagaacttagggaagcacattagcttgcttgaagtgctgattccatttcagccaagcaagggaaagaggaagtggagtcattttgcctttgaaggctgaggaaagattgatacccagttaattttgtttgctaaaggatgggggcaataatcggcccttgaggagctgcagcagtaggcatgtgctcagtctgcaggaattgttacctcactcccacagggtctagactagaaatccatcatctctatcgttgatatccttccatccaggaatagatttttcttactctacatatgtgtgtgtgcgtgcgtgtgtgtgcgtgtgtgggcatggggttgtgtcctggttgtgatattgaggtcttccttcctaacaaattaatactaaaatgaaacagcttttcttgtgtccttaagacaaaataaggaaggaaaacgtagctgcagttgtccacgatggatattggttctttaaaatatatctgaaagtagtagtcagaatgaattatggttggaaaactgaggaatcttctggttgcaggtgcaaagtgactttgtttattcttgtctcagtctccttgatagccacttcactctgctactactcaactttctcctaaaaatacttcatctattttcagtcctttctttctgtctactcaaaatggttctattaactttgcagtcatgagcttgttccagttacagtccctttgaagttcagggtgataaacagaatattcttctgtagaggaagagaaaggagtgaaagtttagcccactgagacctagagctttgtgatttcctaaccttgaaactctgtaatccctaaagttaaaatctccgcaagtggcacaacttcagaactaatagtatcactttgatttttctttttcctcccttagaaagtttctctagttctatagtttatttgttgaaggtactatgaccaaagaatcagctgctctacaggaatagcatggttccagtgaattagagaaaacctgctgtaaagccatggtagtgtctaagtggtatgttattatgatgtactagcatttatttacagaattatttattaacgtttacttccttcccctctgtaaatgtccatgactattgcccagagaaggcttacccctctctagggttgcagttgctttctttgtaataagtattttgccacacctgtaaaaaaaaaaacctcacttttaactctctgccttgtttgggtaaaggcagtaactaagtttatgtttcagaactgcaaaacaaacaggatagttaccaatatggcccatgtgtcagattgatttttgtagcctctcactgaatccaacatatccacaagcaagttatctgtctttctacctgataatctaaattatcaggatatttgttttctgcctaaatgtttatactaagccgaggggagagaggtacctagaccatgtcatctacgagcttcagtaactaaagaaaaaggaacttccctgagtggcttgaatgtgtttgcccacagtctatatctatgtatatagaatgtctgtatgtattttacttatttaatatacattgaatggtaccttgctacagtatttctgacatttagagtagtgttgaaatactcggctagcatcagcaccactatagcactgtccgtgtcatatgagtcactaatattaactccagggacttctggataggctaatagatcattggatacgaagggctcttttgaagcttcagtataccatgtttgcatagtttatctttaaaaacaactttaaaggttcttttgtgagccaggatctcagactgccgtagcatgatgctgtccatctttagcgcatgggctgagaacacctcttccctgaggcttctgaaggttgctgtctgtcatgagtgcatgaaggaggccaagagtttatgctatgggaggaaccagtcactgatttgcctagattctgagagtctggcccatagccaaccacattttcctttgggataatttatttcctgtggcatctagccagaagaaattgaggatgtttcctttcacagctgctccaagcctgttgcccaattcacggtacaagggagcaccccttccctttcctctgaaggtacgccacccacctccgtcgcccacctcagcgcccaggagccttgggacttccttccatatgataaatcattcttcttcacgtcaatacacttcatattaatttctagtacagaaaatcttgacagctatcagaatgccttggtcatagtgttgttgcaaaattgaccatacaggtggcccatgtataaaatctgaattttaggggtttgtccccacctcgcatgctggcttttacagggaggtgtctgggattcctcattagcaatcaaaacttaattactgggatgcagagtccttactttatcgccagcccgtaggcatttctgaagtgcacttttttgaaacatcattttgctaactctcagcagtgtctaattaaactgagcaatacttttgtgaattttaattaatctcagcaaaaccatgatgggagagagtcctctgatggaaatgtagtccctggattatgtgtaacctttttattgctcttagatgcagaggatagaaagcattttttggtgcagtggtcttgtggcaaacacaagaccctctatgcgtctccaactgttatcctaatctagaaaatgaggactggcccctgggcaaaagtgacatgaggaatttactctggaagaggaaaatctgggtggctttccaaggctaagataggtttgtatttcaccctgtggccaagctacagaacttctgagattgtggaagaatttttgcaaccagcagggaaagaggcctcttactgcctaaacacaaagttacactgagcttttctactgtcctttgcctattgctccctctatcatgtaaagatctgggaaggatgagaggcagggcctgcttgtcatgagctgcactcttttctttttaactaatcattgacaattggaagaaaattgacgttaaagaagtttctccattgtcttactaacaaaaccttttgggtttcattaattgtccttgaaattgagttcctttggcatttttccttgcagtcatcagttaagcatgttgcatcctgaattcacagaagtttagctttgcaggtttgaatctctgtaatttaactcccgtggacttggtcgagttttcagcaggttgggagccacctctcttcatttcagcagtgagtcatcccttgacttttcaaatgacagaattttttccaattgtaaaattagcactgtaaaacaaagaaccaaagtggcatcctaagagttgttaaacctgaagtctagtttatgaggaattgtccaagttggagtttaaatagtatctgcttttgtctcaaagcatctaagttattctgacagaaaatggtaagtcagctttgcaggcagatgcgcctctgggcctcctaccttgctccacagctttctggccatcttgtctcccaggccatgccactgctctgccacatgtcagcaaatttctttccaccagtcttatagcatcttacatgatcaaatcatcacagaataaccccgtgatagattattgatagcaatagagaggggctttgtcactgatttttctctcagattccttttccatctctcatccataaaggaaggactgaaatccaaaggcattctccttttgtacctacagtatccagaacccacgtgggcagccttctgcttatgacaataattggcccattgcatgcagagagaatgtcttcatagagagaatgtcattaaatacttgaatctgcatgacagtttgacttgaatgcaacagcaggaaaattttgcaagttacataattgtatatacagtaggttttcttaagtctcttcggttcatcctttgtaatttgtgtgtgtatctgtagtattgcaggcttttggagactattcttacaggcagtatgtcagtcatcaaagaaaatgctgtcacctgccattgttgtatttgtgggtatttatagttgtatgtatgtaaatgcatcagtgtgtagattgcatatcagtgtatggtacatgtacatcaaaattatttttgtccttaatcagtgtgatatgaaaagcaagtacaacctcataggactgattatataatgaagttgttgagagtatatatagtggtattgttttattaaacttaaactcaaataatattttgattaaaatttttaataagactttatgctagaaaattctttgagctttgaatcaccagggcaaa

SEQ ID NO: 2202 - protein, 699 aa, Homo sapiens
MEGRSAAAETFVWVNNASAHSQSVAKAKYEFLFGRSEGKAPDTSDHGGSTLLPPNVTNEFPEYGTMEEGGEGLRASLEFDGEALPCHPQEQQGVQPLTGCHSGLDSVTEGPKDVREAPSQSHLKEQSLQPIDSLISALKATEARIISGTLQATKVLDQDAVSSFSVQQVEKELDTASRKTQRVNKLLPAGQKNLPEIPLSAEVTTEESFYLSIQKDLTALLTGDTQAEISQIMNNGRKGAVCVQEPSCPLASLGSSAVTCHSAGSVGFLKEQRSALGREHPGGCDRSSSMGRPGRVKHVEFQGVEILWTGGDKRETQHPIDFETSLQRTASPDSKESSKVPRHLISSAGLCNSSSLTENVWDESWKAPSERPGTSSGTFSPVRLDESGEDEVFLQENKQHLEKTPKPERDRERISEQEEHVKGEDEDILGPGYTEDSTDVYSSQFETILDNTSLYYSAESLETLYSEPDSYFSFEMPLTPMIQQRIKEGGQFLERTSGGGHQDILSVSADGGIVMGYSSGVTNGLNDASDSIYTKGTPEIAFWGSNAGVKTTRLEAHSEMGSTEILEKETPENLSNGTSSNVEAAKRLAKRLYQLDRFKRSDVAKHLGKNNEFSKLVAEEYLKFFDFTGMTLDQSLRYFFKAFSLVGETQERERVLIHFSNRYFYCNPDTIASQDGVHCLTCAIMLLNTDLHGQILERR

SEQ ID NO: 2203 - DNA, 6822 bp, Homo sapiens
aggctcggcagtcactgaacttgggagctgaagaatactggacggggcttcggagaggaaggatggtccaggcgcaccccaggggttgcgatgggctcttcttggtgtctgtatggttgctgcaatgctggggtgaaaacaacacggctagaagctcattctgaaatggggagcactgaaattttggaaaaggagaccccagaaaatctcagtaatggtaccagcagcaatgtggaagcagccaaaaggttggccaaacgcctttatcagctggacagattcaaaagatcagatgttgcaaaacaccttggcaagaacaacgaatttagcaaactagttgcagaagaatatctgaagttttttgattttacaggaatgacgctggatcagtcactcaggtatttctttaaagcattctctcttgtgggagaaactcaagaacgagagagagttttaatacacttctccaatagatatttttattgtaacccagataccattgcttcacaagatggagtccattgccttacctgtgcaataatgcttcttaataccgatctacatggccacaatattggaaagaagatgacctgtcaggagttcattgcaaatctgcaaggggtaaatgagggtgttgatttctccaaggatctgctgaaagctctgtacaactcaatcaagaatgagaagcttgaatgggcagtagatgatgaagagaaaaaaaagtctccctcagaaagtactgaggagaaagctaacggaacacatccaaagaccatcagtcgtattggaagtactactaacccatttttggacattcctcatgatccaaatgctgctgtgtacaaaagtggattcttggctcggaaaattcatgcagatatggatggaaagaagactccaagaggaaaacgaggatggaaaaccttttatgctgtactgaagggaacagttctttacttgcaaaaggatgaatacaagccagaaaaggccttgtctgaagaggacttgaaaaacgctgtgagtgtgcaccacgcattggcatccaaggccacggactatgagaagaaaccaaacgtgtttaaacttaaaactgccgactggagggtcttgctttttcaaactcagagcccagaggaaatgcaagggtggataaacaaaatcaattgtgtggcagctgtattttctgcaccaccatttccagcagcaatcggctctcagaagaagtttagccgcccacttctgcctgccactacaacaaaactgtctcaggaggagcaactgaagtcacatgaaagtaagctgaagcagatcaccaccgagctggccgagcaccgctcatatccccccgacaagaaggtcaaagccaaggacgtcgatgagtacaaactgaaagaccactatctggagtttgagaaaacccgctatgaaatgtatgtcagcattctcaaggaaggaggcaaagagctactgagtaacgatgaaagcgaggctgcaggactgaagaagtcgcactcgagtccttcgctgaacccggatacttctccaatcactgccaaagtcaagcgtaacgtgtcagagaggaaggatcaccgacctgaaacaccaagcattaagcaaaaagttacttagagtccatctgcggccaggaagtgctggtcatggagcaaaatagggtttttcaagatctttctggtaatccgtgaatatatttaaaaaaaaaaagtctgtgacaaaacggtgcattagtaattttttctattgtatatttttgttagtttctgtacagattgtctttgctcttgatttcttttgctttgatgatttttgcaacttgatagctaatgcaccttttctgtgaggaggaggggatcgtgatttcagaatgaattatgtatcccttctcttttggttttctcttgtttgcagtctgctcagttgttttatgtattctcatatcaactgttaaacttttttttaaggttaaagaatttaatccattgtgaaacacttaactggacaaactgtagttttagtaaattctagctggagttaatatacgcctttatatgtgaaatcttgcccagtcacagaggtagaattgagcactcacagatgctccagtaagaatcacagtgctgggaatctagttgctccaatatgaggcagcttcatgtgcagcttagcacttgttgttgagatcggaccctgctggaagcagggaaaagaagcgtgaagatcgtaggattgagaacttagggaagcacattagcttgcttgaagtgctgattccatttcagccaagcaagggaaagaggaagtggagtcattttgcctttgaaggctgaggaaagattgatacccagttaattttgtttgctaaaggatgggggcaataatcggcccttgaggagctgcagcagtaggcatgtgctcagtctgcaggaattgttacctcactcccacagggtctagactagaaatccatcatctctatcgttgatatccttccatccaggaatagatttttcttactctacatatgtgtgtgtgcgtgcgtgtgtgtgcgtgtgtgggcatggggttgtgtcctggttgtgatattgaggtcttccttcctaacaaattaatactaaaatgaaacagcttttcttgtgtccttaagacaaaataaggaaggaaaacgtagctgcagttgtccacgatggatattggttctttaaaatatatctgaaagtagtagtcagaatgaattatggttggaaaactgaggaatcttctggttgcaggtgcaaagtgactttgtttattcttgtctcagtctccttgatagccacttcactctgctactactcaactttctcctaaaaatacttcatctattttcagtcctttctttctgtctactcaaaatggttctattaactttgcagtcatgagcttgttccagttacagtccctttgaagttcagggtgataaacagaatattcttctgtagaggaagagaaaggagtgaaagtttagcccactgagacctagagctttgtgatttcctaaccttgaaactctgtaatccctaaagttaaaatctccgcaagtggcacaacttcagaactaatagtatcactttgatttttctttttcctcccttagaaagtttctctagttctatagtttatttgttgaaggtactatgaccaaagaatcagctgctctacaggaatagcatggttccagtgaattagagaaaacctgctgtaaagccatggtagtgtctaagtggtatgttattatgatgtactagcatttatttacagaattatttattaacgtttacttccttcccctctgtaaatgtccatgactattgcccagagaaggcttacccctctctagggttgcagttgctttctttgtaataagtattttgccacacctgtaaaaaaaaaaacctcacttttaactctctgccttgtttgggtaaaggcagtaactaagtttatgtttcagaactgcaaaacaaacaggatagttaccaatatggcccatgtgtcagattgatttttgtagcctctcactgaatccaacatatccacaagcaagttatctgtctttctacctgataatctaaattatcaggatatttgttttctgcctaaatgtttatactaagccgaggggagagaggtacctagaccatgtcatctacgagcttcagtaactaaagaaaaaggaacttccctgagtggcttgaatgtgtttgcccacagtctatatctatgtatatagaatgtctgtatgtattttacttatttaatatacattgaatggtaccttgctacagtatttctgacatttagagtagtgttgaaatactcggctagcatcagcaccactatagcactgtccgtgtcatatgagtcactaatattaactccagggacttctggataggctaatagatcattggatacgaagggctcttttgaagcttcagtataccatgtttgcatagtttatctttaaaaacaactttaaaggttcttttgtgagccaggatctcagactgccgtagcatgatgctgtccatctttagcgcatgggctgagaacacctcttccctgaggcttctgaaggttgctgtctgtcatgagtgcatgaaggaggccaagagtttatgctatgggaggaaccagtcactgatttgcctagattctgagagtctggcccatagccaaccacattttcctttgggataatttatttcctgtggcatctagccagaagaaattgaggatgtttcctttcacagctgctccaagcctgttgcccaattcacggtacaagggagcaccccttccctttcctctgaaggtacgccacccacctccgtcgcccacctcagcgcccaggagccttgggacttccttccatatgataaatcattcttcttcacgtcaatacacttcatattaatttctagtacagaaaatcttgacagctatcagaatgccttggtcatagtgttgttgcaaaattgaccatacaggtggcccatgtataaaatctgaattttaggggtttgtccccacctcgcatgctggcttttacagggaggtgtctgggattcctcattagcaatcaaaacttaattactgggatgcagagtccttactttatcgccagcccgtaggcatttctgaagtgcacttttttgaaacatcattttgctaactctcagcagtgtctaattaaactgagcaatacttttgtgaattttaattaatctcagcaaaaccatgatgggagagagtcctctgatggaaatgtagtccctggattatgtgtaacctttttattgctcttagatgcagaggatagaaagcattttttggtgcagtggtcttgtggcaaacacaagaccctctatgcgtctccaactgttatcctaatctagaaaatgaggactggcccctgggcaaaagtgacatgaggaatttactctggaagaggaaaatctgggtggctttccaaggctaagataggtttgtatttcaccctgtggccaagctacagaacttctgagattgtggaagaatttttgcaaccagcagggaaagaggcctcttactgcctaaacacaaagttacactgagcttttctactgtcctttgcctattgctccctctatcatgtaaagatctgggaaggatgagaggcagggcctgcttgtcatgagctgcactcttttctttttaactaatcattgacaattggaagaaaattgacgttaaagaagtttctccattgtcttactaacaaaaccttttgggtttcattaattgtccttgaaattgagttcctttggcatttttccttgcagtcatcagttaagcatgttgcatcctgaattcacagaagtttagctttgcaggtttgaatctctgtaatttaactcccgtggacttggtcgagttttcagcaggttgggagccacctctcttcatttcagcagtgagtcatcccttgacttttcaaatgacagaattttttccaattgtaaaattagcactgtaaaacaaagaaccaaagtggcatcctaagagttgttaaacctgaagtctagtttatgaggaattgtccaagttggagtttaaatagtatctgcttttgtctcaaagcatctaagttattctgacagaaaatggtaagtcagctttgcaggcagatgcgcctctgggcctcctaccttgctccacagctttctggccatcttgtctcccaggccatgccactgctctgccacatgtcagcaaatttctttccaccagtcttatagcatcttacatgatcaaatcatcacagaataaccccgtgatagattattgatagcaatagagaggggctttgtcactgatttttctctcagattccttttccatctctcatccataaaggaaggactgaaatccaaaggcattctccttttgtacctacagtatccagaacccacgtgggcagccttctgcttatgacaataattggcccattgcatgcagagagaatgtcttcatagagagaatgtcattaaatacttgaatctgcatgacagtttgacttgaatgcaacagcaggaaaattttgcaagttacataattgtatatacagtaggttttcttaagtctcttcggttcatcctttgtaatttgtgtgtgtatctgtagtattgcaggcttttggagactattcttacaggcagtatgtcagtcatcaaagaaaatgctgtcacctgccattgttgtatttgtgggtatttatagttgtatgtatgtaaatgcatcagtgtgtagattgcatatcagtgtatggtacatgtacatcaaaattatttttgtccttaatcagtgtgatatgaaaagcaagtacaacctcataggactgattatataatgaagttgttgagagtatatatagtggtattgttttattaaacttaaactcaaataatattttgattaaaatttttaataagactttatgctagaaaattctttgagctttgaatcaccagggcaaaaatgactttcaactaaccttgtgaatcttttgcagtgtactgtgtgcaataccaagggcatagctccctgtaatttgggaaatacagaaagaaaagaaaaaaaaaaaaaaaggcagcctgtgcagtcttagtaactttagtattaagagcacttaaagtcaaactgacaattttgggcttattacaaaatgtgatgctttaaagcacacgttctttattgttgttgtaattagtccataaaaaa

SEQ ID NO: 2204 - protein, 513 aa, Homo sapiens
MGSSWCLYGCCNAGVKTTRLEAHSEMGSTEILEKETPENLSNGTSSNVEAAKRLAKRLYQLDRFKRSDVAKHLGKNNEFSKLVAEEYLKFFDFTGMTLDQSLRYFFKAFSLVGETQERERVLIHFSNRYFYCNPDTIASQDGVHCLTCAIMLLNTDLHGHNIGKKMTCQEFIANLQGVNEGVDFSKDLLKALYNSIKNEKLEWAVDDEEKKKSPSESTEEKANGTHPKTISRIGSTTNPFLDIPHDPNAAVYKSGFLARKIHADMDGKKTPRGKRGWKTFYAVLKGTVLYLQKDEYKPEKALSEEDLKNAVSVHHALASKATDYEKKPNVFKLKTADWRVLLFQTQSPEEMQGWINKINCVAAVFSAPPFPAAIGSQKKFSRPLLPATTTKLSQEEQLKSHESKLKQITTELAEHRSYPPDKKVKAKDVDEYKLKDHYLEFEKTRYEMYVSILKEGGKELLSNDESEAAGLKKSHSSPSLNPDTSPITAKVKRNVSERKDHRPETPSIKQKVT

SEQ ID NO: 2205 - DNA, 2880 bp, Homo sapiens
attttttgctcagcccgcctgcgccgcttgggacgcctctgcctttccctccctcccttccccgacggcttctggcggccaagcggatgtggcgggtgatcgagccaccctgcccaggggcgcccagcactggttcagtgaacagcattttggacaggacatttggtgccaggtctgagtagccagtttgctgaattattgtcccagtcagccaggattgtgagctgtttgggaagtttcgtggaagcgcccaagtgccagcacaggtggagggacacctggaggccagtttcaggaacttttgccacaagtataaaagacttcagaagtgcaaagatgctgaaacagatactgtcggagatgtacatagatcctgatctactggcagagctcagcgaagaacagaaacagatcctgttcttcaagatgagagaggaacagatccgacgatggaaagaaagagaagcagctatggaaagaaaggagtccctgccagtgaaacccagaccaaagaaagagaatggcaaatcggttcattggaaacttggagctgataaggaagtctgggtatgggtgatgggcgaacaccatctagataaaccctatgatgtgctctgtaatgaaattattgctgagagggcccggctgaaagcagaacaggaggcagaagagcccagaaaaactcactctgaagaattcaccaatagcttgaaaacaaaatcacagtaccatgatctgcaggctccggataaccagcagactaaagacatctggaagaaagtggcagaaaaggaggaactggagcaaggatctaggccagcaccaaccctggaagaagagaaaatccgatcactctccagttcttcaagaaatattcaacaaatgttggcagattcaatcaatcgtatgaaggcatatgcatttcaccagaagaaagaatctatgaagaaaaaacaagatgaagaaataaatcaaatagaagaagagagaacgaagcagatttgtaagagctggaaagaagactcggaatggcaggcatctctgcgaaaatccaaagcagctgatgagaagagacgctccttggctaaacaagcacgagaagactacaagaggttgtccctcggggcccagaaaggaagaggcggtgagaggctgcaaagccccttgcgtgttccgcagaaaccagaaagacctccccttccacccaagcctcagttcctaaactcaggggcatatcctcaaaaacctcttagaaatcagggagtggtgaggacactgtccagctctgcccaagaggacatcatccggtggtttaaagaggagcagctaccacttcgagcgggctaccagaaaacctcagacaccatagccccctggttccatggaattctcacactcaagaaagcaaatgaacttcttctgagcacaggcatgcccggcagttttctcatccgagtcagtgaaaggatcaaaggctatgccctgtcctatctgtcggaggacggctgtaaacatttcctcatcgatgcctctgcagacgcctacagcttcctgggcgtggaccagctacagcatgccaccttggcggatttggtggaatatcacaaggaggaacccatcacttccctggggaaggagctccttctctatccctgtggtcagcaggaccagctgcctgactacctggagctgtttgagtgacagcctccatcagggtcatcctacagcctccaagcgggctttcccctggacaaatgccactgcaacatttatgtgtgaagccaaaatcaccctgcagcagagccaatactgatcaactgaaagtaaagtatccatggagtcctcattgacacctcttttctgcacaaatactggaattcaatgtcaagagaaaatgacctctgctcaaaagggagaagagtctcaatttcagcaagtacctgtcatgaagggtatgaccttaatgatgtacataaaataaaacaaatgaagaaatggaaaacttttagaaattaaggtgtacttgaaaacgaatatctatcatatgacccctgcactccctctgtatcatctcaggaggtttcaggggcctgttgacatgaagtttcgaagtttcatgttggctttggaatggtagcaaaagcctttcctggctgagatgatgcttaaaacacacctcacttattgtacatgttggaaccaggacatgagagacatagaaaaacagaagtcatgaatgtaaattgaatgagaggcttaacatgcatgaaaatacagatggacctgcaggaaagtgagcaaacatcgctgagtttgttttcttgttcgggagaatggggccggggctggcctggcctcccctggatatactctatagtgcaccaaaaggataaagcatctgtacatgtatttttttattttttatcagaagtgcttagacaagaacagaataagcaggctgtttggatgctacttgtggttgaattgtgttcccccaaaatatatggtgaagtcttaacccccatccccgtgaatgggaccttgtttggaaatagggtctttgcagatatagtcaagatgaggtcacattggattagggtgggccccaaatccaatgactggcatccttaggagaagagagagttttggtaatagacacaaatgcagtgggaagaagaccaggggacaagaggcaagttggagtgatgcagccggaagggaagggacaccaaggatctccggccaccagcagaagccagcagagaggcatgggacaggttccccacaagccttagaaggaagcatggccctgacttcagaattccagactccagaactggaagaataaatgtctgttgttttaaaaaaaaaaaaaaaaaa

SEQ ID NO: 2206 - protein, 454 aa, Homo sapiens
MLKQILSEMYIDPDLLAELSEEQKQILFFKMREEQIRRWKEREAAMERKESLPVKPRPKKENGKSVHWKLGADKEVWVWVMGEHHLDKPYDVLCNEIIAERARLKAEQEAEEPRKTHSEEFTNSLKTKSQYHDLQAPDNQQTKDIWKKVAEKEELEQGSRPAPTLEEEKIRSLSSSSRNIQQMLADSINRMKAYAFHQKKESMKKKQDEEINQIEEERTKQICKSWKEDSEWQASLRKSKAADEKRRSLAKQAREDYKRLSLGAQKGRGGERLQSPLRVPQKPERPPLPPKPQFLNSGAYPQKPLRNQGVVRTLSSSAQEDIIRWFKEEQLPLRAGYQKTSDTIAPWFHGILTLKKANELLLSTGMPGSFLIRVSERIKGYALSYLSEDGCKHFLIDASADAYSFLGVDQLQHATLADLVEYHKEEPITSLGKELLLYPCGQQDQLPDYLELFE

SEQ ID NO: 2207 - DNA, 3877 bp, Homo sapiens
ctccttaggtggaaaccctgggagtagagtactgacagcaaagaccgggaaagaccatacgtccccgggcaggggtgacaacaggtgtcatctttttgatctcgtgtgtggctgccttcctatttcaaggaaagacgccaaggtaattttgacccagaggagcaatgatgtagccacctcctaaccttcccttcttgaacccccagttatgccaggatttactagagagtgtcaactcaaccagcaagcggctccttcggcttaacttgtggttggaggagagaacctttgtggggctgcgttctcttagcagtgctcagaagtgacttgcctgagggtggaccagaagaaaggaaaggtcccctcttgctgttggctgcacatcaggaaggctgtgatgggaatgaaggtgaaaacttggagatttcacttcagtcattgcttctgcctgcaagatcatcctttaaaagtagagaagctgctctgtgtggtggttaactccaagaggcagaactcgttctagaaggaaatggatgcaagcagctccgggggccccaaacgcatgcttcctgtggtctagcccagggaagcccttccgtgggggccccggctttgagggatgccaccggttctggacgcatggctgattcctgaatgatgatggttcgccgggggctgcttgcgtggatttcccgggtggtggttttgctggtgctcctctgctgtgctatctctgtcctgtacatgttggcctgcaccccaaaaggtgacgaggagcagctggcactgcccagggccaacagccccacggggaaggaggggtaccaggccgtccttcaggagtgggaggagcagcaccgcaactacgtgagcagcctgaagcggcagatcgcacagctcaaggaggagctgcaggagaggagtgagcagctcaggaatgggcagtaccaagccagcgatgctgctggcctgggtctggacaggagccccccagagaaaacccaggccgacctcctggccttcctgcactcgcaggtggacaaggcagaggtgaatgctggcgtcaagctggccacagagtatgcagcagtgcctttcgatagctttactctacagaaggtgtaccagctggagactggccttacccgccaccccgaggagaagcctgtgaggaaggacaagcgggatgagttggtggaagccattgaatcagccttggagaccctgaacaatcctgcagagaacagccccaatcaccgtccttacacggcctctgatttcatagaagggatctaccgaacagaaagggacaaagggacattgtatgagctcaccttcaaaggggaccacaaacacgaattcaaacggctcatcttatttcgaccattcagccccatcatgaaagtgaaaaatgaaaagctcaacatggccaacacgcttatcaatgttatcgtgcctctagcaaaaagggtggacaagttccggcagttcatgcagaatttcagggagatgtgcattgagcaggatgggagagtccatctcactgttgtttactttgggaaagaagaaataaatgaagtcaaaggaatacttgaaaacacttccaaagctgccaacttcaggaactttaccttcatccagctgaatggagaattttctcggggaaagggacttgatgttggagcccgcttctggaagggaagcaacgtccttctctttttctgtgatgtggacatctacttcacatctgaattcctcaatacgtgtaggctgaatacacagccagggaagaaggtattttatccagttcttttcagtcagtacaatcctggcataatatacggccaccatgatgcagtccctcccttggaacagcagctggtcataaagaaggaaactggattttggagagactttggatttgggatgacgtgtcagtatcggtcagacttcatcaatataggtgggtttgatctggacatcaaaggctggggcggagaggatgtgcacctttatcgcaagtatctccacagcaacctcatagtggtacggacgcctgtgcgaggactcttccacctctggcatgagaagcgctgcatggacgagctgacccccgagcagtacaagatgtgcatgcagtccaaggccatgaacgaggcatcccacggccagctgggcatgctggtgttcaggcacgagatagaggctcaccttcgcaaacagaaacagaagacaagtagcaaaaaaacatgaactcccagagaaggattgtgggagacactttttctttccttttgcaattactgaaagtggctgcaacagagaaaagacttccataaaggacgacaaaagaattggactgatgggtcagagatgagaaagcctccgatttctctctgttgggctttttacaacagaaatcaaaatctccgctttgcctgcaaaagtaacccagttgcaccctgtgaagtgtctgacaaaggcagaatgcttgtgagattataagcctaatggtgtggaggttttgatggtgtttacaatacactgagacctgttgttttgtgtgctcattgaaatattcatgatttaagagcagttttgtaaaaaattcattagcatgaaaggcaagcatatttctcctcatatgaatgagcctatcagcagggctctagtttctaggaatgctaaaatatcagaaggcaggagaggagataggcttattatgatactagtgagtacattaagtaaaataaaatggaccagaaaagaaaagaaaccataaatatcgtgtcatattttccccaagattaaccaaaaataatctgcttatctttttggttgtccttttaactgtctccgtttttttcttttatttaaaaatgcactttttttcccttgtgagttatagtctgcttatttaattaccactttgcaagccttacaagagagcacaagttggcctacatttttatattttttaagaagatactttgagatgcattatgagaactttcagttcaaagcatcaaattgatgccatatccaaggacatgccaaatgctgattctgtcaggcactgaatgtcaggcattgagacatagggaaggaatggtttgtactaatacagacgtacagatactttctctgaagagtattttcgaagaggagcaactgaacactggaggaaaagaaaatgacactttctgctttacagaaaaggaaactcattcagactggtgatatcgtgatgtacctaaaagtcagaaaccacattttctcctcagaagtagggaccgctttcttacctgtttaaataaaccaaagtataccgtgtgaaccaaacaatctcttttcaaaacagggtgctcctcctggcttctggcttccataagaagaaatggagaaaaatatatatatatatatatatattgtgaaagatcaatccatctgccagaatctagtgggatggaagtttttgctacatgttatccaccccaggccaggtggaagtaactgaattattttttaaattaagcagttctactcaatcaccaagatgcttctgaaaattgcattttattaccatttcaaactattttttaaaaataaatacagttaacatagagtggtttcttcattcatgtgaaaattattagccagcaccagatgcatgagctaattatctctttgagtccttgcttctgtttgctcacagtaaactcattgtttaaaagcttcaagaacattcaagctgttggtgtgttaaaaaatgcattgtattgatttgtactggtagtttatgaaatttaattaaaacacaggccatgaatggaaggtggtattgcacagctaataaaatatgatttgtggatatgaa

SEQ ID NO: 2208 - protein, 532 aa, Homo sapiens
MMMVRRGLLAWISRVVVLLVLLCCAISVLYMLACTPKGDEEQLALPRANSPTGKEGYQAVLQEWEEQHRNYVSSLKRQIAQLKEELQERSEQLRNGQYQASDAAGLGLDRSPPEKTQADLLAFLHSQVDKAEVNAGVKLATEYAAVPFDSFTLQKVYQLETGLTRHPEEKPVRKDKRDELVEAIESALETLNNPAENSPNHRPYTASDFIEGIYRTERDKGTLYELTFKGDHKHEFKRLILFRPFSPIMKVKNEKLNMANTLINVIVPLAKRVDKFRQFMQNFREMCIEQDGRVHLTVVYFGKEEINEVKGILENTSKAANFRNFTFIQLNGEFSRGKGLDVGARFWKGSNVLLFFCDVDIYFTSEFLNTCRLNTQPGKKVFYPVLFSQYNPGIIYGHHDAVPPLEQQLVIKKETGFWRDFGFGMTCQYRSDFINIGGFDLDIKGWGGEDVHLYRKYLHSNLIVVRTPVRGLFHLWHEKRCMDELTPEQYKMCMQSKAMNEASHGQLGMLVFRHEIEAHLRKQKQKTSSKKT

SEQ ID NO: 2209 - DNA, 1870 bp, Homo sapiens
cttcagagaagggaaacacacggctaagaagagagaggcaagggcaggagtgaaggagagagctgaagcctggggctccgagatggtcagaggatgggagacggggcagtgaaacaaggcttcttgtatcttcagcagcagcagacgtttggaaagaaatggcgccgcttcggcgcctcactgtatggagggtcggactgcgccttggcccggctggagctgcaggagggcccggagaagcctcgtcggtgtgaggctgcccggaaggtcatccgcctcagtgactgcctgcgggtggccgaggccggcggagaggccagcagcccccgggacaccagtgccttcttcctggagaccaaggagcgcctgtacctcctggcggcccctgcagcggagcgcggcgactgggtgcaggccatctgcctcctggccttccccgggcagaggaaggagctctcggggccagagggaaagcagagccggccctgcatggaggaaaatgaattgtacagcagcgcagtcacagtcggcccccacaaggaatttgctgtgaccatgagacctacagaagccagtgagaggtgccacctgcgggggtcctataccctccgggctggggagagtgccctggagctgtggggtgggcccgagccagggacccagctgtacgactggccctacaggtttctgcggcgctttgggcgggacaaggtaaccttttcctttgaggcaggccgtcgctgcgtctctggagagggcaactttgagttcgaaacccggcaaggcaatgagatcttcttggccctggaagaggccatctctgcccagaagaatgctgcacccgctacaccccaaccgcagccagccacaatccccgcgtcgctgccccggcctgatagcccctactctcggccgcatgactcactgccgccgccttcacccaccacaccggtgcctgctccacggcctcggggccaggagggggagtatgccgtgcccttcgatgcggtggcccgttccttggggaagaacttcaggggcatcttggcagtccctcctcagctcctggccgaccctctgtacgacagcattgaggagaccctgccccctcgacctgaccacatatacgatgagcccgagggagtggctgccctgtccctctatgacagcccgcaggagccccggggtgaggcatggaggaggcaggcgacagctgacagggaccctgctggcctccagcatgtccagccagccgggcaggatttctctgcttctggctggcagccaggaactgagtatgacaatgttgtactaaagaaaggcccaaagtgacagaggcagcagagggatggtccaccgccccttggcttctgctggtgactcctcctggccactgcatcagaagaacctcctctgccccttctggagcccgaggcctggcctgtcttcgttggggctgataaattgcctctcccagggcctgctgggtgagtcaccatcccaaagcaggaagggtgccctggagagaaccaccctcctcctactctttttccacttcctcctctttctttccccagctgaggaggaacctggggcatttagggcagaggacaaaaggatgtcagcaattgcttgggctgcttggctatgcaagcctcctgcctgctgatggccacttcagggacagcctgggcccaggcacccagggggatggcggcagcttcctgcacctttcagatttcttggtggcattaaagcattttcagaacaaaaaaaaaaaaaaaaaaaaaaaaaaaaaaaaaaaaaaaaaaaaaaaaaaaaaaaaaaaaaaaaaaaaaaaaaaaaaaaaaaaaaaaaaaaaaaaaaaaaa

SEQ ID NO: 2210 - protein, 412 aa, Homo sapiens
MGDGAVKQGFLYLQQQQTFGKKWRRFGASLYGGSDCALARLELQEGPEKPRRCEAARKVIRLSDCLRVAEAGGEASSPRDTSAFFLETKERLYLLAAPAAERGDWVQAICLLAFPGQRKELSGPEGKQSRPCMEENELYSSAVTVGPHKEFAVTMRPTEASERCHLRGSYTLRAGESALELWGGPEPGTQLYDWPYRFLRRFGRDKVTFSFEAGRRCVSGEGNFEFETRQGNEIFLALEEAISAQKNAAPATPQPQPATIPASLPRPDSPYSRPHDSLPPPSPTTPVPAPRPRGQEGEYAVPFDAVARSLGKNFRGILAVPPQLLADPLYDSIEETLPPRPDHIYDEPEGVAALSLYDSPQEPRGEAWRRQATADRDPAGLQHVQPAGQDFSASGWQPGTEYDNVVLKKGPK

SEQ ID NO: 2211 - DNA, 3765 bp, Homo sapiens
agcggagcggcgacggcgtcggcggcggcggcggcagcggctccggccgaggtgcgcgctgggggggagggggggccggagaggagcatgaatggagcaaaatggcggatcatgtgcagagcctggcccaactagagaatctgtgcaaacagctgtatgaaaccacagacacaaccactcgactccaggcagagaaagccttggttgaatttaccaacagccctgattgcctgagcaagtgccagctactcctcgaaagaggaagttcctcttactcccagttactggcagctacatgccttaccaagcttgtatcacgcacaaacaaccccctaccattggaacagcgaatagatattcggaactatgtgctcaactaccttgccactcggccgaagttggctactttcgtgacacaagcacttattcagttatatgccagaatcacaaaactgggctggtttgactgtcagaaggatgactatgtcttcagaaatgcaatcacagacgtcacaaggtttttacaggatagtgttgaatactgcatcattggtgtcacaattttatctcagctaaccaatgaaattaatcaagcagacaccacccatcctttaaccaagcacagaaaaatagcctcttcttttcgcgattcatcattatttgatatcttcacactttcctgcaatttactaaaacaggcttcaggaaagaatctaaacttgaatgatgaaagtcagcatggcttgctcatgcaactgctcaagctcactcataactgcctcaactttgacttcatcggcacttccactgatgagtcctcagacgacctgtgtacagtgcagattcccaccagctggagatcagccttcttagattcttcaaccttgcagctgttttttgacctgtatcattccatccctccttcattttcacctctggtattatcctgcttggtacagatcgcttcagtcagaagatccctgtttaacaatgcagagagggccaagtttctctctcatcttgttgatggtgttaaacgaatactggaaaacccacagagtttatcagacccaaacaattaccatgagttttgcagactactggcccgattgaagagtaactatcaactgggagaattggtaaaggtggaaaactaccctgaggtcatccgattgatagccaacttcacagtgaccagcctacagcactgggaatttgctccaaatagtgtgcactatcttctgagcctgtggcagcggctggcagcctctgtgccgtatgtcaaagccacagacccccacatgctggaaacttacactcctgaggtcaccaaagcctacatcacatcccggttggaatctgtgcacatcatactgagagatggcctggaagatcccctggaggatacggggctggtccagcagcagttggaccagctgtccaccattgggcgttgtgaatatgagaagacgtgtgcactcctcgtgcagttgtttgaccagtcggcccagtcgtaccaggagctgctacagagcgccagcgcaagcccaatggacattgcagtgcaggagggaaggctgacatggctggtttacattattggagcagtgatcggtggccgggtttcttttgccagcactgatgagcaagacgccatggatggtgagcttgtctgtcgggtgctccagctgatgaacctaacagattctcgtttggcccaggcgggtaatgagaagctagagttggccatgctgagcttttttgaacagtttcgtaagatctacattggggaccaagtgcagaaatcctctaagctgtaccgccgactctcagaagttctgggcttgaatgatgagaccatggtcctaagcgtcttcataggaaaaatcatcaccaacttgaagtactggggccgttgtgaaccaatcacctccaagacactacagcttctcaatgacctgtccattgggtacagtagcgtaaggaagctagtgaagcttagtgcggtacagttcatgctgaacaatcacacgagcgagcacttttcatttttgggtattaacaatcagtccaacctgacagacatgcggtgtcggactaccttctacacagcacttgggcgtctcctcatggtggatttaggagaggatgaagatcagtatgagcagttcatgctgccactcacagcagcatttgaggctgtggcccagatgtttagcaccaatagtttcaacgagcaggaggcaaagcgaactctagttggcctagtaagagacctgagagggatcgctttcgctttcaatgccaagaccagcttcatgatgctctttgaatggatatatccatcctatatgccaattctccaacgggcaattgagctctggtaccatgatccagcctgtactacacctgtactcaagttgatggctgaattggttcataataggtcccagcgactccagtttgatgtctcttcccccaatggcatcttactcttccgagaaaccagcaagatgataacaatgtatggcaatcgcatcctgacactaggagaggtcccaaaggatcaggtctatgctctgaagctcaagggcatctccatctacttctccatgctgaaggctgctctcagtgggagttacgtcaatttcggagtctttcgtctctatggagacgatgccctggacaatgctctgcagaccttcatcaagctgctcctctctattcctcacagtgatctcttggattaccccaagctcagccagtcttattattcactactggaagtcctgacccaggaccatatgaactttattgcaagcctggaacctcacgtcatcatgtatattctctcttccatttctgaaggacttactgcacttgacaccatggtatgcacaggctgctgctcctgcctggaccacattgtgacatacctcttcaagcagctgtcacgtagcaccaagaagaggaccacacccctgaaccaggagagcgaccgctttctgcacatcatgcagcagcatccagagatgatccagcagatgctgtccacggtgctgaacatcatcatctttgaagactgtaggaaccagtggtctatgtcccgaccactacttggcttgatattgcttaatgaaaagtatttttctgacctaagaaacagtattgtgaacagccagccaccggagaagcagcaggccatgcacctgtgttttgagaacctgatggaaggcatcgagcgaaatcttcttacgaaaaacagagacaggttcacccagaacctgtcagcattccgtcgagaagtcaacgactcaatgaagaattccacttatggcgtgaatagcaatgacatgatgagctgacacctccttggactctacctgtacagagcagcgtccctttggtttggcccagaggggcgaacaattgcaagggagagggcctggctgatcctggctcttttctccaggggtgtggggaaaatggcaaaggtcaactagctgcttccccagggaataggggtgtgagtacactcactagggggcagggcgctgctggttcctgggggactgggtgggaagggtggtgggaggagataagagatacaaactgagactccagcctctcctcctggggccacccaagtggggagaacccctagtgtcctgccataacctgccttgtataaacatgtacattttttcataacattttgaacaaggtttatattgactcaagtttaaaaacgaaaaaaaaaaaaaa

SEQ ID NO: 2212 - protein, 1087 aa, Homo sapiens
MADHVQSLAQLENLCKQLYETTDTTTRLQAEKALVEFTNSPDCLSKCQLLLERGSSSYSQLLAATCLTKLVSRTNNPLPLEQRIDIRNYVLNYLATRPKLATFVTQALIQLYARITKLGWFDCQKDDYVFRNAITDVTRFLQDSVEYCIIGVTILSQLTNEINQADTTHPLTKHRKIASSFRDSSLFDIFTLSCNLLKQASGKNLNLNDESQHGLLMQLLKLTHNCLNFDFIGTSTDESSDDLCTVQIPTSWRSAFLDSSTLQLFFDLYHSIPPSFSPLVLSCLVQIASVRRSLFNNAERAKFLSHLVDGVKRILENPQSLSDPNNYHEFCRLLARLKSNYQLGELVKVENYPEVIRLIANFTVTSLQHWEFAPNSVHYLLSLWQRLAASVPYVKATDPHMLETYTPEVTKAYITSRLESVHIILRDGLEDPLEDTGLVQQQLDQLSTIGRCEYEKTCALLVQLFDQSAQSYQELLQSASASPMDIAVQEGRLTWLVYIIGAVIGGRVSFASTDEQDAMDGELVCRVLQLMNLTDSRLAQAGNEKLELAMLSFFEQFRKIYIGDQVQKSSKLYRRLSEVLGLNDETMVLSVFIGKIITNLKYWGRCEPITSKTLQLLNDLSIGYSSVRKLVKLSAVQFMLNNHTSEHFSFLGINNQSNLTDMRCRTTFYTALGRLLMVDLGEDEDQYEQFMLPLTAAFEAVAQMFSTNSFNEQEAKRTLVGLVRDLRGIAFAFNAKTSFMMLFEWIYPSYMPILQRAIELWYHDPACTTPVLKLMAELVHNRSQRLQFDVSSPNGILLFRETSKMITMYGNRILTLGEVPKDQVYALKLKGISIYFSMLKAALSGSYVNFGVFRLYGDDALDNALQTFIKLLLSIPHSDLLDYPKLSQSYYSLLEVLTQDHMNFIASLEPHVIMYILSSISEGLTALDTMVCTGCCSCLDHIVTYLFKQLSRSTKKRTTPLNQESDRFLHIMQQHPEMIQQMLSTVLNIIIFEDCRNQWSMSRPLLGLILLNEKYFSDLRNSIVNSQPPEKQQAMHLCFENLMEGIERNLLTKNRDRFTQNLSAFRREVNDSMKNSTYGVNSNDMMS

SEQ ID NO: 2213 - DNA, 1118 bp, Homo sapiens
ggggggagctgggacctaagccgcgcgcacacccctttctctgcgtctggtggaggtgcacagaggcttttgagtcaggcccaagcgcagccaggtgacctccccgcggcctttcaagcctgagctcggtggacagctccctctcccgtgagtcccgctgtcctgtacgcgcccggtcgagccccgggctgcgcaccccgctaggagctgcccggccagcccgcttctctgcccggagccatgaatctcagtagcgccagtagcacggaggaaaaggcagtgacgaccgtgctctggggctgcgagctcagtcaggagaggcggacttggaccttcagaccccagctggaggggaagcagagctgcaggctgttgcttcatacgatttgcttgggggagaaagccaaagaggagatgcatcgcgtggagatcctgcccccagcaaaccaggaggacaagaagatgcagccggtcaccattgcctcactccaggcctcagtcctccccatggtctccatggtaggagtgcagctttctcccccagttactttccagctccgggctggctcaggacccgtgttcctcagtggccaggaacgttatgaagcatcagacctaacctgggaggaggaggaggaagaagaaggggaggaggaggaagaggaagaggaagatgatgaggatgaggatgcagatatatctctggaggagcaaagccctgtcaaacaagtcaaaaggctggtgccccagaagcaggcgagcgtggctaagaaaaaaaagctggaaaaagaagaagaggaaataagagccagcgttagagacaagagccctgtgaaaaaggccaaagccacagccagagccaagaagccaggattcaagaaatgaggagccacgccttggggggcacggtgcaaagtgggccttccctgggctgtgctgcaggcacagggtgcccctgtccagcccctccacctgtgtctgaatgcaacaggggtgttgcgggggcaacatgagagcccctcacccccaactctccactttcaggaggcccccagtgaagagccccacctcggggtcacaataaagttgcctggtcaggaaaaaaaaaaaaaaaaaaa

SEQ ID NO: 2214 - protein, 214 aa, Homo sapiens
MNLSSASSTEEKAVTTVLWGCELSQERRTWTFRPQLEGKQSCRLLLHTICLGEKAKEEMHRVEILPPANQEDKKMQPVTIASLQASVLPMVSMVGVQLSPPVTFQLRAGSGPVFLSGQERYEASDLTWEEEEEEEGEEEEEEEEDDEDEDADISLEEQSPVKQVKRLVPQKQASVAKKKKLEKEEEEIRASVRDKSPVKKAKATARAKKPGFKK

SEQ ID NO: 2215 - DNA, 1238 bp, Homo sapiens
acctctccagcgatgggagccgcccgcctgctgcccaacctcactctgtgcttacagctgctgattctctgctgtcaaactcagggggagaatcacccgtctcctaattttaaccagtacgtgagggaccagggcgccatgaccgaccagctgagcaggcggcagatccgcgagtaccaactctacagcaggaccagtggcaagcacgtgcaggtcaccgggcgtcgcatctccgccaccgccgaggacggcaacaagtttgccaagctcatagtggagacggacacgtttggcagccgggttcgcatcaaaggggctgagagtgagaagtacatctgtatgaacaagaggggcaagctcatcgggaagcccagcgggaagagcaaagactgcgtgttcacggagatcgtgctggagaacaactatacggccttccagaacgcccggcacgagggctggttcatggccttcacgcggcaggggcggccccgccaggcttcccgcagccgccagaaccagcgcgaggcccacttcatcaagcgcctctaccaaggccagctgcccttccccaaccacgccgagaagcagaagcagttcgagtttgtgggctccgcccccacccgccggaccaagcgcacacggcggccccagcccctcacgtagtctgggaggcagggggcagcagcccctgggccgcctccccacccctttcccttcttaatccaaggactgggctggggtggcgggaggggagccagatccccgagggaggaccctgagggccgcgaagcatccgagcccccagctgggaaggggcaggccggtgccccaggggcggctggcacagtgcccccttcccggacgggtggcaggccctggagaggaactgagtgtcaccctgatctcaggccaccagcctctgccggcctcccagccgggctcctgaagcccgctgaaaggtcagcgactgaaggccttgcagacaaccgtctggaggtggctgtcctcaaaatctgcttctcggatctccctcagtctgcccccagcccccaaactcctcctggctagactgtaggaagggacttttgtttgtttgtttgtttcaggaaaaaagaaagggagagagaggaaaatagagggttgtccactcctcacattccacgacccaggcctgcaccccacccccaactcccagccccggaataaaaccattttcctgcaaaaaaaaaaaaaaaaaa

SEQ ID NO: 2216 - protein, 216 aa, Homo sapiens
MGAARLLPNLTLCLQLLILCCQTQGENHPSPNFNQYVRDQGAMTDQLSRRQIREYQLYSRTSGKHVQVTGRRISATAEDGNKFAKLIVETDTFGSRVRIKGAESEKYICMNKRGKLIGKPSGKSKDCVFTEIVLENNYTAFQNARHEGWFMAFTRQGRPRQASRSRQNQREAHFIKRLYQGQLPFPNHAEKQKQFEFVGSAPTRRTKRTRRPQPLT

SEQ ID NO: 2217 - DNA, 2727 bp, Homo sapiens
cacgagaagacaggaggaagaaagggagagagggccaggcagtcgcactgtgaacagaacaggagaaggcgaagcggggcaaagttccctgcccaccgacgccagcctgcttggatgacttgcctcgtttcataattcacttactgtctgcaccagccggcctcagcctggctggaccctgctgcctgtgtggcccggagccagaggcccccacactcccagctgctcttctacagatgccatcaacgagcaggactctgggtggctccactgtctaagcctggagagtcaccgccgagggatgaggacgcgccagcccgggggaacgcgccagctgctttcgcggccccaagcgcgcagtgcccagcagccgcgccgagcctgacacgctgtcctctcccctcgcgcacagggctctgcgagtgacccggcgggcgagctccgtgctgcatggaacggctgcagaagcaaccacttacctcccccgggagcgtgagcccctcccgagattccagtgtgcctggctctccctccagcatcgtggccaagatggacaatcaggtgctgggctacaaggacctggctgccatccccaaggacaaggccatcctggacatcgagcggcccgacctcatgatctacgagcctcacttcacttattccctcctggaacacgtggagctgcctcgccagcgcgagcgctcgctgtcacccaaatccacatcccccccaccatccccagaggtgtgggcggacagccggtcgcctggaatcatctctcaggcctcggcccccagaaccactggaaccccccggaccagcctgccccatttccaccaccctgagacctcccgcccagattccaacatctacaagaagcctcccatctataagcagagagagtccgtgggaggcagccctcagaccaagcacctcatcgaggatctcatcatcgagtcatccaagtttcctgcagcccagcccccagaccccaaccagccagccaaaatcgaaaccgactactggccatgccccccgtctctggctgttgtggagacagaatggaggaagcggaaggcgtctcggaggggagcagaggaagaggaggaggaggaagatgacgactctggagaggagatgaaggctctcagggagcgtcagagagaggaactcagtaaggttacttccaacttgggaaagatgatcttgaaagaagagatggaaaagtcattgccgatccgaaggaaaacccgctctctgcctgaccggacacccttccatacctccttgcaccagggaacgtctaaatcttcctctctcccccgctatggcaggaccaccctgagccggctacagtccacagagttcagcccatcagggagtgagactggaagcccaggcctgcagaacggagagggccagagggggaggatggaccgggggaactccctgccctgtgtgctggagcagaagatctatccctatgaaatgctagtggtgaccaacaaggggcgaaccaagctgccaccgggggtggatcggatgcggcttgagaggcatctgtctgccgaggacttctcaagggtatttgccatgtcccctgaagagtttggcaagctggctctgtggaagcggaatgagctcaagaagaaggcctctctcttctgatggcccccacctgctccgggacggcccccttacccctgctgcttcagggtttttccccggcgggttgggaggggcaggaggtggggtggaaatagggtgggctcctttcctcaggtagagtggggggccaaaacctctgcagtccccggcagtgagctatggactttcttccccctcacgaggctgggggcctcctgctctcgtccctggccctccctgtacagggcaaagccagtctgggctctggcacacagagttcatgtttgccgccctctccctgcccctcaccccagaggtgagaggaatgaggggcattggtggttaggccggttggctgtcttgaacagctggagggaagatgcaggggtgggaagcggccaggcagaaagagctccaggctcttgtgtcgcccacccagccctcccatactcactcctgacagctttcctgcactgcagcttcctgctcctctgactctagtgggaacaggccccagctcagcctccgcgagggaggtcacccctccacttcagcttgccctgacctccgctcgcaaaccccgagcttccaagccttttgctccagccctgcggcttccccagaagcctgggcttagggtggagatgccgcctacccgatcctggccctccacctgcctccaggccacgaaatgggaattccagcactaagccaggcaccgggcagaagctgggccttccgcctcccttggatggggtcaagaggccaggcctggcacattttggagtgtcctggctaccagctctcacacctacacccacgcaccccctcacacactatgctctctcaagaatgtaatttattggggcccccccagctgctttcctcacctgcccctgccctaccttacacccccagcttgacttctttccagtccacgtggatataatgatatctatatttttgcccaggtctgggtattgctcctgcccagaccctgacatccctttccactgtgtgtgtgaccatgctgggggagggggactctgcttggaattaaaaggttgctttgggtcccta

SEQ ID NO: 2218 - protein, 405 aa, Homo sapiens
MERLQKQPLTSPGSVSPSRDSSVPGSPSSIVAKMDNQVLGYKDLAAIPKDKAILDIERPDLMIYEPHFTYSLLEHVELPRQRERSLSPKSTSPPPSPEVWADSRSPGIISQASAPRTTGTPRTSLPHFHHPETSRPDSNIYKKPPIYKQRESVGGSPQTKHLIEDLIIESSKFPAAQPPDPNQPAKIETDYWPCPPSLAVVETEWRKRKASRRGAEEEEEEEDDDSGEEMKALRERQREELSKVTSNLGKMILKEEMEKSLPIRRKTRSLPDRTPFHTSLHQGTSKSSSLPRYGRTTLSRLQSTEFSPSGSETGSPGLQNGEGQRGRMDRGNSLPCVLEQKIYPYEMLVVTNKGRTKLPPGVDRMRLERHLSAEDFSRVFAMSPEEFGKLALWKRNELKKKASLF

SEQ ID NO: 2219 - DNA, 3759 bp, Homo sapiens
agagcgctgccgccgccgctttcgcccgggagccgggggccgggcgccatcatgctgagccggctcggggcgctgctgcaggaagccgtgggggcgcgcgagcccagcattgacctgctgcaggccttcgtggagcactggaagggcatcacgcactactacatcgagagcacagatgaaagcacccccgccaagaagacagacattccctggcggctgaagcagatgctggatatcctggtgtatgaagagcagcagcaggcggccgcgggtgaggcagggccctgcctggagtacctgctgcagcacaagatcctggagactctctgcacgctgggcaaggccgagtaccccccaggcatgcggcagcaggtgttccagttcttcagcaaggttctggcgcaggtgcagcaccccctgctgcattacctcagcgtccacaggcctgtgcagaaactcctccgacttggtgggactgcttccggatccgttacagaaaaggaggaggtgcagttcaccaccgtcctctgctccaagatccagcaggacccagagctgctcgcctacatcctggaaggtaaaaagattgtaggtaggaagaaagcatgcggagaacccactgccctgcctaaggacacaaccagccacggggacaaggactgctcccacgatggtgctcctgccaggccccagctggacggggagtcctgtggggcccaggccttgaacagccacatgcctgctgagaccgaggagctggacggtgggaccacagagagcaacctgattacctccctgcttgggctgtgccagagcaagaagagtcgggtggccttgaaggcccaggagaacctgctgctcctggtgagcatggcctccccagcagctgccacctacctggtacagagcagcgcctgctgccctgcgatcgtccggcacctttgccagttgtaccggtccatgcctgtcttcctggaccccgcagacattgccaccttagagggcatcagctggaggttacccagtgccccgtctgatgaggcttccttccctggcaaggaggccttggctgccttcttgggctggtttgattactgcgaccacctcatcacagaggcacacacggtggttgcggacgccttggcgaaggctgtggctgagaacttcttcgtggagaccctgcagccccagctcctgcacgtgtccgagcagagcatcttgacctccaccgccctcctcacagccatgctgcgccagcttcgctcccctgcgctgctgcgggaggccgtggctttcctcctgggcacagaccggcagcctgaagcccccggggacaacccccacaccctgtatgctcatctcatcgggcattgtgaccacctctctgatgagatcagcatcaccacactccggctgtttgaggagctgctgcagaagccccacgaggggatcatccacagcctggtcctgcgcaaccttgagggccgcccttacgtggcctggggctcaccagagcctgagagctatgaggacaccctagacctggaggaagacccctacttcaccgacagcttcctggattccggctttcaaactcccgcaaagcctcgcctagctcctgctaccagttacgatggcaaaacagcagtgaccgagatcgtcaacagtttcctgtgcctggtccccgaggaagccaagacctctgccttcctggaggagacaggctatgacacatacgtccacgatgcttatggcctgttccaggagtgcagctcccgcgtcgcctcctggggctggcctctgacccccacacctttggacccccatgagcccgagcgacctttcttcgagggccacttcctccgagtgctgtttgaccgcatgtcccggattctggatcagccatacagcctgaacctgcaggtgacctcggtcctgtcccggcttgccctcttcccccacccccatattcatgagtacctgctggatccgtacatcagcctggcccccggctgcaggagcctattctccgtgttggtgagggtgatcggggacttgatgcagagaatccagagggtaccccagttcccaggcaagctgctcctggtgcgcaagcagttgacgggccaggctcctggggagcagctggaccaccagaccctcctccagggcgtggtggtgctggaggagttctgcaaggagctggctgccattgccttcgtcaagtttcccccacatgatcctcgccagaacgtctccccagccccggaagggcaggtctgagccagcaccagggcggtgggagactcctgtccacacctctgccccagagctgcctcctgcctggcactgccgccacactcccctcctgggatggggcttctgctcccgggctcactcaaggagactgcggcatgttgaccacaccagactgggtttcagggaatgggcatgccaggtgccaaggagccaaacagatggctttccaggcagcaaggtccttggggccttcttggaggagcttgggtgacagccaggtgagcacccagaccccagaccctcatgtgctgtgtgcctggccccttctgtactggccatttgtggccagggccaagcctgtgactcaactccaggggcaagatggggagtgagctgatggctccgagactggtcaggagcccaggccagtgagatggggcctggagccttgtctgtgtcacattaggtaccatgggagctgctgagacctgacattttgtcccctgcctacatggcttggcccatggagaaggagcagtgaatgggatcgtcggggaagcccctcttcctgctctgctcccctggaaactgttgcaaaactcccagccgcctcatggcaaatgcccaaagcatgttccgcacccaggcgggggcccctgctaatgagaaccttggtgcagctgcagccaggaggggagcgggcccaggagccaggctcaggtccagctggttcctctctggcgccttctgaacccgtctcagcaggtccacagcacctgggcagaggtcagagaccaggggaggccgggccttgccctcccttctgcccagggcccagtgttcttgatagaagacccttctggggagccagggagctcaggggacagataagggaaggacgccccctgactccaggcccctgagcctggcgggaagtggctgcggcccaggcagccagtcctggtggtgttctccctgcatgccctccgtggctgggctgccaccccacccggcccgaatctgtcttgacctgcaggaatacacgggcggcgccaggcattacctcacagcgggactacacagttgctggctttgctcctgggcaaggaggagcaggccagagcctcttttgcttccttttcttgcccatgccgcttctagaagccaggcacaggttgccaagaggtgacacgaaacaggaggaaactcagtgacctctgcctctcccacattcctccccgcgggggaggacctcgccgctctgaagagcaccgtgcacatgtgggtgcacaaacgtgggtgttggtgtggacggggcgcagatctccgtggatgaactgcgtctggactcttagattcataaaatattcgagggtttgggagtcacagaccctcccctctcctcagtgcactttggcatttgcacggtgtcttccccggacagcacagcaataaatggtgtgattgcgtggaaaaaaaaaaaaaaaaaaaaaaaaaaaa

SEQ ID NO: 2220 - protein, 743 aa, Homo sapiens
MLSRLGALLQEAVGAREPSIDLLQAFVEHWKGITHYYIESTDESTPAKKTDIPWRLKQMLDILVYEEQQQAAAGEAGPCLEYLLQHKILETLCTLGKAEYPPGMRQQVFQFFSKVLAQVQHPLLHYLSVHRPVQKLLRLGGTASGSVTEKEEVQFTTVLCSKIQQDPELLAYILEGKKIVGRKKACGEPTALPKDTTSHGDKDCSHDGAPARPQLDGESCGAQALNSHMPAETEELDGGTTESNLITSLLGLCQSKKSRVALKAQENLLLLVSMASPAAATYLVQSSACCPAIVRHLCQLYRSMPVFLDPADIATLEGISWRLPSAPSDEASFPGKEALAAFLGWFDYCDHLITEAHTVVADALAKAVAENFFVETLQPQLLHVSEQSILTSTALLTAMLRQLRSPALLREAVAFLLGTDRQPEAPGDNPHTLYAHLIGHCDHLSDEISITTLRLFEELLQKPHEGIIHSLVLRNLEGRPYVAWGSPEPESYEDTLDLEEDPYFTDSFLDSGFQTPAKPRLAPATSYDGKTAVTEIVNSFLCLVPEEAKTSAFLEETGYDTYVHDAYGLFQECSSRVASWGWPLTPTPLDPHEPERPFFEGHFLRVLFDRMSRILDQPYSLNLQVTSVLSRLALFPHPHIHEYLLDPYISLAPGCRSLFSVLVRVIGDLMQRIQRVPQFPGKLLLVRKQLTGQAPGEQLDHQTLLQGVVVLEEFCKELAAIAFVKFPPHDPRQNVSPAPEGQV

SEQ ID NO: 2221 - DNA, 2249 bp, Homo sapiens
agtgctgaggtggggtgaaggaggaaaggccgagctgggagaggagcatgcgctcgccacaaccacccccaccctgctctccacgcgccaggtcctgcacgctgggtgggagggtgacgacaaggatggaggagcagggccccacccccgccctcccagggcgcaccatctgcagcagagagggccttgagctgcgtgggaaatgcgaatctccttcaaggcaggggtttatgtcccccaccccacgggccatgtgacatttataactctttggtggaatgagaagaaaggtatttgggatatgatcaactccggcaatgccattgtgtgtttacggcaacagcgggacagtggttccagggggcggccccgggcctccgtgacgtcaccggattgtcgcgtcaccgtcgcctaccccggcggcgcaacgcgccctgcaggaaagatgacgtcaccgtcggagctcctgcagaccagtgcgcgctcggggagttggcgagcgggtggcggctgggagacgtcccgagcgcacgggactgacaggcggcagaagccgggcggggtccgctgggctccggacccgtgcccccccagttccagggcggccccgggcggccccgccccctcggtgaatgccgcgggccggccaatccgggcaggccgcggcgccgcgcagcctatcagcggccagagctcgcgtgcgcttccgcgttcgcgtgcgcttccgcgttctcgtgagctcccggcccgctgccgcagggactgggagcgggctccgcagcgcactctagcccgcggctcggctcagtcggtctgcgaggatccggcccgccgccccccgggggacccgatggcctcggagggcctggcgggggcgctggcttccgtgctggctggccaggggtccagcgtgcacagctgcgactcggcgccggccggggagccgccggcgcccgtgcggctgcggaagaacgtgtgctacgtggtgctggccgtgttcctcagcgagcaggatgaggtgctactgatccaggaggccaagagggagtgccgggggtcgtggtacctgcctgcggggagaatggagccaggggagaccatcgtggaggcgctgcagcgggaggtgaaggaggaggcggggctgcactgtgagcccgagacactgctgtccgtggaggagcggggcccctcctgggtccgcttcgtgttcctcgctcgccccacaggtggaattctcaagacttccaaggaggccgatgcggagtccctgcaggctgcctggtacccacggacctccctgcccactccgctgcgagcccatgacatcctgcacctggttgaactagccgcccagtatcgccagcaagccaggcaccctctcattctgccccaagagctaccctgtgatctggtctgccagcggctcgtggctacctttaccagcgcccagacagtgtgggtgttagtgggcacagtggggatgcctcacttgcctgtcactgcctgtggcctcgaccctgtggagcagaggggtggcatgaagatggccgtcctgcggctgctgcaggagtgtctgaccctgcaccacttggtggtggagatcaaggggttgcttggactgcagcacctgggccgagatcacagtgatggcatctgtttgaatgtgctggtgaccgtggcttttcggagcccagggatccaggatgaacccccaaaagttcggggtgagaacttctcttggtggaaggtgatggaggaagacctgcaaagccagctcctccagcggcttcagggatcctctgttgtcccagtgaacagatagagaggtggaggaggtgacagggagctaggcagccgtgctccctccagtgcggacttgtctccctctgagggaggcaagaggctggcgatcagggatcttgttgcattgggagcaggggcggctctcctggtccccaggagagatgctttgaggagcattcctctagattgcacaagggacagtgcctttaaccaagcgaggagtccaaagctcaggacctgactaccctgagggcacgctgacgcctctccccagggggatggggagctttctgcacccccagtggcatctcctcatcacgttctgtgccgtccttgggaaaggcctgcattctgatccttccaggcccttcgagcatggaggggcactggggaaggtcccccgagggaggagcacgttgctgagtaaagaggtgttactcaccttg

SEQ ID NO: 2222 - protein, 539 aa, Homo sapiens
MRISFKAGVYVPHPTGHVTFITLWWNEKKGIWDMINSGNAIVCLRQQRDSGSRGRPRASVTSPDCRVTVAYPGGATRPAGKMTSPSELLQTSARSGSWRAGGGWETSRAHGTDRRQKPGGVRWAPDPCPPSSRAAPGGPAPSVNAAGRPIRAGRGAAQPISGQSSRALPRSRALPRSRELPARCRRDWERAPQRTLARGSAQSVCEDPARRPPGDPMASEGLAGALASVLAGQGSSVHSCDSAPAGEPPAPVRLRKNVCYVVLAVFLSEQDEVLLIQEAKRECRGSWYLPAGRMEPGETIVEALQREVKEEAGLHCEPETLLSVEERGPSWVRFVFLARPTGGILKTSKEADAESLQAAWYPRTSLPTPLRAHDILHLVELAAQYRQQARHPLILPQELPCDLVCQRLVATFTSAQTVWVLVGTVGMPHLPVTACGLDPVEQRGGMKMAVLRLLQECLTLHHLVVEIKGLLGLQHLGRDHSDGICLNVLVTVAFRSPGIQDEPPKVRGENFSWWKVMEEDLQSQLLQRLQGSSVVPVNR

SEQ ID NO: 2223 - DNA, 4981 bp, Homo sapiens
ggccccggagctggcccatggggagcaggcgcccggtgccggccacgacgaccgccaccgcccgcgccgcgaccggccggtgaagcccagggacccccctctgggagagccccatgagggcaggagagtgatggagagtacgcccagcttcctgaagggcaccccaacctgggagaagacggccccagagaacggcatcgtgagacaggagcccggcagcccgcctcgagatggactgcaccatgggccgctgtgcctgggagagcctgctcccttttggaggggcgtcctgagcaccccagactcctggcttccccctggcttcccccagggccccaaggacatgctcccacttgtggagggcgagggcccccagaatggggagaggaaggtcaactggctgggcagcaaagagggactgcgctggaaggaggccatgcttacccatccgctggcattctgcgggccagcgtgcccacctcgctgtggccccctgatgcctgagcatagtggtggccatctcaagagtgaccctgtggccttccggccctggcactgccctttccttctggagaccaagatcctggagcgagctcccttctgggtgcccacctgcttgccaccctacctagtgtctggcctgcccccagagcatccatgtgactggcccctgaccccgcacccctgggtatactccgggggccagcccaaagtgccctctgccttcagcttaggcagcaagggcttttactacaaggatccgagcattcccaggttggcaaaggagcccttggcagctgcggaacctgggttgtttggcttaaactctggtgggcacctgcagagagccggggaggccgaacgcccttcactgcaccagagggatggagagatgggagctggccggcagcagaatccttgcccgctcttcctggggcagccagacactgtgccctggacctcctggcccgcttgtcccccaggccttgttcatactcttggcaacgtctgggctgggccaggcgatgggaaccttgggtaccagctggggccaccagcaacaccaaggtgcccctctcctgagccgcctgtcacccagcggggctgctgttcatcctacccacccactaaaggtgggggtcttggcccttgtgggaagtgccaggagggcctggaggggggtgccagtggagccagcgaacccagcgaggaagtgaacaaggcctctggccccagggcctgtccccccagccaccacaccaagctgaagaagacatggctcacacggcactcggagcagtttgaatgtccacgcggctgccctgaggtcgaggagaggccggttgctcggctccgggccctcaaaagggcaggcagccccgaggtccagggagcaatgggcagtccagcccccaagcggccaccggacccttttccaggcactgcagaacagggggctgggggttggcaggaggtgcgggacacatcgatagggaacaaggatgtggactcgggacagcatgatgagcagaaaggaccccaagatggccaggccagtctccaggacccgggacttcaggacataccatgcctggctctccctgcaaaactggctcaatgccaaagttgtgcccaggcagctggagagggaggagggcacgcctgccactctcagcaagtgcggagatcgcctctgggaggggagctgcagcaggaggaagacacagccaccaactccagctctgaggaaggcccagggtccggccctgacagccggctcagcacaggcctcgccaagcacctgctcagtggtttgggggaccgactgtgccgcctgctgcggagggagcgggaggccctggcttgggcccagcgggaaggccaagggccagccgtgacagaggacagcccaggcattccacgctgctgcagccgttgccaccatggactcttcaacacccactggcgatgtccccgctgcagccaccggctgtgtgtggcctgtggtcgtgtggcaggcactgggcgggccagggagaaagcaggctttcaggagcagtccgcggaggagtgcacgcaggaggccgggcacgctgcctgttccctgatgctgacccagtttgtctccagccaggctttggcagagctgagcactgcaatgcaccaggtctgggtcaagtttgatatccgggggcactgcccctgccaagctgatgcccgggtatgggcccccggggatgcaggccagcagaaggaatcaacacagaaaacgcccccaactccacaaccttcctgcaatggcgacacccacaggaccaagagcatcaaagaggagacccccgattccgctgagaccccagcagaggaccgtgctggccgagggcccctgccttgtccttctctctgcgaactgctggcttctaccgcggtcaaactctgcttgggccatgagcgaatacacatggccttcgcccccgtcactccggccctgcccagtgatgaccgcatcaccaacatcctggacagcattatcgcacaggtggtggaacggaagatccaggagaaagccctggggccggggcttcgagctggcccgggtctgcgcaagggcctgggcctgcccctctctccagtgcggccccggctgcctcccccaggggctttgctgtggctgcaggagccccagccttgccctcggcgtggcttccacctcttccaggagcactggaggcagggccagcctgtgttggtgtcagggatccaaaggacattgcagggcaacctgtgggggacagaagctcttggggcacttggaggccaggtgcaggcgctgagccccctcggacctccccagcccagcagcctgggcagcacaacattctgggagggcttctcctggcctgagcttcgcccaaagtcagacgagggctctgtcctcctgctgcaccgagctttgggggatgaggacaccagcagggtggagaacctagctgccagtctgccacttccggagtactgcgccctccatggaaaactcaacctggcttcctacctcccaccgggccttgccctgcgtccactggagccccagctctgggcagcctatggtgtgagcccgcaccggggacacctggggaccaagaacctctgtgtggaggtggccgacctggtcagcatcctggtgcatgccgacacaccactgcctgcctggcaccgggcacagaaagacttcctttcaggcctggacggggaggggctctggtctccgggcagccaggtcagcactgtgtggcacgtgttccgggcacaggacgcccagcgcatccgccgctttctccagatggtgtgcccggccggggcaggcgccctggagcctggcgccccaggcagctgctacctggatgcagggctgcggcggcgcctgcgggaggagtggggcgtgagctgctggaccctgctccaggcccccggagaggccgtgctggtgcctgcaggggctccccaccaggtgcagggcctggtgagcacagtcagcgtcactcagcacttcctctcccctgagacctctgccctctctgctcagctctgccaccagggacccagccttccccctgactgccacctgctttatgcccagatggactgggctgtgttccaagcagtgaaggtggccgtggggacattacaggaggccaaatagagggatgctaggtgtctgggatcggggtggggacaggtagaccaggtgctcagcccaggcacaacttcagcaggggatggcgctaggggacttggggatttctggtcaaccccacaagcaccactctgggcacaagcagggcactctgttcccctcccccttaagccaacaaccacagtgccaccaagctcacacctgtccttctcaggctggcatctcccccaccctgtgccccttttcatggtaccaggcccgcactgggggcaattgacttcctccaatccccactcctccgagacccaggagacaaacagcccttccttggggaaacttgggaatcattctggcttaaacaacacctcctcctgctgctcactcccgctgagcccactctactgccccagctccgtttctaccaccgcatcctcactgggctcactgcaggcatgctgaacaaggggcctccaaccttctgccctcctgccaaaagatctggggagtgtgaggagagggtggcatcaggagctgctcaggcttggcggagggagcggcatgggcgatgtcactcagccccttcccggtccgcccgcttccctccttcatgatttccattaaagtctgttgttttgtgactgctgccagtgtggttggccctgcccctgcaggccacatggtccagggagggagggggacatggaaatctgccttagagacaaatggagtagggcagcccggagctggggcccaagggacaggacaccactgcctgctcttcgtctggggcctggggccttgcctcccactgaggagactttgggtggggtggggggctgtcccccaaagatgctcctgagtgcaagagcaggcaaggcagagtcctggggcacagccacgaggtgacctccctgtgcagagactcccgagccctactccacccagcaagctccagtccgccccatctctcccgtctaccctgacctggagatccagaagtatggcccagaagagcccttgccccgcctgtctgcccttggtggcagtggccatggccgacgccaggcccagccaccctgggactgagcctgactgcttcagacagccgacccctccttgtccccgctccacgcccgcagcctcctggtggcgctccgccctctcccgcttcctttgtgtatctcagccctacaaagaaaaacactcccactcttgtcatacctaattgttcctgctgtggtttggggaattttttttattaaataaagttttttattataagggtaa

SEQ ID NO: 2224 - protein, 1189 aa, Homo sapiens
MESTPSFLKGTPTWEKTAPENGIVRQEPGSPPRDGLHHGPLCLGEPAPFWRGVLSTPDSWLPPGFPQGPKDMLPLVEGEGPQNGERKVNWLGSKEGLRWKEAMLTHPLAFCGPACPPRCGPLMPEHSGGHLKSDPVAFRPWHCPFLLETKILERAPFWVPTCLPPYLVSGLPPEHPCDWPLTPHPWVYSGGQPKVPSAFSLGSKGFYYKDPSIPRLAKEPLAAAEPGLFGLNSGGHLQRAGEAERPSLHQRDGEMGAGRQQNPCPLFLGQPDTVPWTSWPACPPGLVHTLGNVWAGPGDGNLGYQLGPPATPRCPSPEPPVTQRGCCSSYPPTKGGGLGPCGKCQEGLEGGASGASEPSEEVNKASGPRACPPSHHTKLKKTWLTRHSEQFECPRGCPEVEERPVARLRALKRAGSPEVQGAMGSPAPKRPPDPFPGTAEQGAGGWQEVRDTSIGNKDVDSGQHDEQKGPQDGQASLQDPGLQDIPCLALPAKLAQCQSCAQAAGEGGGHACHSQQVRRSPLGGELQQEEDTATNSSSEEGPGSGPDSRLSTGLAKHLLSGLGDRLCRLLRREREALAWAQREGQGPAVTEDSPGIPRCCSRCHHGLFNTHWRCPRCSHRLCVACGRVAGTGRAREKAGFQEQSAEECTQEAGHAACSLMLTQFVSSQALAELSTAMHQVWVKFDIRGHCPCQADARVWAPGDAGQQKESTQKTPPTPQPSCNGDTHRTKSIKEETPDSAETPAEDRAGRGPLPCPSLCELLASTAVKLCLGHERIHMAFAPVTPALPSDDRITNILDSIIAQVVERKIQEKALGPGLRAGPGLRKGLGLPLSPVRPRLPPPGALLWLQEPQPCPRRGFHLFQEHWRQGQPVLVSGIQRTLQGNLWGTEALGALGGQVQALSPLGPPQPSSLGSTTFWEGFSWPELRPKSDEGSVLLLHRALGDEDTSRVENLAASLPLPEYCALHGKLNLASYLPPGLALRPLEPQLWAAYGVSPHRGHLGTKNLCVEVADLVSILVHADTPLPAWHRAQKDFLSGLDGEGLWSPGSQVSTVWHVFRAQDAQRIRRFLQMVCPAGAGALEPGAPGSCYLDAGLRRRLREEWGVSCWTLLQAPGEAVLVPAGAPHQVQGLVSTVSVTQHFLSPETSALSAQLCHQGPSLPPDCHLLYAQMDWAVFQAVKVAVGTLQEAK

SEQ ID NO: 2225 - DNA, 4816 bp, Homo sapiens
ggccccggagctggcccatggggagcaggcgcccggtgccggccacgacgaccgccaccgcccgcgccgcgaccggccggtgaagcccagggacccccctctgggagagccccatgagggcaggagagtgatggagagtacgcccagcttcctgaagggcaccccaacctgggagaagacggccccagagaacggcatcgtgagacaggagcccggcagcccgcctcgagatggactgcaccatgggccgctgtgcctgggagagcctgctcccttttggaggggcgtcctgagcaccccagactcctggcttccccctggcttcccccagggccccaaggacatgctcccacttgtggagggcgagggcccccagaatggggagaggaaggtcaactggctgggcagcaaagagggactgcgctggaaggaggccatgcttacccatccgctggcattctgcgggccagcgtgcccacctcgctgtggccccctgatgcctgagcatagtggtggccatctcaagagtgaccctgtggccttccggccctggcactgccctttccttctggagaccaagatcctggagcgagctcccttctgggtgcccacctgcttgccaccctacctagtgtctggcctgcccccagagcatccatgtgactggcccctgaccccgcacccctgggtatactccgggggccagcccaaagtgccctctgccttcagcttaggcagcaagggcttttactacaaggatccgagcattcccaggttggcaaaggagcccttggcagctgcggaacctgggttgtttggcttaaactctggtgggcacctgcagagagccggggaggccgaacgcccttcactgcaccagagggatggagagatgggagctggccggcagcagaatccttgcccgctcttcctggggcagccagacactgtgccctggacctcctggcccgcttgtcccccaggccttgttcatactcttggcaacgtctgggctgggccaggcgatgggaaccttgggtaccagctggggccaccagcaacaccaaggtgcccctctcctgagccgcctgtcacccagcggggctgctgttcatcctacccacccactaaaggtgggggtcttggcccttgtgggaagtgccaggagggcctggaggggggtgccagtggagccagcgaacccagcgaggaagtgaacaaggcctctggccccagggcctgtccccccagccaccacaccaagctgaagaagacatggctcacacggcactcggagcagtttgaatgtccacgcggctgccctgaggtcgaggagaggccggttgctcggctccgggccctcaaaagggcaggcagccccgaggtccagggagcaatgggcagtccagcccccaagcggccaccggacccttttccaggcactgcagaacagggggctgggggttggcaggaggtgcgggacacatcgatagggaacaaggatgtggactcgggacagcatgatgagcagaaaggaccccaagatggccaggccagtctccaggacccgggacttcaggacataccatgcctggctctccctgcaaaactggctcaatgccaaagttgtgcccaggcagctggagagggaggagggcacgcctgccactctcagcaagtgcggagatcgcctctgggaggggagctgcagcaggaggaagacacagccaccaactccagctctgaggaaggcccagggtccggccctgacagccggctcagcacaggcctcgccaagcacctgctcagtggtttgggggaccgactgtgccgcctgctgcggagggagcgggaggccctggcttgggcccagcgggaaggccaagggccagccgtgacagaggacagcccaggcattccacgctgctgcagccgttgccaccatggactcttcaacacccactggcgatgtccccgctgcagccaccggctgtgtgtggcctgtggtcgtgtggcaggcactgggcgggccagggagaaagcaggctttcaggagcagtccgcggaggagtgcacgcaggaggccgggcacgctgcctgttccctgatgctgacccagtttgtctccagccaggctttggcagagctgagcactgcaatgcaccaggtctgggtcaagtttgatatccgggggcactgcccctgccaagctgatgcccgggtatgggcccccggggatgcaggccagcagaaggaatcaacacagaaaacgcccccaactccacaaccttcctgcaatggcgacacccacaggaccaagagcatcaaagaggagacccccgattccgctgagaccccagcagaggaccgtgctggccgagggcccctgccttgtccttctctctgcgaactgctggcttctaccgcggtcaaactctgcttgggccatgagcgaatacacatggccttcgcccccgtcactccggccctgcccagtgatgaccgcatcaccaacatcctggacagcattatcgcacaggtggtggaacggaagatccaggagaaagccctggggccggggcttcgagctggcccgggtctgcgcaagggcctgggcctgcccctctctccagtgcggccccggctgcctcccccaggggctttgctgtggctgcaggagccccagccttgccctcggcgtggcttccacctcttccaggagcactggaggcagggccagcctgtgttggtgtcagggatccaaaggacattgcagggcaacctgtgggggacagaagctcttggggcacttggaggccaggtgcaggcgctgagccccctcggacctccccagcccagcagcctgggcagcacaacattctgggagggcttctcctggcctgagcttcgcccaaagtcagacgagggctctgtcctcctgctgcaccgagctttgggggatgaggacaccagcagggtggagaacctagctgccagtctgccacttccggagtactgcgccctccatggaaaactcaacctggcttcctacctcccaccgggccttgccctgcgtccactggagccccagctctgggcagcctatggtgtgagcccgcaccggggacacctggggaccaagaacctctgtgtggaggtggccgacctggtcagcatcctggtgcatgccgacacaccactgcctgcctggcaccgggcacagaaagacttcctttcaggcctggacggggaggggctctggtctccgggcagccaggtcagcactgtgtggcacgtgttccgggcacaggacgcccagcgcatccgccgctttctccagatggtgcagggcctggtgagcacagtcagcgtcactcagcacttcctctcccctgagacctctgccctctctgctcagctctgccaccagggacccagccttccccctgactgccacctgctttatgcccagatggactgggctgtgttccaagcagtgaaggtggccgtggggacattacaggaggccaaatagagggatgctaggtgtctgggatcggggtggggacaggtagaccaggtgctcagcccaggcacaacttcagcaggggatggcgctaggggacttggggatttctggtcaaccccacaagcaccactctgggcacaagcagggcactctgttcccctcccccttaagccaacaaccacagtgccaccaagctcacacctgtccttctcaggctggcatctcccccaccctgtgccccttttcatggtaccaggcccgcactgggggcaattgacttcctccaatccccactcctccgagacccaggagacaaacagcccttccttggggaaacttgggaatcattctggcttaaacaacacctcctcctgctgctcactcccgctgagcccactctactgccccagctccgtttctaccaccgcatcctcactgggctcactgcaggcatgctgaacaaggggcctccaaccttctgccctcctgccaaaagatctggggagtgtgaggagagggtggcatcaggagctgctcaggcttggcggagggagcggcatgggcgatgtcactcagccccttcccggtccgcccgcttccctccttcatgatttccattaaagtctgttgttttgtgactgctgccagtgtggttggccctgcccctgcaggccacatggtccagggagggagggggacatggaaatctgccttagagacaaatggagtagggcagcccggagctggggcccaagggacaggacaccactgcctgctcttcgtctggggcctggggccttgcctcccactgaggagactttgggtggggtggggggctgtcccccaaagatgctcctgagtgcaagagcaggcaaggcagagtcctggggcacagccacgaggtgacctccctgtgcagagactcccgagccctactccacccagcaagctccagtccgccccatctctcccgtctaccctgacctggagatccagaagtatggcccagaagagcccttgccccgcctgtctgcccttggtggcagtggccatggccgacgccaggcccagccaccctgggactgagcctgactgcttcagacagccgacccctccttgtccccgctccacgcccgcagcctcctggtggcgctccgccctctcccgcttcctttgtgtatctcagccctacaaagaaaaacactcccactcttgtcatacctaattgttcctgctgtggtttggggaattttttttattaaataaagttttttattataagggtaa

SEQ ID NO: 2226 - protein, 1134 aa, Homo sapiens
MESTPSFLKGTPTWEKTAPENGIVRQEPGSPPRDGLHHGPLCLGEPAPFWRGVLSTPDSWLPPGFPQGPKDMLPLVEGEGPQNGERKVNWLGSKEGLRWKEAMLTHPLAFCGPACPPRCGPLMPEHSGGHLKSDPVAFRPWHCPFLLETKILERAPFWVPTCLPPYLVSGLPPEHPCDWPLTPHPWVYSGGQPKVPSAFSLGSKGFYYKDPSIPRLAKEPLAAAEPGLFGLNSGGHLQRAGEAERPSLHQRDGEMGAGRQQNPCPLFLGQPDTVPWTSWPACPPGLVHTLGNVWAGPGDGNLGYQLGPPATPRCPSPEPPVTQRGCCSSYPPTKGGGLGPCGKCQEGLEGGASGASEPSEEVNKASGPRACPPSHHTKLKKTWLTRHSEQFECPRGCPEVEERPVARLRALKRAGSPEVQGAMGSPAPKRPPDPFPGTAEQGAGGWQEVRDTSIGNKDVDSGQHDEQKGPQDGQASLQDPGLQDIPCLALPAKLAQCQSCAQAAGEGGGHACHSQQVRRSPLGGELQQEEDTATNSSSEEGPGSGPDSRLSTGLAKHLLSGLGDRLCRLLRREREALAWAQREGQGPAVTEDSPGIPRCCSRCHHGLFNTHWRCPRCSHRLCVACGRVAGTGRAREKAGFQEQSAEECTQEAGHAACSLMLTQFVSSQALAELSTAMHQVWVKFDIRGHCPCQADARVWAPGDAGQQKESTQKTPPTPQPSCNGDTHRTKSIKEETPDSAETPAEDRAGRGPLPCPSLCELLASTAVKLCLGHERIHMAFAPVTPALPSDDRITNILDSIIAQVVERKIQEKALGPGLRAGPGLRKGLGLPLSPVRPRLPPPGALLWLQEPQPCPRRGFHLFQEHWRQGQPVLVSGIQRTLQGNLWGTEALGALGGQVQALSPLGPPQPSSLGSTTFWEGFSWPELRPKSDEGSVLLLHRALGDEDTSRVENLAASLPLPEYCALHGKLNLASYLPPGLALRPLEPQLWAAYGVSPHRGHLGTKNLCVEVADLVSILVHADTPLPAWHRAQKDFLSGLDGEGLWSPGSQVSTVWHVFRAQDAQRIRRFLQMVQGLVSTVSVTQHFLSPETSALSAQLCHQGPSLPPDCHLLYAQMDWAVFQAVKVAVGTLQEAK

SEQ ID NO: 2227 - DNA, 1731 bp, Homo sapiens
gcaagccggagccctggggttgggcagcactcggttccgtgcaactttcaagtgagttgcgaactccgccctgtaggccggtgctggtggcccggcgcgctggaaccgcggcgacccgctccagcgcgggaccagcagcaagggccgagcgccaggttctccgcggcagaaagggcgggtgggagctgtaactgccccggccgcggggcgcgcccgctcccaagtcggcttcctccccgccggggccgctttgcctcgggtctccccattctccaggtcccctgaactgcacagtcggaggccgtgggcggcgggctctgcctccgccgagggacagccggatcgcccctctgcttcccgcaactgccctgatcaccccccgtcccagcccttgagtgaacgtccttctgagcggcttcctggggtcctccccacgtcccaaaggccggcaagatggtgtcctggatgatctgtcgcctggtggtgctggtgtttgggatgctgtgtccagcttatgcttcctataaggctgtgaagaccaagaacattcgtgaatatgtgcggtggatgatgtactggattgtttttgcactcttcatggcagcagagatcgttacagacatttttatctcctggttccctttctactatgagatcaagatggccttcgtgctgtggctgctctcaccctacaccaagggcgccagcctgctttaccgcaagtttgtccacccgtccctgtcccgccatgagaaggagatcgacgcgtacatcgtgcaggccaaggagcgcagctacgagaccgtgctcagcttcgggaagcggggcctcaacattgccgcctccgctgctgtgcaggctgccaccaagagtcagggggcgctggccggcaggctgcggagcttctccatgcaggacctgcgctccatctctgacgcacctgcccctgcctaccatgaccccctctacctggaggaccaggtgtcccaccggaggccacccattgggtaccgggccgggggcctgcaggacagcgacaccgaggatgagtgttggtcagatactgaggcagtcccccgggcgccagcccggccccgagagaagcccctaatccgcagccagagcctgcgtgtggtcaagaggaagccaccggtgcgggagggcacctcgcgctccctgaaggttcggacgaggaaaaagactgtgccctcagacgtggacagctagggtctgctgcatctgcccccttcttacctcgtgccctgcagggctccagggctatttggagggaccttgggctgcacatctggcctgcctgcaccagctgcctgggccccaccctcctgactcctgctgatggttaagggccgggagcagatgctgccaaggccacatgcagggatgcacccacaatgtaccaaagcaggctgggcccagggttctatttattgccttgctctgccctctcccttccccggttgtgggacaagagccctccctgaacccctgcaaccctccctgaacccctgcaaatgaaaccaaacgtccacctgggtgtgttcattccttcctgtccttcaaagtacttgatagcctttcataaggcctggcacatgtgtcctggttgtgtgtgtgtgtgttggtgagtgaggtcaggtttgcgagtgttttgataaataaatacataaaggggcaaaaaaaaaaaaaaaaaaaaaaaaaaaaaaaaaaaaa

SEQ ID NO: 2228 - protein, 257 aa, Homo sapiens
MVSWMICRLVVLVFGMLCPAYASYKAVKTKNIREYVRWMMYWIVFALFMAAEIVTDIFISWFPFYYEIKMAFVLWLLSPYTKGASLLYRKFVHPSLSRHEKEIDAYIVQAKERSYETVLSFGKRGLNIAASAAVQAATKSQGALAGRLRSFSMQDLRSISDAPAPAYHDPLYLEDQVSHRRPPIGYRAGGLQDSDTEDECWSDTEAVPRAPARPREKPLIRSQSLRVVKRKPPVREGTSRSLKVRTRKKTVPSDVDS

SEQ ID NO: 2229 - DNA, 3285 bp, Homo sapiens
cgcgcgcccccgccgcccgcgccgcagtccgcagccacccggcgcggtcagccccggctgcggctccagctccgcgctccgctcttctctcccgagccggatcgcgggagcgagcaggggaggggaccgcagccggcgcccgagggcaggaggagtccgcaggcgggcccctggctgcggtagcagctgccggtggcagggaggtgccagcccgcgcggggtggcccagccgcgggagcggtggggcgggggccgcggccgccggccccagggagagatcgcgggcagcatggcggggctgcgggccagggggggcccggggccggggctgctggcgctctccgcgctcggcttctgcctcatgctgcaagtcagcgctaagaggccccccaagacgcccccctgcccgcccagctgctcttgcaccagggacaccgccttctgcgtggactcaaaggcggtgcccaggaacctgccctcggaggtcatctccctgaccctggtgaatgccgccttctcagagatccaggatggagcgttctcccacctcccgctgctgcagttcttgttactcaactccaacaagtttacactgattggagacaacgccttcacaggactgtcgcacctgcagtatctcttcattgagaacaatgacatctgggcactatccaagttcaccttccgaggactcaagtccttgactcacctctcgctggccaacaataacctgcagacactgcccagagacatcttccggcccctggacatcctgaatgacttggacctgcggggcaactcactcaactgtgactgcaaggtgaagtggttggtggagtggctggcacacaccaacaccacggtggcacccatctactgcgccagcccgccccgcttccaggagcacaaggtgcaggacctgccgctgcgggagttcgattgcatcaccacagattttgtgttgtaccagaccctggccttcccagcagtgtcggctgagcccttcctctactccagtgacctctatttggctctggcccagccaggagtcagtgcctgcaccatcctgaagtgggactatgttgagcggcagcttcgagactatgatagaatcccagccccctctgcagtgcactgcaagccgatggtggtggacagccagctgtacgtggtcgtggcccagctgtttggcggctcttacatttaccactgggatcccaacaccacgcgcttcaccaggctgcaagacattgacccgcagcgcgtgcgcaagcctaacgacctagaagccttccgcatcgacggtgactggtactttgccgtggctgacagctccaaggcaggcgccaccagcctctaccgctggcaccagaatggcttctactcccaccaggcactgcacccctggcaccgtgacaccgacctggagtttgtggacggcgagggcaagccacggctgattgtgtccagcagctcccaggcacccgtcatctatcagtggagtcgcacccagaagcagtttgtggcccagggtgaggtgacccaggtgcctgatgcccaagctgtgaaacactttcgtgccggccgcgacagctacctgtgcctcagccgctacattggcgactccaagatcctgcgctgggagggtacccgcttctcggaggtgcaggccctgccctcccggggctcgctggccctgcagcccttccttgtgggtggccgccgctacctggcactgggcagtgatttctccttcacccagatctaccagtgggatgagggacgacagaagtttgtacggttccaggagctggctgtgcaggctcctcgggccttctgctacatgcctgctggggacgcccagctactcctggcccccagcttcaagggacagacgctggtgtatagacacattgtggtggatctcagtgcctagggggtgccgaggcctctggtctcctcagggtggccactggaggatgggtgggggcctctgtgagcaccacgtatgcctgtgtgaagacaagcgaccaacctgcattcatgcccttgtatccgcacacgcccagtgtgtacaggcgcaccccgtggactggcccaggaggacgtgcatcatcactgcaatcagcatgaacaccaggcacccctgggacacctaacgcccagttcccgtgaccccaactgcaggccccccctactctgcagcctttcccatgctctgccccctgtctcatgcacgagtggtgcggggtgctgggagcgaggggggccgcatcctcctgtccttgtgcttctccttctgcccctctggtctttcctgttggtgctccaggcattgtttacctgctcttgctccccgctgtagcccacagccatatctgtcatgcttccccggggccactcacccctgccccaccccgtctgcatgctcacatggacgcggacggacacactcattacacactcacacgccccgactgcacccggtgtccatctataaacatgtcagggcacgtgtgcatacaagcagattcagcactgcctaccaggctctcctgttaccttgcctctctgcttggagggggccccctctgctcacccccagcgtgccccccccggaactgataaggatgagaatggtggtgccagcttctgagggcctgcttggcctcctgggggcaaagcccctctgcccgaagcaataacaacagcagcagaagcaatcccggggagctgccaggggtgtctgtctctgttctccttggcgtttccttcatggccgtgaatcccagctcacccatggacagaagacctcccctcatctgaaagcctttctgccttccttcctgtagctgtcgctttctcaggcttggactgtcccctggttcaccctgtctttgggatgtggcccttgagctgggcgggctccttgggtggattagagagctggccgagctgcaagcacctgagttacctgcgagggtgcccagagtggagcttggcctgagggcgtgttgcagccctggccccaccagtccacagaggcccccaggagcactgcctttcagtggaccgggtgggggctggtgggaggggccccactagctgagcttctgctgccctctgctgtctgctgagatgccaggctagtggagagggcacaccatgtgcccaaatggtgtgatgctccttgtagcaggataccagggtactggggggcaatgctatgattaacttgcttcaaataaaaagttcccgccccataaaaaaaaaaaaaaaaaaaaa

SEQ ID NO: 2230 - protein, 548 aa, Homo sapiens
MAGLRARGGPGPGLLALSALGFCLMLQVSAKRPPKTPPCPPSCSCTRDTAFCVDSKAVPRNLPSEVISLTLVNAAFSEIQDGAFSHLPLLQFLLLNSNKFTLIGDNAFTGLSHLQYLFIENNDIWALSKFTFRGLKSLTHLSLANNNLQTLPRDIFRPLDILNDLDLRGNSLNCDCKVKWLVEWLAHTNTTVAPIYCASPPRFQEHKVQDLPLREFDCITTDFVLYQTLAFPAVSAEPFLYSSDLYLALAQPGVSACTILKWDYVERQLRDYDRIPAPSAVHCKPMVVDSQLYVVVAQLFGGSYIYHWDPNTTRFTRLQDIDPQRVRKPNDLEAFRIDGDWYFAVADSSKAGATSLYRWHQNGFYSHQALHPWHRDTDLEFVDGEGKPRLIVSSSSQAPVIYQWSRTQKQFVAQGEVTQVPDAQAVKHFRAGRDSYLCLSRYIGDSKILRWEGTRFSEVQALPSRGSLALQPFLVGGRRYLALGSDFSFTQIYQWDEGRQKFVRFQELAVQAPRAFCYMPAGDAQLLLAPSFKGQTLVYRHIVVDLSA

SEQ ID NO: 2231 - DNA, 991 bp, Homo sapiens
cttatctcggcttcgtttctggagggccaggaacaaacaggcttcaaagccaagggcttggctggcacacagggggcttggtccttcacctctgtcccctctccctacggacacatataagaccctggtcacacctgggagaggaggagaggagagcatagcacctgcagcaagatggatgtgggcagcaaagaggtcctgatggagagcccgccggactactccgcagctccccggggccgatttggcattccctgctgcccagtgcacctgaaacgccttcttatcgtggtggtggtggtggtcctcatcgtcgtggtgattgtgggagccctgctcatgggtctccacatgagccagaaacacacggagatggttctggagatgagcattggggcgccggaagcccagcaacgcctggccctgagtgagcacctggttaccactgccaccttctccatcggctccactggcctcgtggtgtatgactaccagcagctgctgatcgcctacaagccagcccctggcacctgctgctacatcatgaagatagctccagagagcatccccagtcttgaggctctcaatagaaaagtccacaacttccagatggaatgctctctgcaggccaagcccgcagtgcctacgtctaagctgggccaggcagaggggcgagatgcaggctcagcaccctccggaggggacccggccttcctgggcatggccgtgaacaccctgtgtggcgaggtgccgctctactacatctaggacgcctccggtgagcagggtcagtggaagccccaacgggaaaggaaacgccccgggcaaagggtcttttgcagcttttgcagacgggcaagaagctgcttctgcccacaccgcagggacaaaccctggagaaatgggagcttggggagaggatgggagtgggcagaggtggcacccaggggcccgggaactcctgccacaacagaataaagcagcctgattg

SEQ ID NO: 2232 - protein, 197 aa, Homo sapiens
MDVGSKEVLMESPPDYSAAPRGRFGIPCCPVHLKRLLIVVVVVVLIVVVIVGALLMGLHMSQKHTEMVLEMSIGAPEAQQRLALSEHLVTTATFSIGSTGLVVYDYQQLLIAYKPAPGTCCYIMKIAPESIPSLEALNRKVHNFQMECSLQAKPAVPTSKLGQAEGRDAGSAPSGGDPAFLGMAVNTLCGEVPLYYI

SEQ ID NO: 2233 - DNA, 2487 bp, Homo sapiens
gccgcttccctcgccgccgccccgccagcatgcccggcgtggcccgcctgccgctgctgctcgggctgctgctgctcccgcgtcccggccggccgctggacttggccgactacacctatgacctggcggaggaggacgactcggagcccctcaactacaaagacccctgcaaggcggctgcctttcttggggacattgccctggacgaagaggacctgagggccttccaggtacagcaggctgtggatctcagacggcacacagctcgtaagtcctccatcaaagctgcagttccaggaaacacttctacccccagctgccagagcaccaacgggcagcctcagaggggagcctgtgggagatggagaggtagatcccgtagccggcgggcggcgacgtcccgaccagagcgtgtgtggcccgatggggtcatcccctttgtcattgggggaaacttcactggtagccagagggcagtcttccggcaggccatgaggcactgggagaagcacacctgtgtcaccttcctggagcgcactgacgaggacagctatattgtgttcacctatcgaccttgcgggtgctgctcctacgtgggtcgccgcggcgggggcccccaggccatctccatcggcaagaactgtgacaagttcggcattgtggtccacgagctgggccacgtcgtcggcttctggcacgaacacactcggccagaccgggaccgccacgtttccatcgttcgtgagaacatccagccagggcaggagtataacttcctgaagatggagcctcaggaggtggagtccctgggggagacctatgacttcgacagcatcatgcattacgctcggaacacattctccaggggcatcttcctggataccattgtccccaagtatgaggtgaacggggtgaaacctcccattggccaaaggacacggctcagcaagggggacattgcccaagcccgcaagctttacaagtgcccagcctgtggagagaccctgcaagacagcacaggcaacttctcctcccctgaataccccaatggctactctgctcacatgcactgcgtgtggcgcatctctgtcacacccggggagaagatcatcctgaacttcacgtccctggacctgtaccgcagccgcctgtgctggtacgactatgtggaggtccgagatggcttctggaggaaggcgcccctccgaggccgcttctgcgggtccaaactccctgagcctatcgtctccactgacagccgcctctgggttgaattccgcagcagcagcaattgggttggaaagggcttctttgcagtctacgaagccatctgcgggggtgatgtgaaaaaggactatggccacattcaatcgcccaactacccagacgattaccggcccagcaaagtctgcatctggcggatccaggtgtctgagggcttccacgtgggcctcacattccagtcctttgagattgagcgccacgacagctgtgcctacgactatctggaggtgcgcgacgggcacagtgagagcagcaccctcatcgggcgctactgtggctatgagaagcctgatgacatcaagagcacgtccagccgcctctggctcaagttcgtctctgacgggtccattaacaaagcgggctttgccgtcaactttttcaaagaggtggacgagtgctctcggcccaaccgcgggggctgtgagcagcggtgcctcaacaccctgggcagctacaagtgcagctgtgaccccgggtacgagctggccccagacaagcgccgctgtgaggctgcttgtggcggattcctcaccaagctcaacggctccatcaccagcccgggctggcccaaggagtacccccccaacaagaactgcatctggcagctggtggcccccacccagtaccgcatctccctgcagtttgacttctttgagacagagggcaatgatgtgtgcaagtacgacttcgtggaggtgcgcagtggactcacagctgactccaagctgcatggcaagttctgtggttctgagaagcccgaggtcatcacctcccagtacaacaacatgcgcgtggagttcaagtccgacaacaccgtgtccaaaaagggcttcaaggcccacttcttctcagaaaagaggccagctctgcagccccctcggggacgcccccaccagctcaaattccgagtgcagaaaagaaaccggaccccccagtgaggcctgccaggcctcccggaccccttgttactcaggaacctcaccttggacggaatgggatgggggcttcggtgcccaccaaccccccacctccactctgccattccggcccacctccctctggccggacagaactggtgctctcttctccccactgtgcccgtccgcggaccggggacccttccccgtgccctaccccctcccattttgatggtgtctgtgacatttcctgttgtgaagtaaaagagggacccctgcgtcctgc

SEQ ID NO: 2234 - protein, 730 aa, Homo sapiens
MPGVARLPLLLGLLLLPRPGRPLDLADYTYDLAEEDDSEPLNYKDPCKAAAFLGDIALDEEDLRAFQVQQAVDLRRHTARKSSIKAAVPGNTSTPSCQSTNGQPQRGACGRWRGRSRSRRAATSRPERVWPDGVIPFVIGGNFTGSQRAVFRQAMRHWEKHTCVTFLERTDEDSYIVFTYRPCGCCSYVGRRGGGPQAISIGKNCDKFGIVVHELGHVVGFWHEHTRPDRDRHVSIVRENIQPGQEYNFLKMEPQEVESLGETYDFDSIMHYARNTFSRGIFLDTIVPKYEVNGVKPPIGQRTRLSKGDIAQARKLYKCPACGETLQDSTGNFSSPEYPNGYSAHMHCVWRISVTPGEKIILNFTSLDLYRSRLCWYDYVEVRDGFWRKAPLRGRFCGSKLPEPIVSTDSRLWVEFRSSSNWVGKGFFAVYEAICGGDVKKDYGHIQSPNYPDDYRPSKVCIWRIQVSEGFHVGLTFQSFEIERHDSCAYDYLEVRDGHSESSTLIGRYCGYEKPDDIKSTSSRLWLKFVSDGSINKAGFAVNFFKEVDECSRPNRGGCEQRCLNTLGSYKCSCDPGYELAPDKRRCEAACGGFLTKLNGSITSPGWPKEYPPNKNCIWQLVAPTQYRISLQFDFFETEGNDVCKYDFVEVRSGLTADSKLHGKFCGSEKPEVITSQYNNMRVEFKSDNTVSKKGFKAHFFSEKRPALQPPRGRPHQLKFRVQKRNRTPQ

SEQ ID NO: 2235 - DNA, 2853 bp, Homo sapiens
gccgcttccctcgccgccgccccgccagcatgcccggcgtggcccgcctgccgctgctgctcgggctgctgctgctcccgcgtcccggccggccgctggacttggccgactacacctatgacctggcggaggaggacgactcggagcccctcaactacaaagacccctgcaaggcggctgcctttcttggggacattgccctggacgaagaggacctgagggccttccaggtacagcaggctgtggatctcagacggcacacagctcgtaagtcctccatcaaagctgcagttccaggaaacacttctacccccagctgccagagcaccaacgggcagcctcagaggggagcctgtgggagatggagaggtagatcccgtagccggcgggcggcgacgtcccgaccagagcgtgtgtggcccgatggggtcatcccctttgtcattgggggaaacttcactggtagccagagggcagtcttccggcaggccatgaggcactgggagaagcacacctgtgtcaccttcctggagcgcactgacgaggacagctatattgtgttcacctatcgaccttgcgggtgctgctcctacgtgggtcgccgcggcgggggcccccaggccatctccatcggcaagaactgtgacaagttcggcattgtggtccacgagctgggccacgtcgtcggcttctggcacgaacacactcggccagaccgggaccgccacgtttccatcgttcgtgagaacatccagccagggcaggagtataacttcctgaagatggagcctcaggaggtggagtccctgggggagacctatgacttcgacagcatcatgcattacgctcggaacacattctccaggggcatcttcctggataccattgtccccaagtatgaggtgaacggggtgaaacctcccattggccaaaggacacggctcagcaagggggacattgcccaagcccgcaagctttacaagtgcccagcctgtggagagaccctgcaagacagcacaggcaacttctcctcccctgaataccccaatggctactctgctcacatgcactgcgtgtggcgcatctctgtcacacccggggagaagatcatcctgaacttcacgtccctggacctgtaccgcagccgcctgtgctggtacgactatgtggaggtccgagatggcttctggaggaaggcgcccctccgaggccgcttctgcgggtccaaactccctgagcctatcgtctccactgacagccgcctctgggttgaattccgcagcagcagcaattgggttggaaagggcttctttgcagtctacgaagccatctgcgggggtgatgtgaaaaaggactatggccacattcaatcgcccaactacccagacgattaccggcccagcaaagtctgcatctggcggatccaggtgtctgagggcttccacgtgggcctcacattccagtcctttgagattgagcgccacgacagctgtgcctacgactatctggaggtgcgcgacgggcacagtgagagcagcaccctcatcgggcgctactgtggctatgagaagcctgatgacatcaagagcacgtccagccgcctctggctcaagttcgtctctgacgggtccattaacaaagcgggctttgccgtcaactttttcaaagaggtggacgagtgctctcggcccaaccgcgggggctgtgagcagcggtgcctcaacaccctgggcagctacaagtgcagctgtgaccccgggtacgagctggccccagacaagcgccgctgtgaggctgcttgtggcggattcctcaccaagctcaacggctccatcaccagcccgggctggcccaaggagtacccccccaacaagaactgcatctggcagctggtggcccccacccagtaccgcatctccctgcagtttgacttctttgagacagagggcaatgatgtgtgcaagtacgacttcgtggaggtgcgcagtggactcacagctgactccaagctgcatggcaagttctgtggttctgagaagcccgaggtcatcacctcccagtacaacaacatgcgcgtggagttcaagtccgacaacaccgtgtccaaaaagggcttcaaggcccacttcttctcagtcttggagggggcaggggaccgacactcacatctatcaggcctggagttactgctctgcccccatgccctggtcgacactgtgcccgccccaccctcagccctgcacggagacacacacgcccacacgcacacacatgtgcacacacattgccccatcgcacaagaaacctgcagaggacccccactgggggcatcgaggctcagccctcagggcccggggcatctgactctggccccccaggaggggagctatttggacttttgggacacccaccgaggagaccctaagccaagaaggagaagaaagagcctgaagaccttcagtctgacccctgccaccttccggggcatttgggcactgtaggaaaagaggccagctctgcagccccctcggggacgcccccaccagctcaaattccgagtgcagaaaagaaaccggaccccccagtgaggcctgccaggcctcccggaccccttgttactcaggaacctcaccttggacggaatgggatgggggcttcggtgcccaccaaccccccacctccactctgccattccggcccacctccctctggccggacagaactggtgctctcttctccccactgtgcccgtccgcggaccggggacccttccccgtgccctaccccctcccattttgatggtgtctgtgacatttcctgttgtgaagtaaaagagggacccctgcgtcctgc

SEQ ID NO: 2236 - protein, 823 aa, Homo sapiens
MPGVARLPLLLGLLLLPRPGRPLDLADYTYDLAEEDDSEPLNYKDPCKAAAFLGDIALDEEDLRAFQVQQAVDLRRHTARKSSIKAAVPGNTSTPSCQSTNGQPQRGACGRWRGRSRSRRAATSRPERVWPDGVIPFVIGGNFTGSQRAVFRQAMRHWEKHTCVTFLERTDEDSYIVFTYRPCGCCSYVGRRGGGPQAISIGKNCDKFGIVVHELGHVVGFWHEHTRPDRDRHVSIVRENIQPGQEYNFLKMEPQEVESLGETYDFDSIMHYARNTFSRGIFLDTIVPKYEVNGVKPPIGQRTRLSKGDIAQARKLYKCPACGETLQDSTGNFSSPEYPNGYSAHMHCVWRISVTPGEKIILNFTSLDLYRSRLCWYDYVEVRDGFWRKAPLRGRFCGSKLPEPIVSTDSRLWVEFRSSSNWVGKGFFAVYEAICGGDVKKDYGHIQSPNYPDDYRPSKVCIWRIQVSEGFHVGLTFQSFEIERHDSCAYDYLEVRDGHSESSTLIGRYCGYEKPDDIKSTSSRLWLKFVSDGSINKAGFAVNFFKEVDECSRPNRGGCEQRCLNTLGSYKCSCDPGYELAPDKRRCEAACGGFLTKLNGSITSPGWPKEYPPNKNCIWQLVAPTQYRISLQFDFFETEGNDVCKYDFVEVRSGLTADSKLHGKFCGSEKPEVITSQYNNMRVEFKSDNTVSKKGFKAHFFSVLEGAGDRHSHLSGLELLLCPHALVDTVPAPPSALHGDTHAHTHTHVHTHCPIAQETCRGPPLGASRLSPQGPGHLTLAPQEGSYLDFWDTHRGDPKPRRRRKSLKTFSLTPATFRGIWAL

SEQ ID NO: 2237 - DNA, 3552 bp, Homo sapiens
atgcccggcgtggcccgcctgccgctgctgctcgggctgctgctgctcccgcgtcccggccggccgctggacttggccgactacacctatgacctggcggaggaggacgactcggagcccctcaactacaaagacccctgcaaggcggctgcctttcttggggacattgccctggacgaagaggacctgagggccttccaggtacagcaggctgtggatctcagacggcacacagctcgtaagtcctccatcaaagctgcagttccaggaaacacttctacccccagctgccagagcaccaacgggcagcctcagaggggagcctgtgggagatggagaggtagatcccgtagccggcgggcggcgacgtcccgaccagagcgtgtgtggcccgatggggtcatcccctttgtcattgggggaaacttcactggtagccagagggcagtcttccggcaggccatgaggcactgggagaagcacacctgtgtcaccttcctggagcgcactgacgaggacagctatattgtgttcacctatcgaccttgcgggtgctgctcctacgtgggtcgccgcggcgggggcccccaggccatctccatcggcaagaactgtgacaagttcggcattgtggtccacgagctgggccacgtcgtcggcttctggcacgaacacactcggccagaccgggaccgccacgtttccatcgttcgtgagaacatccagccagggcaggagtataacttcctgaagatggagcctcaggaggtggagtccctgggggagacctatgacttcgacagcatcatgcattacgctcggaacacattctccaggggcatcttcctggataccattgtccccaagtatgaggtgaacggggtgaaacctcccattggccaaaggacacggctcagcaagggggacattgcccaagcccgcaagctttacaagtgcccagcctgtggagagaccctgcaagacagcacaggcaacttctcctcccctgaataccccaatggctactctgctcacatgcactgcgtgtggcgcatctctgtcacacccggggagaagatcatcctgaacttcacgtccctggacctgtaccgcagccgcctgtgctggtacgactatgtggaggtccgagatggcttctggaggaaggcgcccctccgaggccgcttctgcgggtccaaactccctgagcctatcgtctccactgacagccgcctctgggttgaattccgcagcagcagcaattgggttggaaagggcttctttgcagtctacgaagccatctgcgggggtgatgtgaaaaaggactatggccacattcaatcgcccaactacccagacgattaccggcccagcaaagtctgcatctggcggatccaggtgtctgagggcttccacgtgggcctcacattccagtcctttgagattgagcgccacgacagctgtgcctacgactatctggaggtgcgcgacgggcacagtgagagcagcaccctcatcgggcgctactgtggctatgagaagcctgatgacatcaagagcacgtccagccgcctctggctcaagttcgtctctgacgggtccattaacaaagcgggctttgccgtcaactttttcaaagaggtggacgagtgctctcggcccaaccgcgggggctgtgagcagcggtgcctcaacaccctgggcagctacaagtgcagctgtgaccccgggtacgagctggccccagacaagcgccgctgtgaggctgcttgtggcggattcctcaccaagctcaacggctccatcaccagcccgggctggcccaaggagtacccccccaacaagaactgcatctggcagctggtggcccccacccagtaccgcatctccctgcagtttgacttctttgagacagagggcaatgatgtgtgcaagtacgacttcgtggaggtgcgcagtggactcacagctgactccaagctgcatggcaagttctgtggttctgagaagcccgaggtcatcacctcccagtacaacaacatgcgcgtggagttcaagtccgacaacaccgtgtccaaaaagggcttcaaggcccacttcttctcagacaaggacgagtgctccaaggataacggcggctgccagcaggactgcgtcaacacgttcggcagttatgagtgccaatgccgcagtggcttcgtcctccatgacaacaagcacgactgcaaagaagccggctgtgaccacaaggtgacatccaccagtggtaccatcaccagccccaactggcctgacaagtatcccagcaagaaggagtgcacgtgggccatctccagcacccccgggcaccgggtcaagctgaccttcatggagatggacatcgagtcccagcctgagtgtgcctacgaccacctagaggtgttcgacgggcgagacgccaaggcccccgtcctcggccgcttctgtgggagcaagaagcccgagcccgtcctggccacaggcagccgcatgttcctgcgcttctactcagataactcggtccagcgaaagggcttccaggcctcccacgccacagagtgcgggggccaggtacgggcagacgtgaagaccaaggacctttactcccacgcccagtttggcgacaacaactaccctgggggtgtggactgtgagtgggtcattgtggccgaggaaggctacggcgtggagctcgtgttccagacctttgaggtggaggaggagaccgactgcggctatgactacatggagctcttcgacggctacgacagcacagcccccaggctggggcgctactgtggctcagggcctcctgaggaggtgtactcggcgggagattctgtcctggtgaagttccactcggatgacaccatcaccaaaaaaggtttccacctgcgatacaccagcaccaagttccaggacacactccacagcaggaagtgaccactgcctgagcaggggcggggactggagcctgctgcccttggtcgcctagactggatagtgggggtgggcggaacgcaacgcaccatccctctcccccaggccccaggacctgcagggccaatggcctggtgagactgtccataggaggtgggggaactggactccggcataagccacttccccacaaacccccaccagcaaggggctggggccagggagcagagcttccacaagacatttcgaagtcatcattcctctcttagggggccctgcctggtggcaagagggaatgtcagcaggaccccatcgccatccctgtgtctctacacgctgtattgtgtatcaccgggggcattattttcattgtaatgttcatttcccacccctgctccagcctcgatttggttttattttgagcccccattccaccacagtttcctggggcacaagtgtctgtgcatgtcccccaggagccaccgtggggagccgatggggaggggatggagaaacaagacagggcttctctcagcccatggccggtcagccacaccagggcaccgcagccaataaaccgaaagtgttacagcc

SEQ ID NO: 2238 - protein, 986 aa, Homo sapiens
MPGVARLPLLLGLLLLPRPGRPLDLADYTYDLAEEDDSEPLNYKDPCKAAAFLGDIALDEEDLRAFQVQQAVDLRRHTARKSSIKAAVPGNTSTPSCQSTNGQPQRGACGRWRGRSRSRRAATSRPERVWPDGVIPFVIGGNFTGSQRAVFRQAMRHWEKHTCVTFLERTDEDSYIVFTYRPCGCCSYVGRRGGGPQAISIGKNCDKFGIVVHELGHVVGFWHEHTRPDRDRHVSIVRENIQPGQEYNFLKMEPQEVESLGETYDFDSIMHYARNTFSRGIFLDTIVPKYEVNGVKPPIGQRTRLSKGDIAQARKLYKCPACGETLQDSTGNFSSPEYPNGYSAHMHCVWRISVTPGEKIILNFTSLDLYRSRLCWYDYVEVRDGFWRKAPLRGRFCGSKLPEPIVSTDSRLWVEFRSSSNWVGKGFFAVYEAICGGDVKKDYGHIQSPNYPDDYRPSKVCIWRIQVSEGFHVGLTFQSFEIERHDSCAYDYLEVRDGHSESSTLIGRYCGYEKPDDIKSTSSRLWLKFVSDGSINKAGFAVNFFKEVDECSRPNRGGCEQRCLNTLGSYKCSCDPGYELAPDKRRCEAACGGFLTKLNGSITSPGWPKEYPPNKNCIWQLVAPTQYRISLQFDFFETEGNDVCKYDFVEVRSGLTADSKLHGKFCGSEKPEVITSQYNNMRVEFKSDNTVSKKGFKAHFFSDKDECSKDNGGCQQDCVNTFGSYECQCRSGFVLHDNKHDCKEAGCDHKVTSTSGTITSPNWPDKYPSKKECTWAISSTPGHRVKLTFMEMDIESQPECAYDHLEVFDGRDAKAPVLGRFCGSKKPEPVLATGSRMFLRFYSDNSVQRKGFQASHATECGGQVRADVKTKDLYSHAQFGDNNYPGGVDCEWVIVAEEGYGVELVFQTFEVEEETDCGYDYMELFDGYDSTAPRLGRYCGSGPPEEVYSAGDSVLVKFHSDDTITKKGFHLRYTSTKFQDTLHSRK

SEQ ID NO: 2239 - DNA, 2964 bp, Homo sapiens
cttctctgcctctctctcctccacgctgctttgatttcgctcttgcctctcttcttgcgctgctcagctgggaacatcggctcaccaggggcagcagcgacgcgctgcacagccagacaggagctggttgcggggcatggaagcagcctccttggcagccgggagaggagcaagcgcacgccactgcccgtgacccaggcgtccggctgctgtcccctgccggggagctcatccacgcagaggtctctccctgtcctccctgcgagcttttcctctgcagagcccagtggagccagtccccacaggagacaaccctgacgggagcatggagctgctgtccacgccccacagcattgagatcaacaacatcacctgcgactccttcagcatctcctgggccatggaggacagtgacctggagagggtcacccattacttcattgaccttaacaagaaggagaataagaattccaacaagttcaagcaccgggacgtccccaccaagctcgtggccaaggcagtgccgctgcccatgacggtgagaggccactggttcctgagcccccgcacggagtacagtgtggccgtgcagacggcagtgaagcagagcgatggggagtacctggtgtccggctggagcgagacggtggagttctgcactggggattatgccaaggagcacctggctcagcttcaggagaaagctgagcagatcgcaggccgcatgctccgcttctccgtcttctaccgcaaccatcacaaggagtacttcgagcatgccaggacccactgcgggaacatgctgcagccttacctgaaggacaacagcggcagccacggctcccccaccagcggtatgctccacggggtcttcttcagctgcaacacggagttcaacacgggccagcccccgcaggactccccctacggccgctggcgcttccagatcccagctcagcgcctcttcaatcccagcaccaacctctactttgcggacttctactgcatgtacacggcctaccactacgccatcctggtgctggcgcccaaaggctccatgggggaccgcttctgccgcgaccgccggcccctcctggacattgcttgcaacaagttcctgacctgcagcgtggaggatggggagctggtcttccgccacgcccaggacctcatcctggagatcatctacactgagcccgtcgacctgtccctgggcaccctgggggagatcagtgggcaccagctcatgagtctgtctactgccgatgccaagaaggaccccagctgcaagacctgcaacatcagcgtgggccgctagggactcctggggagctggggggcgagggagagatgagcggaaggtggaggtgggtagcccaggttcagggagctggctttctctctcctgcccccctgctccctccactctgcccagctgccctcccctcgccccttggcattggaggcaacagacggtggtcctcttggtaagtgtggcccacacccagcctggtggacatggaaaggcttctcagcctctgtagttggcagctgggctggacttctggagaacttcccctttcctctggtttccttgtcctactgttctttgcctcgtccaggtctctatctcccaaagacctgcccacctcctgggctctcccagggaagcccctctgggccaaagcccatgggtagcttggctgcctccagaagagatgcagagagctgtggggcgatctttcttagtcccactcaccccactcagggccaaccacagaatgccccctccctgctgagctgggtctctggggcttcccactccaggcctggatcccttccttctataaatagtctcctgcaccaccgtgactccctggctgctccttgccccaaagaaccctcttcctgcatgggagagctgtccctccttctcaacctgcccaccgggacactccccctgctctctagaaaggaactctctttcttctcttggcactgggggcgtcaggctgtcggatgttccttccttccataccccagcataccttctccttgcttagagtgcaggggtctgagacagcagccactggggttgaggagggggaggagacccctgagacccagaggtgccccttcctcagctgggagtgggccgcctcatgctctgctggggcctggcatggaacgtgagacctgtaagctgtcccgcgggccccggcaccccgcccagctgtgcactttgctcactcgctctgccatggtgccatgactgtactgtgcccatgcgtgacctggactgtggaccctctgctgctccgcctctcccctccccactggctctgtctgctctcctgccaccctgctggcggggagcccctccccggggagttcttggtgaagtccttcccgggcctccttgtgtttttgcctcattcctactgtcacacaggtcacgagggtggactccctacaatcaacaaagcaaacagagagcctgtgggaggggctgacagcagcaggcggctgtttgggggatgatggaggtgacatcaggcagaggagagtgcagcctcacagtgactttctcagaggtgacagagatgatggatgagcagctggattttcgtgatgaaggacggaagcagcagcgggccggcaaggccatacctcggtgagggacaggtggacaacggtcacctatctgtagccaggggcagttgtgtggccagctgtctctctgggatgagtcaggaggcctggaggcttggggagaggtgtggagaaggagagaacatggcccaggcactttccttcaccctgtgctgacagcattgctgtgggggtggcccactgccctcccctggccctcatgtccccccggggctggggtccgcctgcctgtgctgtgcttgcgacgtgcatcaataaaccaccatggcctgaggaaaaaaaaaaaaaaaa

SEQ ID NO: 2240 - protein, 330 aa, Homo sapiens
MELLSTPHSIEINNITCDSFSISWAMEDSDLERVTHYFIDLNKKENKNSNKFKHRDVPTKLVAKAVPLPMTVRGHWFLSPRTEYSVAVQTAVKQSDGEYLVSGWSETVEFCTGDYAKEHLAQLQEKAEQIAGRMLRFSVFYRNHHKEYFEHARTHCGNMLQPYLKDNSGSHGSPTSGMLHGVFFSCNTEFNTGQPPQDSPYGRWRFQIPAQRLFNPSTNLYFADFYCMYTAYHYAILVLAPKGSMGDRFCRDRRPLLDIACNKFLTCSVEDGELVFRHAQDLILEIIYTEPVDLSLGTLGEISGHQLMSLSTADAKKDPSCKTCNISVGR

SEQ ID NO: 2241 - DNA, 1946 bp, Homo sapiens
gatggcggcgcccaggccctgccacgcagacttccgcccggcgcggagaccgaaggctggcggctggtcgcgttgcaggcaacatgtcggaaggaaacgccgccggcgagcccagcacgccgggagggccccgacctctcctgactggggcccgggggctcatcgggcggcggccggcgcctcccctcacccccggccgccttccctccatccgttccagggacctcaccctcgggggagtcaagaagaaaaccttcaccccaaatatcatcagtcggaagatcaaggaagagcccaaggaagaagtaactgtcaagaaggagaagcgtgaaagggacagagaccgacaacgagaggggcatggacgagggcgaggccgtccagaagtgatccagtctcactccatctttgagcagggcccagctgaaatgatgaagaaaaaagggaactgggataagacagtggatgtgtcagacatgggaccttctcatatcatcaacatcaaaaaagagaagagagagacagacgaagaaactaaacagatcttgcgtatgctggagaaggacgatttcctcgatgaccccggcctgaggaacgacactcgaaatatgcctgtgcagctgccgctggctcactcaggatggctttttaaggaagaaaatgacgaaccagatgttaaaccttggctggctggccccaaggaagaggacatggaggtggacatacctgctgtgaaagtgaaagaggagccacgagatgaggaggaagaggccaagatgaaggctcctcccaaagcagccaggaagactccaggcctcccgaaggatgtatctgtggcagagctgctgagggagctgagcctcaccaaggaagaggaactgctgtttctgcagctgccagacaccctccctggccagccacccacccaggacatcaagcctatcaagacagaggtgcagggcgaggacggacaggtggtgctcatcaagcaggagaaagaccgagaagccaaattggcagagaatgcttgtaccctggctgacctgacagagggtcaggttggcaagctactcatccgcaagtctggaagggtgcaactcctcttgggcaaggtgactctggacgtgaccatgggaactgcctgctccttcctgcaggagctggtgtccgtgggccttggagacagtaggacaggggagatgacagtcctgggacacgtgaagcacaaacttgtatgttcccctgattttgaatccctcttggatcacaaacaccggtaaaatgagcaggtggaggaggacggcgcctgtgcccacggctgctgcctgctccagacattttgttcttgaatctgtgagacccagaaggggcccactgagcccactcactccagcctttggcaaccattgttccaggtcccccagggcttcctcccacagcagctgtgaatggcacagtgaccttcctgcagcgtggagatggcacatccttgctgctggggacttggccctgctatttatttttgtatttatgtcttaatctcttccactgatgcatcctccaagggtagatggggagggtctgtgtgaaggggccggcttctcttggtgcctgctgggttgcaggggcaggaagcgtgtggactgcagcttctgctggtgctccccccgtcctcctggaggcagtataggagagagagcaaggattgagtctgagacttaagcactcggtcccagcttgccagttcctggttctgtgtccttggacaaactacctaacctttctgagcctcctatacctcatccgacacaaatggggatgatacctacctccagggttggcgtgaggattcatgggctattatagatgaaaactgcacaaggccagaaccagcaggcactcaataaacgttcatgtcctttttctctaaaaaaaaaaaaaaaaaa

SEQ ID NO: 2242 - protein, 398 aa, Homo sapiens
MSEGNAAGEPSTPGGPRPLLTGARGLIGRRPAPPLTPGRLPSIRSRDLTLGGVKKKTFTPNIISRKIKEEPKEEVTVKKEKRERDRDRQREGHGRGRGRPEVIQSHSIFEQGPAEMMKKKGNWDKTVDVSDMGPSHIINIKKEKRETDEETKQILRMLEKDDFLDDPGLRNDTRNMPVQLPLAHSGWLFKEENDEPDVKPWLAGPKEEDMEVDIPAVKVKEEPRDEEEEAKMKAPPKAARKTPGLPKDVSVAELLRELSLTKEEELLFLQLPDTLPGQPPTQDIKPIKTEVQGEDGQVVLIKQEKDREAKLAENACTLADLTEGQVGKLLIRKSGRVQLLLGKVTLDVTMGTACSFLQELVSVGLGDSRTGEMTVLGHVKHKLVCSPDFESLLDHKHR

SEQ ID NO: 2243 - DNA, 3549 bp, Homo sapiens
gtcttcccggcgcccaggcttgggctcatagggagaaaggaagctgcgctgcattctgcgggacgaaccctgctccgcgcgagaatttttttgattccttcttatttggagaaatctccagctgctctgatgatagcctaagaagactgcatgctgcttcctctcgatgccaagccagaccctctcacaacctcggatctcagtccttcatggagacctggtcccagcaggaatggcagtgcaggaaattggcgcccagatggttcttccatgtgaagttgtctcgggctctgggctgacgagagaacacctggtaaccaggttagccctctgtcagtcacccagggcagggcagcatggtgcggattcagaggaggaagcttttggcatcttgcctgtgcgtcacagccaccgtctttctgcttgtcacactccaggtcatggttgagctggggaagtttgaaaggaaggagtttaaaagttccagtttgcaagatggacatacaaaaatggaggaagcacctacgcatcttaattcatttcttaagaaagaaggattgaccttcaacaggaaaagaaaatgggaattggacagctaccccattatgctctggtggtccccgctgacgggggagactgggaggttaggccaatgtggagcagatgcttgtttcttcaccatcaaccggacctacctccatcatcacatgaccaaagcattcctcttctatggtactgactttaacatagatagcttacctctgcctcggaaagcccatcatgactgggctgtttttcatgaagagtccccgaaaaacaattataagctctttcataaaccagtgatcaccttgttcaactacactgccacgttcagcaggcattcccacttgccactaactacccaatacttggagagcattgaagtcctgaagtcactccgatacctagttcctttgcagtccaaaaacaagcttagaaaaagacttgctccgctggtgtatgtacagtcagactgtgacccaccatcagacagggacagctatgttcgcgagctgatgacttacatcgaggtcgattcctatggtgaatgtttacgaaacaaagacctccctcagcagctgaaaaatccagcctctatggatgccgatggcttttataggatcattgcacagtataagtttatcctagcttttgagaatgcagtttgtgatgactacatcactgagaagttctggaggccactgaaactgggggtagtccctgtatattacggatcccccagcatcacagactggcttccaagtaacaaaagtgctattcttgtatcagaattttctcaccccagggaactggcaagttacatcagacgactggattctgatgacagattgtatgaggcctatgtagaatggaagctgaagggtgagatctctaaccagcgacttctgacagctctcagggaacggaaatggggagtgcaagacgtcaaccaggacaattacatcgatgcatttgagtgtatggtgtgcaccaaggtgtgggctaatatcaggcttcaggaaaagggcttaccacccaaaagatgggaggcagaagatacccacctgagttgcccagagcccacagtgtttgctttctcaccactccggactccacctttgagctctttgcgagagatgtggatttccagctttgaacaatccaagaaagaagcccaggcactaaggtggctggttgataggaatcaaaacttttcatctcaagagttttggggcctagtattcaaggactgatttcaaaaatgatcagaatgaaacagactagagccttcttgaggtttattttctaggttgccttaatatttgaacataatagctattctgttgactatccatcaggataataattagttgctgcagtactcataatgagccctttcaaggaatagatgtaaattacccttaggggtagccactatattttttatactaaaaaaggaaatatttcttatggacactggttatcttccatgtccgtgtctgtggacccacatacttactgccttttgtggaaattcacctagagtgagtactttccttgtgcaatggagggagacgatctagctatagattcttgatactcacctcactctcaacagcttattggtatttggcaaacctggtatcctgcagccgagcatgaacatgaaatacattagaacttggcaatgagagatcccatctgttggtttccagggatgtaagtgagtaataaaagctgtttcaagtttatccactatccactcttcaagtgaaaagaacttatgtgtgtctaccttcttctccataccctgagccacctctctcactttctttagttgtgccttgccctatcgcctcccattttcccttcaaagtagaatgtcttgtaaagacacagtaactcctgtgtgttttgattagtgagatgttaccacttaccccttctgctgcgcagaataatattaagaattgctatgcttatgattcaggctggacagcctggacattttgagcagcgcgagagtagaagtgaatacccccaggaactccaattgtgctgaagctgatttgtctgttcgtaggatgatgtgcagcctgtcacagtggcagccacaggcattcagtttgtgggcatttcctgtcatttcggatcctgctatagggaaggttcagctctcctgtctggggcatctactggagcacctcagaagacaaggaggaaaacactggctcatgttttctttccatgtgagggaggggaggtttctagatgatactaaaagcctgttgccactgttgtgtcatgatttccattcttcatcatggaaagccacaagcctcagaaggcagccagaggacaggaagagtctgtgatgctcatgtctgtgtcatggcatgagggggaattgacgagtgcttgcttagcatcagctctcattgtattgaaggctgtgcccttggtgtgcttagcagtgagcagcgtcttcattaggtagctctggctgggctttgtcagccagcgtgtgagaaaggagaaccaaaaccaatacctccttatagaagccagaaggatcacattggatgagagaaggtgtctataactgggttcttcccaatcccagctctttcattaactaaatatgatcttggacatatctcttaacctccatcggccttagtttttgcatccaaaaagaagtgattgggctggtcttggaaggtttttttcttttttttcccctgtgtaacattcttcattgttcatcaacatttaagaaatttaattttgtagatgtttttactaaagagggtaacaaactattttggaactgctgtatgttattcaagggaagcacgctgtttggaggaaggagcatacttaatgggtagtattgaggatgaaagggaatttctctctctgccattttatttgataatattaaagaaataaagactggaaagggggattccttgttaaaggtcagattttaaattgcatataaaa

SEQ ID NO: 2244 - protein, 479 aa, Homo sapiens
MVRIQRRKLLASCLCVTATVFLLVTLQVMVELGKFERKEFKSSSLQDGHTKMEEAPTHLNSFLKKEGLTFNRKRKWELDSYPIMLWWSPLTGETGRLGQCGADACFFTINRTYLHHHMTKAFLFYGTDFNIDSLPLPRKAHHDWAVFHEESPKNNYKLFHKPVITLFNYTATFSRHSHLPLTTQYLESIEVLKSLRYLVPLQSKNKLRKRLAPLVYVQSDCDPPSDRDSYVRELMTYIEVDSYGECLRNKDLPQQLKNPASMDADGFYRIIAQYKFILAFENAVCDDYITEKFWRPLKLGVVPVYYGSPSITDWLPSNKSAILVSEFSHPRELASYIRRLDSDDRLYEAYVEWKLKGEISNQRLLTALRERKWGVQDVNQDNYIDAFECMVCTKVWANIRLQEKGLPPKRWEAEDTHLSCPEPTVFAFSPLRTPPLSSLREMWISSFEQSKKEAQALRWLVDRNQNFSSQEFWGLVFKD

SEQ ID NO: 2245 - DNA, 3549 bp, Homo sapiens
cggacaccatgcagtcggatgatgttatctgggatacactaggaaacaagcaattttgttccttcaaaataagaaccaagactcagagcttctgccgaaatgaatatagcctgactggactgtgtaatcggtcatcctgtcccctggcaaatagtcagtatgccactattaaagaagagaaaggacagtgctacttgtatatgaaggttatagaacgagcggcttttcctcggcgtctctgggaacgggtccggcttagtaaaaactatgagaaagcactggagcaaatagatgaaaatctgatttactggccccgtttcattcgacacaaatgtaagcagagattcaccaagatcacccaatacctaattcgaattagaaaacttacactaaagcgacagaggaaacttgttcctttgagtaagaaggtggagcgtagggagaaaagaagagaggaaaaggcattaatagctgctcagctggacaatgccattgagaaggaattactggagagactgaaacaagatacgtatggcgacatctacaacttccccattcatgccttcgacaaagccctggaacaacaggaggcagagagtgactcttcagatactgaggaaaaagatgatgatgatgatgatgaggaagatgtggggaaaagagaatttgtcgaagatggtgaggtagatgagagtgacataagtgattttgaggatatggataaactggatgccagcagtgatgaagatcaggatggtaaatcctccagtgaggaggaggaagaaaaggcccttagtgcgaaacacaaaggcaaaatgcccttgagaggaccactgcagagaaaacgagcctatgtggaaatagaatacgagcaggagacagagcccgtggccaaagccaaaaccacgtgatttccctttcagcatttatacccaggactgaacatgcagaactgtttttttttttttatcttaaacacatacacacctccagtttttgctcttttgtgttgtactgaacacaatatttgtgtttttattatttatgccacgtcagtggggcaagaaatctggagtgagtgaagaaagctaagttgtgaacaagagtgtttttatagcatatgtgttgaagtaacagcttgtgcccgagaaacttaacagatgagttcttgaatctgggatgagatgacggatgtaaatatttctaaattttaaatgctacattacttggtgtccttttttctcccaaactttatttagaaatggaaggagttcaattttttcttgttctactttccctattcttatggaggtaaaaggaaaggaaggaaggaaaaagcagctttcacttacaaagtttcgtgtaaaaatatctttttttcttaaataactccattcatacaaattgggatgggaagaaaatcctttcctcttgggaaagtaatacaagtcttaagttccattgtagggtgcgccttcagaaacctgctgcacttttctgatatagttcaccacttttctgtcttcacagctttggggaattttggccaggagaccctgaaacatgaaaccaaacaggctttgatattttttttttaattactttccccttttgcttgattcttcttccttggtatcatattcaaaggaggaaagaatggatgacacttagggacaggtcactaagcagaataggtattagttggttttttattatttttaaatttatatagctctcatgtattgaaggtgctactttaaaaactgtgttaatgtacttgcaaatctcctgctggctcatgaaacagcagaattccagccaaggcaaattcagttggatctagggcttgaaaactgcccaagattaaagagctaagatgaaatagtttgaataaactggtaaaataacaattcatactatctctacatatttttaggatatgaatttttttttcctgctgggtagattgtccagtgacttatggcatgaatttcttttcatgctaccttcaatcttcaactaaagatttctaaaaggggtaagaaatgaggcagtagtttattaaatacatagaagtacacagctattatatgctgtggctttgagaagttaacttttgtggaatatgaaaccaaaggaagaatttccatgtagataaattaagaatagggaaaaacatctacctaaaagatggttgtccctaaaaaaactggaaacatctgaaatgctctatttatgttattattcctgggagcttatagcccattatttttactttttttttttaattcagaagactagaacagaacttaaattttacaaacttttgatcataatgcttttgcccatactgtctcgtccttagccccagtgacatgtgctgatcctcctgcctttagttctaaatggttctgaatagctttaaaagatgaataagaaaaaagatcaagctcttttgaggctagagggctcatatggagatctaaaaccctccatgttcatttccagacttggtcaggcacatacatagtaaattataatcaatcatgggaattacataaggataatgaggcccaactgaaaccaagtttcagtctgccttacctttacccgtccttgagaacagcggtccaggagaatcaggcagtctgtggcctcctgtagcagggcgctcttaacagactcaggtgtaaggtttggatcccttgctacatcacaaatcagtttcaagagggccttcagtaagaccacaagtctgcaggaaactctggaatcaggaagaaaagctatgttcatactctaaatctggatattaaaattggaagagacttcaaagactgtcaagtggaaagctatcatttcctaaattaaggaacttaggtcaaagttaaatgaaaaagacctaaaaacagaaccaaagacagcctctagatttcttaccctcaagtctcctgttagcatactgcctatacacacagacacaccctctgccacactgctctcttccttccagaagcttggttctactgtaagcaacagctccttcatgggctgagaaggggaaaccaggatctccccaaccaagggcctatacttttatttttcaactctattaactgaactatgcttggagagagccctgaatcctttaactttaatgccatcttaggcctggaagttagagtgagggaaatgagcttggcttctgggactgtgtcaagttgaattttctgtcatttaatttcagatcctagctcatcatcagtgaagtccagcctacttacttgtaactattaacctttctaaaagttttcatcgccttggtaaagctccagaaatggacaatgctagtgactgcacaatattgtgactgtacttaatgccactgaactgtacactttaaaatggaaaatttatatgtatttttaccacaataaacaaaaaaccctaaaaaaactttaatgaaaggtggaaaataatttaacttacaatgtgaaaatacaatgtgaaatgtacaataaatcatatttatggaaaaaaaaaaaaaaa

SEQ ID NO: 2246 - protein, 300 aa, Homo sapiens
MQSDDVIWDTLGNKQFCSFKIRTKTQSFCRNEYSLTGLCNRSSCPLANSQYATIKEEKGQCYLYMKVIERAAFPRRLWERVRLSKNYEKALEQIDENLIYWPRFIRHKCKQRFTKITQYLIRIRKLTLKRQRKLVPLSKKVERREKRREEKALIAAQLDNAIEKELLERLKQDTYGDIYNFPIHAFDKALEQQEAESDSSDTEEKDDDDDDEEDVGKREFVEDGEVDESDISDFEDMDKLDASSDEDQDGKSSSEEEEEKALSAKHKGKMPLRGPLQRKRAYVEIEYEQETEPVAKAKTT

SEQ ID NO: 2247 - DNA, 2192 bp, Homo sapiens
ctttaaatttttaagttttttttctttttagtcttcagaaaggcaacagtagtcttttaacgtcactgttaaaagtgtaagactcttttactccctgagagtcccctttccctttcttgcgtcctttcctctttattctttttttttttttttttttttttactgagacggagtctcactctgtcgcccaggctggagtgcagtggcgcgatctcggctcactgcaaactccgcctcccgggttcaccctttctctttattcttatcccggtcagactcgccccctcctccaagacatctctctgttttattttatttgattttagttctctttgggtgatcgctccttccctcttcagcggatccctccccgcctccatcctcgttctgtgggagagaccagccttctggtgctgcagtcaggaatggagcttgacagcgctctggaagccccatcgcaggaagactctaatttgtccgaggagttgtctcactccgcctttggacaggccttctccaagattttacactgtcttgcccgcccggaggcacgacgaggcaacgtaaaagatgcagttcttaaagacctcggtgatctaatagaagccacaggatttgataggttatttgaggggactggtgcacggctccgcggaatgccggagacactggggcaggtagcaaaagccctggagaagtatgcagccccctccaaggaggaggaaggtggaggtgatgggcactccgaagcggccgagaaagcagcccaagttgggttactgtttcttaaactgttagggaaagttgagactgctaagaattccctggtcggccctgcatggcagacgggcctgcatcacttggcaggacccgtttatatttttgccatcacacacagcttggagcaaccatggaccactccgagatctcgggaagttgctagggaggtgctcacctcactgcttcaagttactgaatgcggttctgtggcaggattcctacatggagaaaatgaagatgagaaagggagactttcggtgatactagggcttctcaaacccgacttgtataaggaatcctggaagaataaccctgccatcaaacatgttttctcatggactctgcaacaggtcactcggccctggctgagccagcatctggaaagggtacttcccgcatcattggtcatttcagatgactatcagactgagaacaaaatcctgggtgtacactgtctccatcacattgtgcttaatgtgccagctgctgatttgctccagtataacagagcccaggtcctataccatgccatttccaaccacctgtacacaccagagcaccacctcattcaggctgtgctcctgtgtctgctggatttattccccatcctggagaaaaccctgcactggaaaggagatggagctcgacccaccacccattgtgatgaggtcctgcggctgatcctgacccacatggagccagagcaccgccttcttttacgcaggacctacgcaagaaacctgccggctttcgtgaacaggttggggatcctaactgtccggcacttaaagaggctggagagagtcatcattggttatctggaggtttatgatggacctgaggaggaagctagactgaagatattggaaaccctaaaacttctcatgcaacatacttggcccagagtttcctgcagacttgtggtcttactgaaggccctcttgaaactgatttgtgatgtagcaagggatccaaaccttacacctgagtctgttaagagcgccctgctacaggaggccacagactgcctgattctcctggaccgccgttctcaaggacgggtaaagggtctcctggccaaaattccccaaagctgtgaagacagaaaagtggtgaactatatcagaaaagtgcagcaggtttctgaaggcgcaccctacaatggaacttaagacttgtattactttcccaagaggaaaggattttcttcccatcccaatttgtatgaatggagttatttaagaaaaaaagatatttttacacgaaactttgtaagtgaaagctgctttttccttccttctttccttttacctccataagaatagggaaagtagaacaagaaaaaattgaactccttccatttctaaataaagtttgggagaaaaaaggaaaaaaaaaaaaaaaaaaaaaaa

SEQ ID NO: 2248 - protein, 508 aa, Homo sapiens
MELDSALEAPSQEDSNLSEELSHSAFGQAFSKILHCLARPEARRGNVKDAVLKDLGDLIEATGFDRLFEGTGARLRGMPETLGQVAKALEKYAAPSKEEEGGGDGHSEAAEKAAQVGLLFLKLLGKVETAKNSLVGPAWQTGLHHLAGPVYIFAITHSLEQPWTTPRSREVAREVLTSLLQVTECGSVAGFLHGENEDEKGRLSVILGLLKPDLYKESWKNNPAIKHVFSWTLQQVTRPWLSQHLERVLPASLVISDDYQTENKILGVHCLHHIVLNVPAADLLQYNRAQVLYHAISNHLYTPEHHLIQAVLLCLLDLFPILEKTLHWKGDGARPTTHCDEVLRLILTHMEPEHRLLLRRTYARNLPAFVNRLGILTVRHLKRLERVIIGYLEVYDGPEEEARLKILETLKLLMQHTWPRVSCRLVVLLKALLKLICDVARDPNLTPESVKSALLQEATDCLILLDRRSQGRVKGLLAKIPQSCEDRKVVNYIRKVQQVSEGAPYNGT

SEQ ID NO: 2249 - DNA, 1868 bp, Homo sapiens
agtttcggaaccccagccagctcacctctgcgccgctgaacccgatccgagcctccggcaaaggtttttccctcctcccccggccgagggcttctgcagcccgggcacccccgccccgcggcgccccacattcccccagcccggggcccttggcgcgtgcgctccgtgcggctgtgctccgcgggactttgtttgtttcctcctcgtccctctttgttgggctgaacaccagcctcgtcaaagccccccactccggagggagttcggcttctccagcagggcggctgcagcgcgctgccccgaccccgcctgcggcccctcacgccgctagtgctcccaccccgccctcctggcaccccgcctgcgtccgttcgcccgaggaagccaaccgcgacttcattgatgcacccattccagtggtgtaacgggtgtttctgtggcctgggactggttagcaccaacaagtcctgctcgatgccacccatcagtttccaggaccttccgctcaacatctatatggtcatcttcggcacaggcatctttgtcttcatgctcagccttatcttctgctgctattttatcagcaaactgcggaaccaggcacagagtgagcgatacggatataaggaggtggtgcttaaaggtgatgccaagaagttacaattatatgggcagacctgcgcagtctgtctggaagacttcaaggggaaggatgagttaggcgtgctcccgtgccaacacgcctttcaccgcaagtgtctggtgaaatggctggaagttcgctgtgtctgccccatgtgtaacaagcccattgctagtccctcagaggccacgcagaacattgggattctattggatgagctggtgtgagtgctgccgctacaccgagacctggagaagacctcttgcctcatggatgtctggtccctctgcacagctccaaccaacaggactgtagggtgatgacgatcactttcccagtgatgagaagggtggtctaggactgggcttctaccctcagtgcaagaccagtgccagatgtgcccccacttcctgcctcctgaagccttcttccctgctactccatgctggtggcctcacccatcaagaccactgtctcctggtactggactatctacctgccttgtccctgttctgggggaaggtgtccaccccgatcaagaacatggagaaagtcctctttcaaggctcccattaggaggatgagctgccttgacccagaagggatgagacgggctcttacctctctacaaccttccctccccttcccactccttccggagtaaggttagaagggaaggaaggaaagatcaaggaaccaagcgcctccacgggaggcgagggaggctctgtatgaaacagaagagcagggacataaaggaaaatgtcagtgtttacatgggacctatggaaacaaaggctggcgggcgccagctgactccagagtaagagagggcccttcccctgccaggacccacggtgctatccattcagtctcttcctcagttaatctcggagcttcctattccatgttgaggtttgtgggcccctctagaggagggctagttctatacttaaattgattcccaggggccttttttttttttttttttttttttttgatcaaaaggggtgtggggatgggggtgtctacggttaagcaacagatacctccttccctttgtaaatagtatttttatacttcatcctcgcctctcaggctttagatacgaaatctccagaatggaagggggtggggattttctgttcctccctggagtgggtgagggtgggagaaagttacatatttaaagaaaaataaatttaataacaagtttctctaacct

SEQ ID NO: 2250 - protein, 155 aa, Homo sapiens
MHPFQWCNGCFCGLGLVSTNKSCSMPPISFQDLPLNIYMVIFGTGIFVFMLSLIFCCYFISKLRNQAQSERYGYKEVVLKGDAKKLQLYGQTCAVCLEDFKGKDELGVLPCQHAFHRKCLVKWLEVRCVCPMCNKPIASPSEATQNIGILLDELV

SEQ ID NO: 2251 - DNA, 1665 bp, Homo sapiens
gttggctggggagcccacgctgcctggcgactcgggccaccgaatgtgagaccgagtccctttatgtcaccagcgcacacgctgatttgaaccctgcttcgacgtgtgtgtcatggcttaaaaatagctgctaatctgtcaacctgtcttgggcagaaacagcggcggcgacagcagcaggagcgtcatggccgtggcgctgtctgcgccggcgatccgcctttcggactgaggcccagcgcagcgcttgcaaagagcagcagctacctggcaactgaacccatcatcaccacagccactcctgcagctgccacggtttctgccacctctaagatgtgccctggtaactggctttgggcttctatgacttttatggcccgcttctcccggagtagctcaaggtctcctgttcgaactcgagggaccctggaggagatgccaaccgttcaacatcctttcctcaatgtcttcgagttggagcggctcctctacacaggcaagacagcctgtaaccatgccgacgaggtctggccaggcctctatctcggagaccaggacatggctaacaaccgccgggagcttcgccgcctgggcatcacgcacgtcctcaatgcctcacacagccggtggcgaggcacgcccgaggcctatgaggggctgggcatccgctacctgggtgttgaggcccacgactcgccagcctttgacatgagcatccacttccagacggctgccgacttcatccaccgggcgctgagccagccaggagggaagatcctggtgcattgtgctgtgggcgtgagccgatccgccaccctggtactggcctacctcatgctgtaccaccaccttaccctcgtggaggccatcaagaaagtcaaagaccaccgaggcatcatccccaaccggggcttcctgaggcagctcctggccctggaccgcaggctgcggcagggtctggaagcatgaggggagggggagagaggtcaggccaggcccgtgggtaggtccctggctcccagctggagataggaggcccaggtggcaggtagcaggaggcccagatcacccatcctcccctggggtcaggagaggccgagccccaggccactgtcactctttgtgggaggggacggggagtgaggttgggcagtgtggtggatgggcacccaggaagggttgaccagggaaggaggcagctaggctgtagatggaagatggtcctgggattcgaacaccgctgggatctggccagggtgctccctgggattcacagtcccttcccctctttgtgcccaagtgtttccctctctccctcaccaaaacaaaagggccatctctgccctgcacttgtgcagaaagtcagggatacggcaagcatgaatgcaatggtgtagagttgtgtgaaacccctagcatagagacagacagcgaagagatggtgtgaaaagcttgcagaaccagacagagaaccccacagactttccactccaagcacaggaggaggtagctagcgtgtgagggttggcactaggcccacggctgctgcttgggccaaaaacatacagaggtgcatggctggcagtcttgaaattgtcactcgcttactggatccaagcgtctcgaggataaataaagatcatgaaaaaaaaaaaaaaaaaaaaa

SEQ ID NO: 2252 - protein, 211 aa, Homo sapiens
MCPGNWLWASMTFMARFSRSSSRSPVRTRGTLEEMPTVQHPFLNVFELERLLYTGKTACNHADEVWPGLYLGDQDMANNRRELRRLGITHVLNASHSRWRGTPEAYEGLGIRYLGVEAHDSPAFDMSIHFQTAADFIHRALSQPGGKILVHCAVGVSRSATLVLAYLMLYHHLTLVEAIKKVKDHRGIIPNRGFLRQLLALDRRLRQGLEA

SEQ ID NO: 2253 - DNA, 1488 bp, Homo sapiens
ggggagaatgatttcactacagactctctggaaagcctgggagctgaattccggaagatccccacatcgatgaaagcaaagcgaagccaccaagccatcatcatgtccacgtcgctacgagtcagcccatccatccatggctaccacttcgacacagcctctcgtaagaaagccgtgggcaacatctttgaaaacacagaccaagaatcactagaaaggctcttcagaaactctggagacaagaaagcagaggagagagccaagatcatttttgccatagatcaagatgtggaggagaaaacgcgtgccctgatggccttgaagaagaggacaaaagacaagcttttccagtttctgaaactgcggaaatattccatcaaagttcactgaagagaagaggatggataaggacgttatccaagaatggacattcaaagaccaagtgagtttgtgagattctaacagatgcagcattttgctgctaccttacaagcttctcttctgtcaggactccagaggctggaaagggaccgggactggaaagggaccaggactgaacagactggttacaaagactccaaacaatttcatgccctgtgctgttacagaggagaacaaaatgctttcagcaaggatttgaaaactcttccgtccctgcaggaaaggattgatgctgatagaagagcctggacagatgtaatgagaactaaagaaaacagatggctggagatgacatttatccagggtcactttgtcaggccctaggacttaaatcgaagttgaactttttttttttttttaaccaaatagataggggaagggaggagggagagggaggacagggagagaaaataccatgcataaattgtttactgaatttttatatctgagtgttcaaaatatttccaagcctgagtattgtctattggtatagatttttagaaatcaataattgattatttatttgcacttattacaatgcctgaaaaagtgcaccacatggatgttaagtagaaattcaagaaagtaagatgtcttcagcaactcagtaaaaccttacgccaccttttggtttgtaaaaggttttttatacatttcaaacaggttgcacaaaagttaaaataatggggtcttttataaatccaaagtactgtgaaaacattttacatattttttaaatcttctgactaatgctaaaacgtaatctaattaaatttcatacagttactgcagtaagcattaggaagtgaatatgatatacaaaatagtttataaagactctatagtttctataatttattttactggcaaatgtcatgcaacaataataaattattgtaaactttgtggcttttggtctgtgatgcttggtctcaaaggaaaaaataagatggtaaatgttgatatttacaaacttttctaaagatgtgtctctaacaataaaagttaattttagagtaaaaaaaaaaaaaaaaaaaaaaaaaaaaa

SEQ ID NO: 2254 - protein, 106 aa, Homo sapiens
MKAKRSHQAIIMSTSLRVSPSIHGYHFDTASRKKAVGNIFENTDQESLERLFRNSGDKKAEERAKIIFAIDQDVEEKTRALMALKKRTKDKLFQFLKLRKYSIKVH

SEQ ID NO: 2255 - DNA, 4465 bp, Homo sapiens
cctgcagcctccggagtcagtgccgcgcgcccgccgccccgcgccttcctgctcgccgcacctccgggagccggggcgcacccagcccgcagcgccgcctccccgcccgcgccgcctccgaccgcaggccgagggccgccactggccggggggaccgggcagcagcttgcggccgcggagccgggcaacgctggggactgcgccttttgtccccggaggtccctggaagtttgcggcaggacgcgcgcggggaggcggcggaggcagccccgacgtcgcggagaacagggcgcagagccggcatgggcatcgggcgcagcgaggggggccgccgcggggcagccctgggcgtgctgctggcgctgggcgcggcgcttctggccgtgggctcggccagcgagtacgactacgtgagcttccagtcggacatcggcccgtaccagagcgggcgcttctacaccaagccacctcagtgcgtggacatccccgcggacctgcggctgtgccacaacgtgggctacaagaagatggtgctgcccaacctgctggagcacgagaccatggcggaggtgaagcagcaggccagcagctgggtgcccctgctcaacaagaactgccacgccggcacccaggtcttcctctgctcgctcttcgcgcccgtctgcctggaccggcccatctacccgtgtcgctggctctgcgaggccgtgcgcgactcgtgcgagccggtcatgcagttcttcggcttctactggcccgagatgcttaagtgtgacaagttccccgagggggacgtctgcatcgccatgacgccgcccaatgccaccgaagcctccaagccccaaggcacaacggtgtgtcctccctgtgacaacgagttgaaatctgaggccatcattgaacatctctgtgccagcgagtttgcactgaggatgaaaataaaagaagtgaaaaaagaaaatggcgacaagaagattgtccccaagaagaagaagcccctgaagttggggcccatcaagaagaaggacctgaagaagcttgtgctgtacctgaagaatggggctgactgtccctgccaccagctggacaacctcagccaccacttcctcatcatgggccgcaaggtgaagagccagtacttgctgacggccatccacaagtgggacaagaaaaacaaggagttcaaaaacttcatgaagaaaatgaaaaaccatgagtgccccacctttcagtccgtgtttaagtgattctcccgggggcagggtggggagggagcctcgggtggggtgggagcgggggggacagtgccccgggaacccggtgggtcacacacacgcactgcgcctgtcagtagtggacattgtaatccagtcggcttgttcttgcagcattcccgctcccttccctccatagccacgctccaaaccccagggtagccatggccgggtaaagcaagggccatttagattaggaaggtttttaagatccgcaatgtggagcagcagccactgcacaggaggaggtgacaaaccatttccaacagcaacacagccactaaaacacaaaaagggggattgggcggaaagtgagagccagcagcaaaaactacattttgcaacttgttggtgtggatctattggctgatctatgcctttcaactagaaaattctaatgattggcaagtcacgttgttttcaggtccagagtagtttctttctgtctgctttaaatggaaacagactcataccacacttacaattaaggtcaagcccagaaagtgataagtgcagggaggaaaagtgcaagtccattatgtaatagtgacagcaaagggaccaggggagaggcattgccttctctgcccacagtctttccgtgtgattgtctttgaatctgaatcagccagtctcagatgccccaaagtttcggttcctatgagcccggggcatgatctgatccccaagacatgtggaggggcagcctgtgcctgcctttgtgtcagaaaaaggaaaccacagtgagcctgagagagacggcgattttcgggctgagaaggcagtagttttcaaaacacatagttaaaaaagaaacaaatgaaaaaaattttagaacagtccagcaaattgctagtcagggtgaattgtgaaattgggtgaagagcttaggattctaatctcatgttttttccttttcacatttttaaaagaacaatgacaaacacccacttatttttcaaggttttaaaacagtctacattgagcatttgaaaggtgtgctagaacaaggtctcctgatccgtccgaggctgcttcccagaggagcagctctccccaggcatttgccaagggaggcggatttccctggtagtgtagctgtgtggctttccttcctgaagagtccgtggttgccctagaacctaacaccccctagcaaaactcacagagctttccgtttttttctttcctgtaaagaaacatttcctttgaacttgattgcctatggatcaaagaaattcagaacagcctgcctgtccccccgcactttttacatatatttgtttcatttctgcagatggaaagttgacatgggtggggtgtccccatccagcgagagagtttcaaaagcaaaacatctctgcagtttttcccaagtaccctgagatacttcccaaagcccttatgtttaatcagcgatgtatataagccagttcacttagacaactttacccttcttgtccaatgtacaggaagtagttctaaaaaaaatgcatattaatttcttcccccaaagccggattcttaattctctgcaacactttgaggacatttatgattgtccctctgggccaatgcttatacccagtgaggatgctgcagtgaggctgtaaagtggccccctgcggccctagcctgacccggaggaaaggatggtagattctgttaactcttgaagactccagtatgaaaatcagcatgcccgcctagttacctaccggagagttatcctgataaattaacctctcacagttagtgatcctgtccttttaacaccttttttgtggggttctctctgacctttcatcgtaaagtgctggggaccttaagtgatttgcctgtaattttggatgattaaaaaatgtgtatatatattagctaattagaaatattctacttctctgttgtcaaactgaaattcagagcaagttcctgagtgcgtggatctgggtcttagttctggttgattcactcaagagttcagtgctcatacgtatctgctcattttgacaaagtgcctcatgcaaccgggccctctctctgcggcagagtccttagtggaggggtttacctggaacattagtagttaccacagaatacggaagagcaggtgactgtgctgtgcagctctctaaatgggaattctcaggtaggaagcaacagcttcagaaagagctcaaaataaattggaaatgtgaatcgcagctgtgggttttaccaccgtctgtctcagagtcccaggaccttgagtgtcattagttactttattgaaggttttagacccatagcagctttgtctctgtcacatcagcaatttcagaaccaaaagggaggctctctgtaggcacagagctgcactatcacgagcctttgtttttctccacaaagtatctaacaaaaccaatgtgcagactgattggcctggtcattggtctccgagagaggaggtttgcctgtgatttcctaattatcgctagggccaaggtgggatttgtaaagctttacaataatcattctggatagagtcctgggaggtccttggcagaactcagttaaatctttgaagaatatttgtagttatcttagaagatagcatgggaggtgaggattccaaaaacattttatttttaaaatatcctgtgtaacacttggctcttggtacctgtgggttagcatcaagttctccccagggtagaattcaatcagagctccagtttgcatttggatgtgtaaattacagtaatcccatttcccaaacctaaaatctgtttttctcatcagactctgagtaactggttgctgtgtcataacttcatagatgcaggaggctcaggtgatctgtttgaggagagcaccctaggcagcctgcagggaataacatactggccgttctgacctgttgccagcagatacacaggacatggatgaaattcccgtttcctctagtttcttcctgtagtactcctcttttagatcctaagtctcttacaaaagctttgaatactgtgaaaatgttttacattccatttcatttgtgttgtttttttaactgcattttaccagatgttttgatgttatcgcttatgttaatagtaattcccgtacgtgttcattttattttcatgctttttcagccatgtatcaatattcacttgactaaaatcactcaattaatcaatgaaaaaaaaaaa

SEQ ID NO: 2256 - protein, 314 aa, Homo sapiens
MGIGRSEGGRRGAALGVLLALGAALLAVGSASEYDYVSFQSDIGPYQSGRFYTKPPQCVDIPADLRLCHNVGYKKMVLPNLLEHETMAEVKQQASSWVPLLNKNCHAGTQVFLCSLFAPVCLDRPIYPCRWLCEAVRDSCEPVMQFFGFYWPEMLKCDKFPEGDVCIAMTPPNATEASKPQGTTVCPPCDNELKSEAIIEHLCASEFALRMKIKEVKKENGDKKIVPKKKKPLKLGPIKKKDLKKLVLYLKNGADCPCHQLDNLSHHFLIMGRKVKSQYLLTAIHKWDKKNKEFKNFMKKMKNHECPTFQSVFK

SEQ ID NO: 2257 - DNA, 2042 bp, Homo sapiens
cgcggggcctgggccaggcggcagctaaggcccgcggtgacagcatgggtgaaggggagcggggcagaggaggccttgggctgttttcggcggcgggtgggggcgaggggctggcgggtcagagtcccgggtccaggccggggctctgactcgcggttggtgttcccccgaccccgcagcgcggggtgtcctgtcctcgccatgaggccgcagcaggcgccggtgtccggaaaggtgttcattcagcgagactacagcagtggcacacgctgccagttccagaccaagttccctgcggagctggagaaccggattgataggcagcagtttgaagaaacagttcgaactctaaataacctttatgcagaagcagagaagctcggcggccagtcatatctcgaaggttgtttggcttgtttaacagcatataccatcttcctatgcatggaaactcattatgagaaggttctgaagaaagtctccaaatacattcaagagcagaatgagaagatctatgctccacaaggcctcctcctgacagaccctattgagcgaggactgcgagttattgaaattaccatttatgaagacagaggcatgagcagtggaagataaaccgaagaattaaagatcccacttccagccgggcccctcatgtatccactggccgaccgcagagtgtccctacctcctctccagagcatcattcctttctatctgctgccagagccacggtgccatttactccaaggactcactttctaaaattccacacctggagtgacctctagtcgctcagcatccactttgtgtctccaaattgtgtaggactctgtaatcttttgattagtttctgagaaaacacaatgaagcacttcacttttttttattcaaagccatttaataaaacacagttggtcagcccagtgcaaagcttgttatctgccaccagtacataccattggttctcttcattccttgggccagcttctcaggtggctttagacctcaacaagccgtatcttcaccagtgttctatcttgttcccctaaattaataaaatgtttttctccaggattttggtgagggttggctgtggctgtcgttttgcacctcccagatttcaaagaattactggttttaccatgactcaaatcttaagatctgtttctactattcagttcctcaaactgaagcttattgaaaaaaaaatgtataatgttatttgttttattatagcaattatgcctaattaaagcagtatttaatgcaatttccagttatttctttggagaattttatgtcattgttccattaccttgaatgttggaaagatatgatacgtgctgcttgttcatcacaaaaatcagtaagcacaataaagtggatgccaaaccatcagacacataaatgttcccgctgtgtccctggatatggaataagcaggtataaaaaatattttaattatagttttgttataaatataacttatgagaaaaaaatttgataggaataatactgtatattactaatttttaactatccctaaggcaaaccttatgacccacagaattttctcatatacagtattcagtgcacagaaatcttatgattggctcaagtacagtaagttacttctcagtaaaactctcaagtctgagtccatatttgtagctctgcttttggctgtacgttcctaggatcggggctgcttatgcctttcgtttatccttggggtttgagagcgctgtatttgggagagagtttaaaaatacattaggagagagaaaccattaaaagtttcactgtcagatatattgtaggtgctaatactggatttcgtctcagatttaatttcttttatgggtctgttagtcattcaacaaatcccataagtatgtgttaatattttaattgtgtaaaactcatttgttactttacagcctgtaatagtgtgtctgcattttcaacctgttgcaataactttgctgaaatattaacacattaataaaacttttcttaaacaaaaaaaaaaaaaaaaa

SEQ ID NO: 2258 - protein, 137 aa, Homo sapiens
MRPQQAPVSGKVFIQRDYSSGTRCQFQTKFPAELENRIDRQQFEETVRTLNNLYAEAEKLGGQSYLEGCLACLTAYTIFLCMETHYEKVLKKVSKYIQEQNEKIYAPQGLLLTDPIERGLRVIEITIYEDRGMSSGR

SEQ ID NO: 2259 - DNA, 1919 bp, Homo sapiens
aggacgtaagtgacggcgaaggcggtgcgacagcagctggagggcagaggaggcggcgcggggtgtcctgtcctcgccatgaggccgcagcaggcgccggtgtccggaaaggtgttcattcagcgagactacagcagtggcacacgctgccagttccagaccaagttccctgcggagctggagaaccggattgataggcagcagtttgaagaaacagttcgaactctaaataacctttatgcagaagcagagaagctcggcggccagtcatatctcgaaggttgtttggcttgtttaacagcatataccatcttcctatgcatggaaactcattatgagaaggttctgaagaaagtctccaaatacattcaagagcagaatgagaagatctatgctccacaaggcctcctcctgacagaccctattgagcgaggactgcgagttattgaaattaccatttatgaagacagaggcatgagcagtggaagataaaccgaagaattaaagatcccacttccagccgggcccctcatgtatccactggccgaccgcagagtgtccctacctcctctccagagcatcattcctttctatctgctgccagagccacggtgccatttactccaaggactcactttctaaaattccacacctggagtgacctctagtcgctcagcatccactttgtgtctccaaattgtgtaggactctgtaatcttttgattagtttctgagaaaacacaatgaagcacttcacttttttttattcaaagccatttaataaaacacagttggtcagcccagtgcaaagcttgttatctgccaccagtacataccattggttctcttcattccttgggccagcttctcaggtggctttagacctcaacaagccgtatcttcaccagtgttctatcttgttcccctaaattaataaaatgtttttctccaggattttggtgagggttggctgtggctgtcgttttgcacctcccagatttcaaagaattactggttttaccatgactcaaatcttaagatctgtttctactattcagttcctcaaactgaagcttattgaaaaaaaaatgtataatgttatttgttttattatagcaattatgcctaattaaagcagtatttaatgcaatttccagttatttctttggagaattttatgtcattgttccattaccttgaatgttggaaagatatgatacgtgctgcttgttcatcacaaaaatcagtaagcacaataaagtggatgccaaaccatcagacacataaatgttcccgctgtgtccctggatatggaataagcaggtataaaaaatattttaattatagttttgttataaatataacttatgagaaaaaaatttgataggaataatactgtatattactaatttttaactatccctaaggcaaaccttatgacccacagaattttctcatatacagtattcagtgcacagaaatcttatgattggctcaagtacagtaagttacttctcagtaaaactctcaagtctgagtccatatttgtagctctgcttttggctgtacgttcctaggatcggggctgcttatgcctttcgtttatccttggggtttgagagcgctgtatttgggagagagtttaaaaatacattaggagagagaaaccattaaaagtttcactgtcagatatattgtaggtgctaatactggatttcgtctcagatttaatttcttttatgggtctgttagtcattcaacaaatcccataagtatgtgttaatattttaattgtgtaaaactcatttgttactttacagcctgtaatagtgtgtctgcattttcaacctgttgcaataactttgctgaaatattaacacattaataaaacttttcttaaacaaaaaaaaaaaaaaaaa

SEQ ID NO: 2260 - protein, 137 aa, Homo sapiens; identical to SEQ ID NO: 2258

SEQ ID NO: 2261 - DNA, 2165 bp, Homo sapiens
acgtgaccggcgcctctgtcattctactgcggccgccctggcttccttctacctgtgcggccctcaacgtctccttggtgcgggacccgcttcactttcggctcccggagtctccctccactgctcagacctctggacctgacaggagacgcctacttggctctgacgcggcgccccagcccggctgtgtccccggcgccccggaccaccctccctgccggctttgggtgcgttgtggggtcccgaggattcgcgagatttgttgaaagacattcaagattacgaagtttagatgaccaaaatggatatccgaggtgctgtggatgctgctgtccccaccaatattattgctgccaaggctgcagaagttcgtgcaaacaaagtcaactggcaatcctatcttcagggacagatgatttctgctgaagattgtgagtttattcagaggtttgaaatgaaacgaagccctgaagagaagcaagagatgcttcaaactgaaggcagccagtgtgctaaaacatttataaatctgatgactcatatctgcaaagaacagaccgttcagtatatactaactatggtggatgatatgctgcaggaaaatcatcagcgtgttagcattttctttgactatgcaagatgtagcaagaacactgcgtggccctactttctgccaatgttgaatcgccaggatcccttcactgttcatatggcagcaagaattattgccaagttagcagcttggggaaaagaactgatggaaggcagtgacttaaattactatttcaattggataaaaactcagctgagttcacagaaactgcgtggtagcggtgttgctgttgaaacaggaacagtctcttcaagtgatagttcgcagtatgtgcagtgcgtggccgggtgtttgcagctgatgctccgggtcaatgagtaccgctttgcttgggtggaagcagatggggtaaattgcataatgggagtgttgagtaacaagtgtggctttcagctccagtatcaaatgattttttcaatatggctcctggcattcagtcctcaaatgtgtgaacacctgcggcgctataatatcattccagttctgtctgatatccttcaggagtctgtcaaagagaaagtaacaagaatcattcttgcagcatttcgtaactttttagaaaaatcaactgaaagagaaactcgccaagaatatgccctggctatgattcagtgcaaagttctgaaacagttggagaacttggaacagcagaagtacgatgatgaagatatcagcgaagatatcaaatttcttttggaaaaacttggagagagtgtccaggaccttagttcatttgatgaatacagttcagaacttaaatctggaaggttggaatggagtcctgtgcacaaatctgagaaattttggagagagaatgctgtgaggttaaatgagaagaattatgaactcttgaaaatcttgacaaaacttttggaagtgtcagatgatccccaagtcttagctgttgctgctcacgatgttggagaatatgtgcggcattatccacgaggcaaacgggtcatcgagcagctcggtgggaagcagctggtcatgaaccacatgcatcatgaagaccagcaggtccgctataatgctctgctggccgtgcagaagctcatggtgcacaactgggaataccttggcaagcagctccagtccgagcagccccagaccgctgccgcccgaagctaagcctgcctctggccttcccctccgcctcaatgcagaaccagtagtgggagcactgtgtttagagttaagagtgaacactgtttgattttacttggaatttcctctgttatatagcttttcccaatgctaatttccaaacaacaacaacaaaataacatgtttgcctgttaagttgtataaaagtaggtgattctgtatttaaagaaaatattactgttacatatactgcttgcaatttctgtatttattgttctctggaaataaatatagttattaaaggattctcactccaaacatggcctctctctttacttggactttgaacaaaagtcaactgttgtctcttttcaaaccaaattgggagaattgttgcaaagtagtgaatggcaaataaatgttttaaaatctaaaaaaaaaaaaa

SEQ ID NO: 2262 - protein, 483 aa, Homo sapiens
MTKMDIRGAVDAAVPTNIIAAKAAEVRANKVNWQSYLQGQMISAEDCEFIQRFEMKRSPEEKQEMLQTEGSQCAKTFINLMTHICKEQTVQYILTMVDDMLQENHQRVSIFFDYARCSKNTAWPYFLPMLNRQDPFTVHMAARIIAKLAAWGKELMEGSDLNYYFNWIKTQLSSQKLRGSGVAVETGTVSSSDSSQYVQCVAGCLQLMLRVNEYRFAWVEADGVNCIMGVLSNKCGFQLQYQMIFSIWLLAFSPQMCEHLRRYNIIPVLSDILQESVKEKVTRIILAAFRNFLEKSTERETRQEYALAMIQCKVLKQLENLEQQKYDDEDISEDIKFLLEKLGESVQDLSSFDEYSSELKSGRLEWSPVHKSEKFWRENAVRLNEKNYELLKILTKLLEVSDDPQVLAVAAHDVGEYVRHYPRGKRVIEQLGGKQLVMNHMHHEDQQVRYNALLAVQKLMVHNWEYLGKQLQSEQPQTAAARS

SEQ ID NO: 2263 - DNA, 2111 bp, Homo sapiens
acgtgaccggcgcctctgtcattctactgcggccgccctggcttccttctacctgtgcggccctcaacgtctccttggtgcgggacccgcttcactttcggctcccggagtctccctccactgctcagacctctggacctgacaggagacgcctacttggctctgacgcggcgccccagcccggctgtgtccccggcgccccggaccaccctccctgccggctttgggtgcgttgtggggtcccgaggattcgcgagatttgttgaaagacattcaagattacgaagtttagatgaccaaaatggatatccgaggtgctgtggatgctgctgtccccaccaatattattgctgccaaggctgcagaagttcgtgcaaacaaagtcaactggcaatcctatcttcagggacagatgatttctgctgaagattgtgagtttattcagaggtttgaaatgaaacgaagccctgaagagaagcaagagatgcttcaaactgaaggcagccagtgtgctaaaacatttataaatctgatgactcatatctgcaaagaacagaccgttcagtatatactaactatggtggatgatatgctgcaggaaaatcatcagcgtgttagcattttctttgactatgcaagatgtagcaagaacactgcgtggccctactttctgccaatgttgaatcgccaggatcccttcactgttcatatggcagcaagaattattgccaagttagcagcttggggaaaagaactgatggaaggcagtgacttaaattactatttcaattggataaaaactcagctgagttcacagagttcgcagtatgtgcagtgcgtggccgggtgtttgcagctgatgctccgggtcaatgagtaccgctttgcttgggtggaagcagatggggtaaattgcataatgggagtgttgagtaacaagtgtggctttcagctccagtatcaaatgattttttcaatatggctcctggcattcagtcctcaaatgtgtgaacacctgcggcgctataatatcattccagttctgtctgatatccttcaggagtctgtcaaagagaaagtaacaagaatcattcttgcagcatttcgtaactttttagaaaaatcaactgaaagagaaactcgccaagaatatgccctggctatgattcagtgcaaagttctgaaacagttggagaacttggaacagcagaagtacgatgatgaagatatcagcgaagatatcaaatttcttttggaaaaacttggagagagtgtccaggaccttagttcatttgatgaatacagttcagaacttaaatctggaaggttggaatggagtcctgtgcacaaatctgagaaattttggagagagaatgctgtgaggttaaatgagaagaattatgaactcttgaaaatcttgacaaaacttttggaagtgtcagatgatccccaagtcttagctgttgctgctcacgatgttggagaatatgtgcggcattatccacgaggcaaacgggtcatcgagcagctcggtgggaagcagctggtcatgaaccacatgcatcatgaagaccagcaggtccgctataatgctctgctggccgtgcagaagctcatggtgcacaactgggaataccttggcaagcagctccagtccgagcagccccagaccgctgccgcccgaagctaagcctgcctctggccttcccctccgcctcaatgcagaaccagtagtgggagcactgtgtttagagttaagagtgaacactgtttgattttacttggaatttcctctgttatatagcttttcccaatgctaatttccaaacaacaacaacaaaataacatgtttgcctgttaagttgtataaaagtaggtgattctgtatttaaagaaaatattactgttacatatactgcttgcaatttctgtatttattgttctctggaaataaatatagttattaaaggattctcactccaaacatggcctctctctttacttggactttgaacaaaagtcaactgttgtctcttttcaaaccaaattgggagaattgttgcaaagtagtgaatggcaaataaatgttttaaaatctaaaaaaaaaaaaa

SEQ ID NO: 2264 - protein, 465 aa, Homo sapiens
MTKMDIRGAVDAAVPTNIIAAKAAEVRANKVNWQSYLQGQMISAEDCEFIQRFEMKRSPEEKQEMLQTEGSQCAKTFINLMTHICKEQTVQYILTMVDDMLQENHQRVSIFFDYARCSKNTAWPYFLPMLNRQDPFTVHMAARIIAKLAAWGKELMEGSDLNYYFNWIKTQLSSQSSQYVQCVAGCLQLMLRVNEYRFAWVEADGVNCIMGVLSNKCGFQLQYQMIFSIWLLAFSPQMCEHLRRYNIIPVLSDILQESVKEKVTRIILAAFRNFLEKSTERETRQEYALAMIQCKVLKQLENLEQQKYDDEDISEDIKFLLEKLGESVQDLSSFDEYSSELKSGRLEWSPVHKSEKFWRENAVRLNEKNYELLKILTKLLEVSDDPQVLAVAAHDVGEYVRHYPRGKRVIEQLGGKQLVMNHMHHEDQQVRYNALLAVQKLMVHNWEYLGKQLQSEQPQTAAARS

SEQ ID NO: 2265 - DNA, 2025 bp, Homo sapiens
aggcgactcttgcagtttctccagcttgcctggtgcgtgctggtgtctcgccgcttggtcctctcctgttcttcggcccccggttgccagattgcttttcttccaggcctcaaccagatttgttgaaagacattcaagattacgaagtttagatgaccaaaatggatatccgaggtgctgtggatgctgctgtccccaccaatattattgctgccaaggctgcagaagttcgtgcaaacaaagtcaactggcaatcctatcttcagggacagatgatttctgctgaagattgtgagtttattcagaggtttgaaatgaaacgaagccctgaagagaagcaagagatgcttcaaactgaaggcagccagtgtgctaaaacatttataaatctgatgactcatatctgcaaagaacagaccgttcagtatatactaactatggtggatgatatgctgcaggaaaatcatcagcgtgttagcattttctttgactatgcaagatgtagcaagaacactgcgtggccctactttctgccaatgttgaatcgccaggatcccttcactgttcatatggcagcaagaattattgccaagttagcagcttggggaaaagaactgatggaaggcagtgacttaaattactatttcaattggataaaaactcagctgagttcacagaaactgcgtggtagcggtgttgctgttgaaacaggaacagtctcttcaagtgatagttcgcagtatgtgcagtgcgtggccgggtgtttgcagctgatgctccgggtcaatgagtaccgctttgcttgggtggaagcagatggggtaaattgcataatgggagtgttgagtaacaagtgtggctttcagctccagtatcaaatgattttttcaatatggctcctggcattcagtcctcaaatgtgtgaacacctgcggcgctataatatcattccagttctgtctgatatccttcaggagtctgtcaaagagaaagtaacaagaatcattcttgcagcatttcgtaactttttagaaaaatcaactgaaagagaaactcgccaagaatatgccctggctatgattcagtgcaaagttctgaaacagttggagaacttggaacagcagaagtacgatgatgaagatatcagcgaagatatcaaatttcttttggaaaaacttggagagagtgtccaggaccttagttcatttgatgaatacagttcagaacttaaatctggaaggttggaatggagtcctgtgcacaaatctgagaaattttggagagagaatgctgtgaggttaaatgagaagaattatgaactcttgaaaatcttgacaaaacttttggaagtgtcagatgatccccaagtcttagctgttgctgctcacgatgttggagaatatgtgcggcattatccacgaggcaaacgggtcatcgagcagctcggtgggaagcagctggtcatgaaccacatgcatcatgaagaccagcaggtccgctataatgctctgctggccgtgcagaagctcatggtgcacaactgggaataccttggcaagcagctccagtccgagcagccccagaccgctgccgcccgaagctaagcctgcctctggccttcccctccgcctcaatgcagaaccagtagtgggagcactgtgtttagagttaagagtgaacactgtttgattttacttggaatttcctctgttatatagcttttcccaatgctaatttccaaacaacaacaacaaaataacatgtttgcctgttaagttgtataaaagtaggtgattctgtatttaaagaaaatattactgttacatatactgcttgcaatttctgtatttattgttctctggaaataaatatagttattaaaggattctcactccaaacatggcctctctctttacttggactttgaacaaaagtcaactgttgtctcttttcaaaccaaattgggagaattgttgcaaagtagtgaatggcaaataaatgttttaaaatctaaaaaaaaaaaaa

SEQ ID NO: 2266 - protein, 483 aa, Homo sapiens; identical to SEQ ID NO: 2262

SEQ ID NO: 2267 - DNA, 1596 bp, Homo sapiens
ccgcgggacgcatgcgcacggcggacggaggcgagccggccggggcttcctccccggccggcagggtggacggtgggctccagatgggatcagagcggatggagatgcggaagcggcagatgcccgccgcccaggacacaccaggcgccgccccaggccagcccggagcggggagtcgcgggtccaacgcatgctgcttctgctggtgctgctgttgtagctgctcgtgtctcactgttagaaaccaggaagatcagaggcccacaatagcttcccacgaactcagagcagatcttccaacctgggaagaaagccctgctcctactctggaagaagtcaacgcctgggctcagtcatttgacaaattaatggtcactccagcaggaaggaatgcattccgtgaattcctccgaacagaattcagtgaggaaaatatgctcttctggatggcctgtgaggaactgaaaaaggaagctaataaaaacattattgaagagaaagcaaggataatctatgaagactacatttctatactttctcctaaggaggtgagcttagactcccgggtgagagaagtgatcaacagaaacatggtggagccatcccaacacatattcgatgatgctcaacttcagatttacaccctgatgcacagagactcatatcctcgattcatgaactctgctgtctataaggacttgcttcagtccttatcggagaaatctattgaagcataggatttttcaaatatatttattattaataaaataataaaagaattcatgggctacaactagcacagggaatttagaggttgtagcatcttctgctggagtaatactcaggctattctaataacagatgattccttcaacagactgctatatattcaccatgtaaactgcagccacctttagtgatacttttaaaaaaaaaaataaagggatatggctgttgtagaaagatagcgtatttgcatttacaataacagtagcatgttgtcagtggccaaggctacacagaaggctccctgctgcccggagcaggtacatccacagagcaaagggaaccacttttattttgcatgagtttggtaactgattactctcccctcaaagaaaagacattcaggtgtttctcaacgacatcttctgtccagcaagctcggtttgaatacgtcacttaccagtgccattgcaggacccaaattcacagttcataaaagatgtgaccactacatgtaaaaatagcattctacttgatcttacagtatgtatgtatgtatgtatggagacatatgtgtgcgtgtggatgtctacatggttaatggaaagcactgtgctctgaagtggatcagtctcaagtgtctggtaacagcagcaatgcttagaaaattcttttgttgaaaagagttactgttattatcagaatttgccaacctaaagaatgaatttttaaattcataacttggtcatgttcacaacaaaactgtcaaataagcatatttccatttttattactgaaagaaatatgggcattttcattctttaaagaaataaagcacaagaattttatctcaaaaaaaaaaaaaaaaaa

SEQ ID NO: 2268 - protein, 241 aa, Homo sapiens
MRTADGGEPAGASSPAGRVDGGLQMGSERMEMRKRQMPAAQDTPGAAPGQPGAGSRGSNACCFCWCCCCSCSCLTVRNQEDQRPTIASHELRADLPTWEESPAPTLEEVNAWAQSFDKLMVTPAGRNAFREFLRTEFSEENMLFWMACEELKKEANKNIIEEKARIIYEDYISILSPKEVSLDSRVREVINRNMVEPSQHIFDDAQLQIYTLMHRDSYPRFMNSAVYKDLLQSLSEKSIEA

SEQ ID NO: 2269 - DNA, 2102 bp, Homo sapiens
cattaaccaaacaaagagaagcagagtggatcctgtgctaatattgggaaaaccaggcaacaggactcatttggggcctttattgtgaaaacatgccccagctttcccaagataaccaagagtgcctccagaaacatttctccaggccgtctatatggacacagtttctgcccctgttcagggctcagagatataatacagacattcaccaaatcacagaaaatgaaggagacctcagggctgttcctgatatcaagtccttcccgcctgcacagctcccagactcgcccgccgccccgaagctgttcggcctcctttctagcccgctttccagcctcgcaaggttcttctctcaccttctccggcgaccccctcccgaggctccccggaggcgcctggacttctcccccctgcttcccgccctgccggccgcccggctctcgagggggcacgaggagctgccgggccgcctctcgctcctgctcggggcggcgctggcactgcccggccgaccctcggggggtcgtccgctgaggcccccccatccggtagccaagcccagggaagaagacgccaccgctgggcagagctcgcctatgccgcagatgggatcagagcggatggagatgcggaagcggcagatgcccgccgcccaggacacaccaggcgccgccccaggccagcccggagcggggagtcgcgggtccaacgcatgctgcttctgctggtgctgctgttgtagctgctcgtgtctcactgttagaaaccaggaagatcagaggcccacaatagcttcccacgaactcagagcagatcttccaacctgggaagaaagccctgctcctactctggaagaagtcaacgcctgggctcagtcatttgacaaattaatggtcactccagcaggaaggaatgcattccgtgaattcctccgaacagaattcagtgaggaaaatatgctcttctggatggcctgtgaggaactgaaaaaggaagctaataaaaacattattgaagagaaagcaaggataatctatgaagactacatttctatactttctcctaaggaggtgagcttagactcccgggtgagagaagtgatcaacagaaacatggtggagccatcccaacacatattcgatgatgctcaacttcagatttacaccctgatgcacagagactcatatcctcgattcatgaactctgctgtctataaggacttgcttcagtccttatcggagaaatctattgaagcataggatttttcaaatatatttattattaataaaataataaaagaattcatgggctacaactagcacagggaatttagaggttgtagcatcttctgctggagtaatactcaggctattctaataacagatgattccttcaacagactgctatatattcaccatgtaaactgcagccacctttagtgatacttttaaaaaaaaaaataaagggatatggctgttgtagaaagatagcgtatttgcatttacaataacagtagcatgttgtcagtggccaaggctacacagaaggctccctgctgcccggagcaggtacatccacagagcaaagggaaccacttttattttgcatgagtttggtaactgattactctcccctcaaagaaaagacattcaggtgtttctcaacgacatcttctgtccagcaagctcggtttgaatacgtcacttaccagtgccattgcaggacccaaattcacagttcataaaagatgtgaccactacatgtaaaaatagcattctacttgatcttacagtatgtatgtatgtatgtatggagacatatgtgtgcgtgtggatgtctacatggttaatggaaagcactgtgctctgaagtggatcagtctcaagtgtctggtaacagcagcaatgcttagaaaattcttttgttgaaaagagttactgttattatcagaatttgccaacctaaagaatgaatttttaaattcataacttggtcatgttcacaacaaaactgtcaaataagcatatttccatttttattactgaaagaaatatgggcattttcattctttaaagaaataaagcacaagaattttatctcaa

SEQ ID NO: 2270 - protein, 388 aa, Homo sapiens
MPQLSQDNQECLQKHFSRPSIWTQFLPLFRAQRYNTDIHQITENEGDLRAVPDIKSFPPAQLPDSPAAPKLFGLLSSPLSSLARFFSHLLRRPPPEAPRRRLDFSPLLPALPAARLSRGHEELPGRLSLLLGAALALPGRPSGGRPLRPPHPVAKPREEDATAGQSSPMPQMGSERMEMRKRQMPAAQDTPGAAPGQPGAGSRGSNACCFCWCCCCSCSCLTVRNQEDQRPTIASHELRADLPTWEESPAPTLEEVNAWAQSFDKLMVTPAGRNAFREFLRTEFSEENMLFWMACEELKKEANKNIIEEKARIIYEDYISILSPKEVSLDSRVREVINRNMVEPSQHIFDDAQLQIYTLMHRDSYPRFMNSAVYKDLLQSLSEKSIEA

SEQ ID NO: 2271 - DNA, 2784 bp, Homo sapiens
agccggaagccacgcctgcccactagcccgacgcccgcctggcgggaacatgggctcgcccctcaccagcgatctgcagtcagttggtagcgcctgcacgtcgcgcgcggtgttcgattgtcgctgcctggggaggaggagccggagccgccgccgccgccgccgccgccgcgggcttcgttcgtaaggaagggggcctaggcccgggcctgcggtggtgggggttgctgcgcgccgggggtcgctcctgctgtgtcttccgctccagcttcgcccacttccccttgccagcggggtgggcgcggagaagacctgccggagccatggaggacgaagtggtccgctttgccaagaagatggacaagatggtgcagaagaagaacgcggctggagcattggatttgctaaaggagcttaagaatattcctatgaccctggaattactgcagtccacaagaatcggaatgtcagttaatgctattcgcaagcagagtacagatgaggaagttacatctttggcaaagtctctcatcaaatcctggaaaaaattattagatgggccatcaactgagaaagaccttgacgaaaagaagaaagaacctgcaattacatcgcagaacagccctgaggcaagagaagaaagtacttccagcggcaatgtaagcaacagaaaggatgagacaaatgctcgagatacttatgtttcatcctttcctcgggcaccaagcacttctgattctgtgcggttgaagtgtagggagatgcttgctgcagctcttcgaacaggggatgactacattgcaattggagctgatgaggaagaattaggatctcaaattgaagaagctatatatcaagaaataaggaatacagacatgaaatacaaaaatagagtacgaagtaggatatcaaatcttaaagatgcaaaaaatccaaatttaaggaaaaatgtcctctgtgggaatattcctcctgacttatttgctagaatgacagcagaggaaatggctagtgatgagctgaaagagatgcggaaaaacttgaccaaagaagccatcagagagcatcagatggccaagactggtgggacccagactgacttgttcacatgtggcaaatgtaaaaagaagaattgcacttacacacaggtacaaacccgtagtgctgatgaaccaatgacaacatttgttgtctgtaatgaatgtggaaatcgatggaagttctgttgagttggaagaattggcaaaatatctggaccattaagaaaacggattttgtaactagctttaaactaggccaagcaactagttttcctgcaaatcaaatttttaaagcaacttgggttagactttgtttttgacctaacatcccttccttaaatgccttctgtagtttcagatcagtagggagaccatataataattttatggtacctgtttcaaaacatattttttctgtttttataagtaagttgatattaattaaactcttggcaatatttcttctttcttaaaggaaaatataccttaactttttttcttttacactgtgaaacatacacagtagaaattctgttactctctgttattaatacataaatgaaaatacatttttttccatattggcatgtagctacaaatattaaaggaggagaaaaggtaatataattttaggtttaccaaatatggtgtgtattcaaataatacttgaccagcttatctaaaatgtacataattttgaggtagcttatgaatttgattttaattattatgttcacaagcttggaatattagatattattttgcatctgtaactaaccgtgatcatcatttcttgtaatttcttgtacatgtatattacttgttcttaatagatttttggaaacaagactttattgagatcagtttggttttcctgttaatttacctgtttgactttataatgtgttttagttttgcagaagaacactgttgtagtttagaaggcttttcataaatcccctcataggcaaagatgaaaacttcccactatttttttcccctcttaggaagacatactggaaagaaaatgtttagcatcttagtgtagtatagctattgtaaacagttcatgactagattttgattcggaaatctatactgaccaaggattaatcttaaggattgtataattcattaaagctgtggtctttccatgtggagactgatagaaaataattttgtcccaagtcttatttgctgactttttctgtcatgagtgagattgttgaacaaactgaatatatgggctatagcaagtagctttacagtacagatcttacaattaagttttgcttttgttaaagtgtgtaccattttttctgtttggagtaagacaaaaattgttttgacataggttccctagggtacacttgctctagcatactttaaaggccactgttgcaaagtctacattttatgctgaatctgcattctgtcaggcacccgtagaaagacctcagtacatgctttgcactctcctttgctccctttttccaatttcttattgcatatcattttgttgtaatacagaaagcagcatttttaaatgtccgtgttaagaattggcccactggtaccaactcacctctattttgtcagttcatagttgaagattttgttttatttcaaaaacaaagtacatttttgaaataatgtttcagaataaaataatctcacttttaagtgatccattttaaaatttgtaattcaataaagttttttttgttgttaaacataaaaaaaa

SEQ ID NO: 2272 - protein, 301 aa, Homo sapiens
MEDEVVRFAKKMDKMVQKKNAAGALDLLKELKNIPMTLELLQSTRIGMSVNAIRKQSTDEEVTSLAKSLIKSWKKLLDGPSTEKDLDEKKKEPAITSQNSPEAREESTSSGNVSNRKDETNARDTYVSSFPRAPSTSDSVRLKCREMLAAALRTGDDYIAIGADEEELGSQIEEAIYQEIRNTDMKYKNRVRSRISNLKDAKNPNLRKNVLCGNIPPDLFARMTAEEMASDELKEMRKNLTKEAIREHQMAKTGGTQTDLFTCGKCKKKNCTYTQVQTRSADEPMTTFVVCNECGNRWKFC

SEQ ID NO: 2273 - DNA, 2721 bp, Homo sapiens
agccggaagccacgcctgcccactagcccgacgcccgcctggcgggaacatgggctcgcccctcaccagcgatctgcagtcagttggtagcgcctgcacgtcgcgcgcggtgttcgattgtcgctgcctggggaggaggagccggagccgccgccgccgccgccgccgccgcgggcttcgttcgtaaggaagggggcctaggcccgggcctgcggtggtgggggttgctgcgcgccgggggtcgctcctgctgtgtcttccgctccagcttcgcccacttccccttgccagcggggtgggcgcggagaagacctgccggagccatggaggacgaagtggtccgctttgccaagaagatggacaagatggtgcagaagaagaacgcgtccacaagaatcggaatgtcagttaatgctattcgcaagcagagtacagatgaggaagttacatctttggcaaagtctctcatcaaatcctggaaaaaattattagatgggccatcaactgagaaagaccttgacgaaaagaagaaagaacctgcaattacatcgcagaacagccctgaggcaagagaagaaagtacttccagcggcaatgtaagcaacagaaaggatgagacaaatgctcgagatacttatgtttcatcctttcctcgggcaccaagcacttctgattctgtgcggttgaagtgtagggagatgcttgctgcagctcttcgaacaggggatgactacattgcaattggagctgatgaggaagaattaggatctcaaattgaagaagctatatatcaagaaataaggaatacagacatgaaatacaaaaatagagtacgaagtaggatatcaaatcttaaagatgcaaaaaatccaaatttaaggaaaaatgtcctctgtgggaatattcctcctgacttatttgctagaatgacagcagaggaaatggctagtgatgagctgaaagagatgcggaaaaacttgaccaaagaagccatcagagagcatcagatggccaagactggtgggacccagactgacttgttcacatgtggcaaatgtaaaaagaagaattgcacttacacacaggtacaaacccgtagtgctgatgaaccaatgacaacatttgttgtctgtaatgaatgtggaaatcgatggaagttctgttgagttggaagaattggcaaaatatctggaccattaagaaaacggattttgtaactagctttaaactaggccaagcaactagttttcctgcaaatcaaatttttaaagcaacttgggttagactttgtttttgacctaacatcccttccttaaatgccttctgtagtttcagatcagtagggagaccatataataattttatggtacctgtttcaaaacatattttttctgtttttataagtaagttgatattaattaaactcttggcaatatttcttctttcttaaaggaaaatataccttaactttttttcttttacactgtgaaacatacacagtagaaattctgttactctctgttattaatacataaatgaaaatacatttttttccatattggcatgtagctacaaatattaaaggaggagaaaaggtaatataattttaggtttaccaaatatggtgtgtattcaaataatacttgaccagcttatctaaaatgtacataattttgaggtagcttatgaatttgattttaattattatgttcacaagcttggaatattagatattattttgcatctgtaactaaccgtgatcatcatttcttgtaatttcttgtacatgtatattacttgttcttaatagatttttggaaacaagactttattgagatcagtttggttttcctgttaatttacctgtttgactttataatgtgttttagttttgcagaagaacactgttgtagtttagaaggcttttcataaatcccctcataggcaaagatgaaaacttcccactatttttttcccctcttaggaagacatactggaaagaaaatgtttagcatcttagtgtagtatagctattgtaaacagttcatgactagattttgattcggaaatctatactgaccaaggattaatcttaaggattgtataattcattaaagctgtggtctttccatgtggagactgatagaaaataattttgtcccaagtcttatttgctgactttttctgtcatgagtgagattgttgaacaaactgaatatatgggctatagcaagtagctttacagtacagatcttacaattaagttttgcttttgttaaagtgtgtaccattttttctgtttggagtaagacaaaaattgttttgacataggttccctagggtacacttgctctagcatactttaaaggccactgttgcaaagtctacattttatgctgaatctgcattctgtcaggcacccgtagaaagacctcagtacatgctttgcactctcctttgctccctttttccaatttcttattgcatatcattttgttgtaatacagaaagcagcatttttaaatgtccgtgttaagaattggcccactggtaccaactcacctctattttgtcagttcatagttgaagattttgttttatttcaaaaacaaagtacatttttgaaataatgtttcagaataaaataatctcacttttaagtgatccattttaaaatttgtaattcaataaagttttttttgttgttaaacataaaaaaaa

SEQ ID NO: 2274 - protein, 280 aa, Homo sapiens
MEDEVVRFAKKMDKMVQKKNASTRIGMSVNAIRKQSTDEEVTSLAKSLIKSWKKLLDGPSTEKDLDEKKKEPAITSQNSPEAREESTSSGNVSNRKDETNARDTYVSSFPRAPSTSDSVRLKCREMLAAALRTGDDYIAIGADEEELGSQIEEAIYQEIRNTDMKYKNRVRSRISNLKDAKNPNLRKNVLCGNIPPDLFARMTAEEMASDELKEMRKNLTKEAIREHQMAKTGGTQTDLFTCGKCKKKNCTYTQVQTRSADEPMTTFVVCNECGNRWKFC

SEQ ID NO: 2275 - DNA, 2578 bp, Homo sapiens
cggcgggcgaggggcagggcagggcggaccctggacgcgcgggcgcgcgcggaaggtagcgcggggccgcgttggcgcgcacgcgcctgagcgtgcgcccggtggggccggccgggactcgccgctcgcacgcccttgggccgcggccgggcgcccgctcttccttccgcttgcgctgtgagctgaggcggtgtatgtgcggcaataacatgtcaaccccgctgcccgccatcgtgcccgccgcccggaaggccaccgctgcggtgattttcctgcatggattgggagatactgggcacggatgggcagaagcctttgcaggtatcagaagttcacatatcaaatatatctgcccgcatgcgcctgttaggcctgttacattaaatatgaacgtggctatgccttcatggtttgatattattgggctttcaccagattcacaggaggatgaatctgggattaaacaggcagcagaaaatataaaagctttgattgatcaagaagtgaagaatggcattccttctaacagaattattttgggagggttttctcagggaggagctttatctttatatactgcccttaccacacagcagaaactggcaggtgtcactgcactcagttgctggcttccacttcgggcttcctttccacagggtcctatcggtggtgctaatagagatatttctattctccagtgccacggggattgtgaccctttggttcccctgatgtttggttctcttacggtggaaaaactaaaaacattggtgaatccagccaatgtgacctttaaaacctatgaaggtatgatgcacagttcgtgtcaacaggaaatgatggatgtcaagcaattcattgataaactcctacctccaattgattgacgtcactaagaggccttgtgtagaagtacaccagcatcattgtagtagagtgtaaaccttttcccatgcccagtcttcaaatttctaatgttttgcagtgttaaaatgttttgcaaatacatgccaataacacagatcaaataatatctcctcatgagaaatttatgatcttttaagtttctatacatgtattcttataagacgacccaggatctactatattagaatagatgaagcaggtagcttcttttttctcaaatgtaattcagcaaaataatacagtactgccaccagattttttattacatcatttgaaaattagcagtatgcttaatgaaaatttgttcaggtataaatgagcagttaagatataaacaatttatgcatgctgtgacttagtctatggatttattccaaaattgcttagtcaccatgcagtgtctgtatttttatatatgtgttcatatatacataatgattataatacataataagaatgaggtggtattacattattcctaataatagggataatgctgtttattgtcaagaaaaagtaaaatcgttctcttcaattaatggcccttttattttgggaccaggcttttattttccctgatattatttctatttaatactcttttctctcaagaaaaaaaaaaaagtttgttttttctttattgtccttcatagcaggccaagtattgcctctctgcaatagacagctactgtcaatacatgctgtaatttgacattctgggtcacagatataaggtatttaaaatctatttatgctttatagagaaaccagacattaaaacttcatgcactacttatttcgaattactgtaccttatccaaatttacacctagctattaggatcttcaacccaggtaacaggaataattctgtggtttcatttttctgtaaacaactgaaagaataattagatcatattctagtatgttctgaaatatctttaagactgatcttaaaaactaacttctaagatgatttcatcttctcatagtatagagtttactttgtacacgtttgaaaccaactactgtagaagatgaggaatctattgtaattttttgctttattttcatctgccagtggacttatttgaaattttcactttagtcaaattattttttgtattagtttttgatgcagacataaaaatagcaatcattttaaattgtcaaaatttccagattactggtaaaaattatttgaaaacaaacttatgggtaataaaggctagtcagaaccctataccataaagtgtagttaccatacagattaatatgtagcaaaaatgtatgcttgatatttctcaactgtgttaatttttctgctgtattccagctgaccaaaacaatattaagaatgcatctttataaatgggtgctaattgataatggaaataatttagtaatggactatacaggatgttaataatgaagccatatgtttatgtctggatttaaaaattttaaacaatcatttactatgtcatttttctttaccttgaagaacataaactgttatttcacttctacaaatcagcaagatattatttatggcaagaaatattccattgaaatattgtgctgtaacatgggaaagtgtaaatgtttttcatggtttctatcaatgtgaaataaaatttaattctgaaaaa

SEQ ID NO: 2276 - protein, 230 aa, Homo sapiens
MCGNNMSTPLPAIVPAARKATAAVIFLHGLGDTGHGWAEAFAGIRSSHIKYICPHAPVRPVTLNMNVAMPSWFDIIGLSPDSQEDESGIKQAAENIKALIDQEVKNGIPSNRIILGGFSQGGALSLYTALTTQQKLAGVTALSCWLPLRASFPQGPIGGANRDISILQCHGDCDPLVPLMFGSLTVEKLKTLVNPANVTFKTYEGMMHSSCQQEMMDVKQFIDKLLPPID

SEQ ID NO: 2277 - DNA, 1155 bp, Homo sapiens
cccgagaccacgtggcctccgagcagctcagggcgcccttgaaagttcttggatctgcgggttatggccggtcccttgcagggcggtggggcccgggccctggacctactccggggcctgccgcgtgtgagcctggccaacttaaagccgaatcccggctccaagaaaccggagagaagaccaagaggtcggagaagaggtagaaaatgtggcagaggccataaaggagaaaggcaaagaggaacccggccccgcttgggctttgagggaggccagactccattttacatccgaatcccaaaatacgggtttaacgaaggacatagtttcagacgccagtataagcctttgagtctcaatagactgcagtatcttattgatttgggtcgtgttgatcctagtcaacctattgacttaacccagcttgtcaatgggagaggtgtgaccatccagccacttaaaagggattatggtgtccagctggttgaggagggtgctgacacctttacggcaaaagttaatattgaagtacagttggcttcagaactagctattgctgccattgaaaaaaatggtggtgttgttactacagccttctatgatccaagaagtctggacattgtatgcaaacctgttccattctttcttcgtggacaacccattccaaaaagaatgcttccaccagaagaactggtaccatattacactgatgcaaagaaccgtgggtacctggcggatcctgccaaatttcctgaagcacgacttgaactcgccaggaagtatggttatatcttacctgatatcactaaagatgaactcttcaaaatgctctgtactaggaaggatccaaggcagattttctttggtcttgctccaggatgggtggtgaatatggccgataagaaaatcctaaaacctacagatgaaaatctccttaagtattatacctcatgaattcccgtccaaggaagcagagttgttaaagagtactggaataggggctgaaggatctatattcccttattgcattttccttatgtataattttccagatggtgatgttacttttcagtgtactcatatgtctcattttcatctaaaattaaatggcaggaaacaaggactgcatagagaaaaaaaaaaaaaaaaaaaaaa

SEQ ID NO: 2278 - protein, 296 aa, Homo sapiens [sequence omitted]

SEQ ID NO: 2279 - DNA, 501 bp, Homo sapiens
atgccacgtggaagccgaagccacacctcctacagggcccctcccaccagccaggcacctcagatgagagctacacccaggctagcaccagcagctcagccgccagcagtggcacccccatctgcagttggctctcctgctcctgcaccccggcagccaagtctgatggcccaaatggcaaccactgcagctggcgtggctgtaggctctgctgtgggtcacacactgggttatgccctcactgggagcttcagtggaggaagtaatggtgagcctgcaaaacttgacatcacttaccagcagcatcagggaacctggccagcacagcagcagcagccttgtttccatgagatcaaacagtttttggagtgtgcccagaaccagggtgacaccaacaagctctgtggggctttcaagaggttctcaaacagtgcagacttgcaaacagataggcctaatcaagaagttcaaattggagaaatggaaaatcagctctcctaa

SEQ ID NO: 2280 - protein, 166 aa, Homo sapiens
MPRGSRSHTSYRAPPTSQAPQMRATPRLAPAAQPPAVAPPSAVGSPAPAPRQPSLMAQMATTAAGVAVGSAVGHTLGYALTGSFSGGSNGEPAKLDITYQQHQGTWPAQQQQPCFHEIKQFLECAQNQGDTNKLCGAFKRFSNSADLQTDRPNQEVQIGEMENQLS

SEQ ID NO: 2281 - DNA, 2317 bp, Homo sapiens
aaatctgtccgcccccttggccactgatcccccgaagagcttctgtcgccgctctaggaatagagacattgaagtttgggacaagatatttatctaacttctgtgtcaaaattagcgacctgctatggcaatgaagaaagaaactgaatttgtcattttcacctgaagaaaaatgatagacaaaaatcaaacctgtggtgtaggacaggattctgtgccctatatgatttgtctgattcacatactcgaagaatggtttggtgtggagcagttggaggactatttgaattttgcaaactatctcttgtgggtttttacaccactaatacttttaatacttccttactttactatctttcttctctaccttactattattttcttacacatttataagagaaagaatgtattgaaagaagcctactctcataatttatgggatggtgcaaggaaaacagtggcaactctgtgggatggacatgcagccgtttggcatggttatgaagttcatggaatggaaaaaataccagaagatggaccagcacttataattttttatcatggagctattcctatagatttttactatttcatggctaaaatatttatacacaaaggcagaacttgccgagtagtagctgatcactttgtctttaaaattccagggtttagtttattactggatgtgttttgtgctctacatggaccaagagaaaaatgtgttgaaattctgaggagtggccacttgttagctatctcaccaggtggagttcgagaagccctaattagtgatgaaacttataacatcgtatggggtcatcgcagaggctttgctcaggttgcaattgatgcaaaagtgacgaagaatgctgttcaagctttgattgataagcaccaaagaataccaggaaacattatgagtgctttgttagaacgttttcattgataacaaagggtcaactagaagatgatttagtacatttatattaaatgtttgtatctaaggtactgtcttctgaattttgtaggtcctataattagtattttttaaaaaaatcatgttaataagcatctttcacagaattcgtttctttaaaatagtcaattttgtttttgcaattgtgtcaaatactaacaaattacacacctagtaattcagaaaaagatgtcttatttgtaaattcctaacaatttatgctaaacatatagattcttaagtttattaataacagcagtttaggttaaacaaacattcctggataatgcgttaaatttctgtatctgtcgccctgagctgattttgaaagatggtataagctaggggttagtatagttgtttaagttagaaaaaacatgctgttgtctgcccctcattcccttcatgaccttgggcaagtcacgtaatgtttttgtgcctcaacaattcactttttaaaaacatgatcgtatgatgaatgatattattttgttatttatatttactgtgattgataactgttgaaccaaaataataaaataattaatttaaacaatgtcaaaatcctttagcagttatgtatatattttctccattgtgtgtttaaattatgtcatgtccagttgccaagcacaatgaaaaagatgtattattttttaaattgaataaaaaattaggaaaaataaaatttctaattattatttttagtatgatatttttaacaagagtctataggcaaacaatatagggtgtgctgtgcattgtcagccctatactgtggtcttaataatgccagcttaaaaatcactgttgtgctctgcatttcgtgtgttagaagctgattctaggctgaggaaagcaagagttctctacttttgctcaatattgaggcttacccagtttgactctacagccagtgaagtggtttattgcttcaataaaaatatacttgaatgatgaatttatttatgttttgttttgtttttatttagagatggggttttgccatgttggccaggctggtcttgaactcctgacctcaggtgatccacctgcctcagcctcccaacttgctgggattacaggtgtgagccaccatgcccagcctgaatgatgaatttatgtgaacacaaagccctctgaaaaattaatgattttcaatttgttgtcttcttgaaaactgaatttaagtattatttaaacagaaaagtgtcagaaatcaaatgcagtatctccctctcccttttttaaatgttgaattagtagggtttttgtatagctttttgtattgtgtgtatttatgatatgtgaaatgtacataaaattaaacaatgtgaaaat

SEQ ID NO: 2282 - protein, 257 aa, Homo sapiens
MIDKNQTCGVGQDSVPYMICLIHILEEWFGVEQLEDYLNFANYLLWVFTPLILLILPYFTIFLLYLTIIFLHIYKRKNVLKEAYSHNLWDGARKTVATLWDGHAAVWHGYEVHGMEKIPEDGPALIIFYHGAIPIDFYYFMAKIFIHKGRTCRVVADHFVFKIPGFSLLLDVFCALHGPREKCVEILRSGHLLAISPGGVREALISDETYNIVWGHRRGFAQVAIDAKVTKNAVQALIDKHQRIPGNIMSALLERFH

SEQ ID NO: 2283 - DNA, 3798 bp, Homo sapiens
tgggagaccggacgcgcgcggcctccgccgctcccagtcccgccagacccgatgccgggctggagaagcgcgggggccgacgcacctcggataggcgggggcaggggcaggggcagctctcctttaccctagagcggcgacagaagctcttcgggggatcagtggccaagggggcggacagatttgcacggcggattcctccgaagcaacccgtgtgaaagaagccaagcggaggctgcagcccgggccgcgatgggggtgacaccgcccgtggtcccgccccttcccgtggcccctcggagccacttccggcggcagcgtccgggctagttcctggcgcgagcggccgcgggccagtttctatctcctcatccagggcttgcgggcgaggcctgttttaagtctccagtaaccgagcggaggcccggcaggcgcgacccgggctgcgtacgtcagagctgcctccgaagtggtaaaatgtgctgcgagaagtggagccgcgtggcggaaatgtttctcttcactgaggagcgggaggattgtaagatactgtgcctttgctccagggcatttgtggaggatcgaaaattgtacaatttgggattaaaaggctattacatcagagacagtggcaacaattcaggagaccaggcgacagaagaagaggaaggtggttattcctgtggtactgcagaatcacatgacagcaaaggcataggcctggatgaaagtgaacttgattctgaggctgaactcatgagaagtatgggattgccacttcaatttggtaggataactgcacataaggattttgaggtatctatgaatactagaaataaagttaaaataaaaaagaaaaaacatcaaaagaaatacttagatgaaattgtgcaagaatcttggagaaaagaatatgaagaagacgacattttggcttcagatgatccatcttcaattgaacagtatgagaacaccagaacatatgaacttcaaagcaaaaaagatactgagacagaaaatcctccagttgaaaacacattatctccaaagctagaaattacagagaaatgggaaaagtattggaatgaatatggaggaggactattgtggcaaagttggcaagaaaaacatccgggtcaagcactatcttctgaaccttggaactttcctgatacaaaggaagaatgggagcaacattatagtcaactttattggtattatttggaacaatttcagtattgggaagctcagggttggacttttgatgcctcgcaaagctgtgatacagatacttacacatctaaaacagaagctgatgacaagaacgatgaaaaatgcatgaaagttgacttagtatcttttccatcttcacctattatggttgataatgatagctctggtacaagtgataaggatcatagtgaaatacttgatggaattagtaacataaaactgaattcagaggaagtaacacagagccaattagattcctgtacaagtcatgatggtcatcaacagctaagtgaagttagtagcaaaagagagtgccctgcttccggccaaagtgaaccacgtaatggaggaaccaatgaggaaagcaactcatcggggaatacaaacacagacccaccagctgaggattcacagaagtcttcaggagcaaacacaagcaaagacagaccacatgccagtggtactgatggagatgaaagtgaggaagacccacctgagcataagccaagcaaactgaagaggagccatgaactggacattgatgaaaacccagcttcagactttgatgacagtggttcccttctaggattcaagtatggctcaggacaaaaatatggtggaatcccaaatttcagtcatcggcaggtcaggtatttagagaagaatgtgaagcttaagtctaagtacctagacatgcgcagacaaataaagatgaaaaacaaacacatcttctttaccaaagagtcagaaaaaccatttttcaagaaaagcaaaattctgagtaaggtagaaaaattcctcacatgggttaataaaccaatggatgaagaagcatcacaggaatcatcttctcatgacaatgtgcacgacgcttccacaagtagtgattcagaggaacaagacatgtctgttaaaaaaggtgatgacctactggagactaataatccagaacctgaaaagtgtcagagcgtatcttcagctggtgaacttgaaacagaaaactatgaaagagacagcttgctagcaactgttccagatgagcaggattgtgttactcaagaagtgccagactcccgccaggcagaaactgaagctgaagtgaaaaagaagaagaccaagaagaagaccaaaaaggtgaatggtctgcctcctgaaatagctgctgttcctgagctggcaaaatactgggcccagaggtacaggctcttctcccgttttgatgatgggattaagttggacagagagggctggttttcagttacacccgagaagattgctgaacacattgctggccgtgttagtcagtccttcaagtgtgacgttgtagtagacgcattctgtggagttggaggaaataccattcagtttgccttaacaggaatgagagtgattgccattgatatcgatcctgttaagattgcccttgctcgcaataatgcagaagtttatgggatagcagataagatagagttcatctgtggagatttcttgctgctggcttcttttttaaaggctgatgttgtgttcctcagcccaccttggggagggccagactatgccactgcagagacctttgacattagaacaatgatgtctcctgatggctttgaaattttcagactttctaagaagatcactaataatattgtttattttcttccaagaaatgctgatattgaccaggtggcatccttagctgggcctggagggcaagtggaaatagaacagaacttccttaacaacaaattgaagacaatcactgcatattttggtgacctaattcgaagaccagcctctgaaacctaactatgcagcagtgcgaggacaaaagatcatggagtggtcaaaatattcagatgagacatttggcatgtcttcctttattcactgatattttctacccatggtcttatatcaccgtatgaaatggaaacttacaggacttaaatatcagtgaaatattttgagatctttgaataattcctttagaggaattatacaaaattaatatatatgagtcctttgtaatttatttttttttgagacaggatctcacttttaccgcccaggctggagtgcagtgccatgatcacagctcactgcaggttcagccttctgagttcaagcaatccttctgtctcagtctcctcagtagctggggctttaggtgggcactgccacaccgtactaatttttgtattttttgtagagacgaggtcccaccatgttgcccaggctggtgtcaaactcctgggctcagtcagtccccccatctcaccctccccaagtgctggaattacaggcgtgagctactgtgcccagccttacggacatccttttgaattatctttttcactcatagaatatgaatacatttatttagactttttctagaactttcctgttttcatgtctttgcttcatctggaattggcttaacacccttttataaagtttgtgtttgtaaaatttccattgtgacatcaatacgcaatatattttgtaatataggagtttctatttttttattaaaatggcaatgaaagcaaaaaaaaaaaaaaaaaa

SEQ ID NO: 2284 - protein, 853 aa, Homo sapiens
MCCEKWSRVAEMFLFTEEREDCKILCLCSRAFVEDRKLYNLGLKGYYIRDSGNNSGDQATEEEEGGYSCGTAESHDSKGIGLDESELDSEAELMRSMGLPLQFGRITAHKDFEVSMNTRNKVKIKKKKHQKKYLDEIVQESWRKEYEEDDILASDDPSSIEQYENTRTYELQSKKDTETENPPVENTLSPKLEITEKWEKYWNEYGGGLLWQSWQEKHPGQALSSEPWNFPDTKEEWEQHYSQLYWYYLEQFQYWEAQGWTFDASQSCDTDTYTSKTEADDKNDEKCMKVDLVSFPSSPIMVDNDSSGTSDKDHSEILDGISNIKLNSEEVTQSQLDSCTSHDGHQQLSEVSSKRECPASGQSEPRNGGTNEESNSSGNTNTDPPAEDSQKSSGANTSKDRPHASGTDGDESEEDPPEHKPSKLKRSHELDIDENPASDFDDSGSLLGFKYGSGQKYGGIPNFSHRQVRYLEKNVKLKSKYLDMRRQIKMKNKHIFFTKESEKPFFKKSKILSKVEKFLTWVNKPMDEEASQESSSHDNVHDASTSSDSEEQDMSVKKGDDLLETNNPEPEKCQSVSSAGELETENYERDSLLATVPDEQDCVTQEVPDSRQAETEAEVKKKKTKKKTKKVNGLPPEIAAVPELAKYWAQRYRLFSRFDDGIKLDREGWFSVTPEKIAEHIAGRVSQSFKCDVVVDAFCGVGGNTIQFALTGMRVIAIDIDPVKIALARNNAEVYGIADKIEFICGDFLLLASFLKADVVFLSPPWGGPDYATAETFDIRTMMSPDGFEIFRLSKKITNNIVYFLPRNADIDQVASLAGPGGQVEIEQNFLNNKLKTITAYFGDLIRRPASET

SEQ ID NO: 2285 - DNA, 2298 bp, Homo sapiens
tcggccgagcccagagacagccagttcctctcccgccgcgccgggccgcgtgccgctcgctccccggccgtggcgcctccgggccagacgcgctgcagcctccagcccgcggcaagcgggcggggcggccgcgccacccccggccccgcgccagcagcccctcgccgcgcgtccagcgttcccggccagcagcctccccatacgcagtcctgctggaccgccccgtcgcgccccccactctgaactcaagtcaccgtggagctccgccgccccgaaactttcacgcgagcgggaaatatgggatgtataaaatcaaaagggaaagacagcttgagtgacgatggagtagatttgaagactcaaccagtacgtaatactgaaagaactatttatgtgagagatccaacgtccaataaacagcaaaggccagttccagaatctcagcttttacctggacagaggtttcaaactaaagatccagaggaacaaggagacattgtggtagccttgtacccctatgatggcatccacccggacgacttgtctttcaagaaaggagagaagatgaaagtcctggaggagcatggagaatggtggaaagcaaagtcccttttaacaaaaaaagaaggcttcatccccagcaactatgtggccaaactcaacaccttagaaacagaagagtggtttttcaaggatataaccaggaaggacgcagaaaggcagcttttggcaccaggaaatagcgctggagctttccttattagagaaagtgaaacattaaaaggaagcttctctctgtctgtcagagactttgaccctgtgcatggtgatgttattaagcactacaaaattagaagtctggataatgggggctattacatctctccacgaatcacttttccctgtatcagcgacatgattaaacattaccaaaagcaggcagatggcttgtgcagaagattggagaaggcttgtattagtcccaagccacagaagccatgggataaagatgcctgggagatcccccgggagtccatcaagttggtgaaaaggcttggcgctgggcagtttggggaagtctggatgggttactataacaacagtaccaaggtggctgtgaaaaccctgaagccaggaactatgtctgtgcaagccttcctggaagaagccaacctcatgaagaccctgcagcatgacaagctcgtgaggctctacgctgtggtcaccagggaggagcccatttacatcatcaccgagtacatggccaagggcagtttgctggatttcctgaagagcgatgaaggtggcaaagtgctgcttccaaagctcattgacttttctgctcagattgcagagggaatggcatacatcgagcggaagaactacattcaccgggacctgcgagcagctaatgttctggtctccgagtcactaatgtgcaaaattgcagattttggccttgctagagtaattgaagataatgagtacacagcaagggaaggtgctaagttccctattaagtggacggctccagaagcaatcaactttggatgtttcactattaagtctgatgtgtggtcctttggaatcctcctatacgaaattgtcacctatgggaaaattccctacccagggagaactaatgccgacgtgatgaccgccctgtcccagggctacaggatgccccgtgtggagaactgcccagatgagctctatgacattatgaaaatgtgctggaaagaaaaggcagaagagagaccaacgtttgactacttacagagcgtcctggatgatttctacacagccacggaagggcaataccagcagcagccttagagcacagggagacccgtccatttggcaggggtggctgcctcatttagagaggaaaagtaaccatcactggttgcacttatgatttcatgtgcggggatcatctgccgtgcctggatcctgaaatagaggctaaattactcaggaagaacaccctctaaatgggaaagtattctgtactcttagatggattctccactcagttgcaacttggacttgtcctcagcagctggtaatcttgctctgcttgacaacatctgagtgcagccgtttgagaagaaaacatctattctctccaaaaatgcacccaactagctctatgtttacaaatggacataggactcaaagtttcagagaccattgcaatgaatccccaataattgcagaactaaactcatttataaagctaaaataaccggatatatacatagcatgacatttctttgtgctttggcttacttgttt

SEQ ID NO: 2286 - protein, 512 aa, Homo sapiens
MGCIKSKGKDSLSDDGVDLKTQPVRNTERTIYVRDPTSNKQQRPVPESQLLPGQRFQTKDPEEQGDIVVALYPYDGIHPDDLSFKKGEKMKVLEEHGEWWKAKSLLTKKEGFIPSNYVAKLNTLETEEWFFKDITRKDAERQLLAPGNSAGAFLIRESETLKGSFSLSVRDFDPVHGDVIKHYKIRSLDNGGYYISPRITFPCISDMIKHYQKQADGLCRRLEKACISPKPQKPWDKDAWEIPRESIKLVKRLGAGQFGEVWMGYYNNSTKVAVKTLKPGTMSVQAFLEEANLMKTLQHDKLVRLYAVVTREEPIYIITEYMAKGSLLDFLKSDEGGKVLLPKLIDFSAQIAEGMAYIERKNYIHRDLRAANVLVSESLMCKIADFGLARVIEDNEYTAREGAKFPIKWTAPEAINFGCFTIKSDVWSFGILLYEIVTYGKIPYPGRTNADVMTALSQGYRMPRVENCPDELYDIMKMCWKEKAEERPTFDYLQSVLDDFYTATEGQYQQQP

SEQ ID NO: 2287 - DNA, 4058 bp, Homo sapiens
ccaatgttggagccgtctgcaaagtgtccccggcaagaagaggctgcctaccacaaggactttagcttactttttaaagattgaagaaaaaaaagaagacagaaaaagaagaactcaaagatacacaaagtaatttgaaccaaggctcagaagtttttggagccgtgagggatacagcagtttggtcaatattgtcttaacatgcttcaaataaatcagatgttctcagtgcagctgagtcttggtgagcagacatgggaatccgaaggcagcagtataaagaaggctcagcaggctgttgccaataaagctttgactgaatctacgcttcccaaaccagttcagaagccacccaaaagtaatgttaacaataacccaggcagtataactccaactgtggaactgaatgggcttgctatgaaaaggggagagcctgccatctacaggccattagatccaaagccattcccaaattatagagctaattacaactttcggggcatgtacaatcagaggtatcattgcccagtgcctaagatcttttatgttcagctcactgtaggaaataatgaattttttggggaaggaaagactcgacaagctgctagacacaatgctgcaatgaaagccctccaagcactgcagaatgaacctattccagaaagatctcctcagaatggtgaatcaggaaaggatatggatgatgacaaagatgcaaataagtctgagatcagcttagtgtttgaaattgctctgaagcgaaatatgcctgtcagttttgaggttattaaagaaagtggaccaccacatatgaaaagctttgttactcgagtgtcagtaggagagttctctgcagaaggagaaggaaatagcaaaaaactctccaagaagcgcgctgcgaccaccgtcttacaggagcttaaaaaacttccacctcttcctgtggtggaaaagccaaaactattttttaaaaaacgccctaaaacaatagtaaaggccggaccagaatatggccaagggatgaaccctattagccgcctggcgcaaattcaacaggccaaaaaggaaaaggagccggattatgttttgctttcagaaagaggaatgcctcgacgtcgagaatttgtgatgcaggtgaaggtaggcaatgaagttgctacaggaacaggacctaataaaaagatagccaaaaaaaatgctgcagaagcaatgctgttacaacttggttataaagcatccactaatcttcaggatcaacttgagaagacaggggaaaacaaaggatggagtggtccaaagcctgggtttcctgaaccaacaaataatactccaaaaggaattcttcatttgtctcctgatgtttatcaagagatggaagccagccgccacaaagtaatctctggcactactctaggctatttgtcacccaaagatatgaaccaaccttcaagctctttcttcagtatatctcccacatcgaatagttcagctacaattgccagggaactccttatgaatggaacatcttctacagctgaagccataggtttaaaaggaagttctcctactcccccttgttctccagtacaaccttcaaaacaactggaatatttagcaaggattcaaggctttcaggtatgaattaaaagcaaaaacaaaaaacaaaacaattcattagcctcagattcttcatctgtatacatcacaaggctcattcttgcctgctagtatggcctacatgccacttacgttttaagttatttaggaacacaaaggacagacaaaaaagccatatgcacatgcctcattttctcttatttttgatctatctagtaattcttttgctgcctgtctcttctccattttccttcttcttttttaagcatttttcatattcttcactgtcttctatttggtcttgattaggtgcatctatctcttcgctctgtcttccacaaacaaaaattctgccttcagacatttggtgttagtatttcacactcagttctccctttttttacataaggattgagtttctttttatgatgattttacctttatagcaattttgaattttgcattctgttgctagtattgattcaggtacaccattaagatacaacattctagaagtctattaccttaggagttaattaaacatgatatttgaagaataatgaaatgctttatagttgtttgaggcataacaatgtgtatttgttttactggatcatgttttgaactgactagggagggtagcacctgcctcagatagtaccaacaattctgtttcactgggtagtctaaaactagcttatagtttaacttaacttgttgtgtatgtgaatttagggatggaaactttttttcccctatttattctttgtttccttctgggaaaaaaccccacaaaaatcagcactcctttatggatacattggagcttttgaaagaattgtaaactctaggaaggggaaatatctgtgtcttgatttcttagttgccttgaaaatcatgtactgaactgtaaccgctaacttgactggatgaactagtttgcttgtgtgtagagagtgtattgcttcctcagatttcactgttttcatctccttttccatcttagtctttattccttaagaccaaaaactgtaatatcctttagaaatgctctagaagatctgtattgtgtagaatgatcatgtatttataaatattttacaagtttagattataaaatgaaaaagaaggtcatgtgttttggggggtattttgcatgttcggatttttttttcccttcaccgaacccttctgattctttcaaactattgccaggtagttgttagtgtttctaattggactcttaatatgaacttcaagaagctgttaccagttatcggctctgtcatctgaaattttaaccacttaatttaaagttacaattttagaatttgtttttgttgttttaccttaagaaacacaataaatcactgtttaaaaaagatctcaatttatataaagtactggaaaaaagctaagtaatttttagttctatctataatctccgtaggatgaattagaaataaattgtgatgaaaagaaattaactgcttatttatgaatctaatcatttagaaatgtctgagagtaacactgcattcttatagaaacaaagcacaaattgcattcaagctctgaattgattttttgcttggagctgttgttacagtagctgtaattttgctaccagaatgtcttaattttttaaatttgtttttatttctaagctcttggcaatgacaataattataattttaacatatcttcactgtagtcaacatgtagagtctgcttccctcattattgcattgctaaggcctttttaaaaagcttatgcttacataatatactcttttttatggacacgttatatgtttccaaatctgtgtattgtgatttttacatactaatgaatataaacaggtgattttaaaatattactgtgcttctttggttgaatgagctggtattgatgtaaaatactctgtcattgatggaccactacctgcagctaagcagtgagcagaatctccgggaaatgacttagtctggccacatgcatagcccatcttcataatgtcgcagcagaaggttctttgtggttaaaagttttaaagcctatttctttataggtaaccctctcaggtatatttacctggtagaaaaacatgtagattgtttctattacttaaatgttttaattggactgtagtttagaaattacaggaccagcttgttacagattatacactattctgttacttttatttctgaaacttaaaaacaataaattctttttctgtgtttctaggttagaacttttttattttattgcacactgaacagatactgttgcttattgaatattgtgtaaacccttctttggctttccttgcccattgcaatttgatttaagcctactagagccattgtatgtgacagctatattgtattacaaagtaaaaatatatgagtgtattgaaaaaaaaaaaaaaaaaaaa

SEQ ID NO: 2288 - protein, 479 aa, Homo sapiens
MLQINQMFSVQLSLGEQTWESEGSSIKKAQQAVANKALTESTLPKPVQKPPKSNVNNNPGSITPTVELNGLAMKRGEPAIYRPLDPKPFPNYRANYNFRGMYNQRYHCPVPKIFYVQLTVGNNEFFGEGKTRQAARHNAAMKALQALQNEPIPERSPQNGESGKDMDDDKDANKSEISLVFEIALKRNMPVSFEVIKESGPPHMKSFVTRVSVGEFSAEGEGNSKKLSKKRAATTVLQELKKLPPLPVVEKPKLFFKKRPKTIVKAGPEYGQGMNPISRLAQIQQAKKEKEPDYVLLSERGMPRRREFVMQVKVGNEVATGTGPNKKIAKKNAAEAMLLQLGYKASTNLQDQLEKTGENKGWSGPKPGFPEPTNNTPKGILHLSPDVYQEMEASRHKVISGTTLGYLSPKDMNQPSSSFFSISPTSNSSATIARELLMNGTSSTAEAIGLKGSSPTPPCSPVQPSKQLEYLARIQGFQV

SEQ ID NO: 2289 - DNA, 4057 bp, Homo sapiens
agctcctccccctgcgtctctggcctcgccggtcttggggggatggttccatcatggcgtcaatgcagaccacaggaaggagggtggaagtatggtttccaaaacgactacagaaagaactgttggctttgcaaaatgacccacctcctggaatgaccttaaatgagaagagtgttcaaaattcaattacacagtggattgtagacatggaaggtgcaccaggtaccttatatgaaggggaaaaatttcaacttctatttaaatttagtagtcgatatccttttgactctcctcaggtcatgtttactggtgaaaatattcctgttcatcctcatgtttatagcaatggtcatatctgtttatccattctaacagaagactggtccccagcgctctcagtccaatcagtttgtcttagcattattagcatgctttccagctgcaaggaaaagagacgaccaccggataattctttttatgtgcgaacatgtaacaagaatccaaagaaaacaaaatggtggtatcatgatgatacttgttgatgccactgttatcatcctcctagcagaagatagtcctactgagaaaatgagcactttgatcattcagtctttgaactttaacctttgactggaagtgacctataggcaatgaagactacttccttttactgcatttttactcgtgtgcattctgggcgcatgttgatcgctggttcagtccaggcaactgacatgcttttattagtcatacagtattaatgcaggtgtcaggaaatgtcaaatataattccattttttatttttatttttttaagcttttggaaaagctccaggtcctcatgtattgtgcaataacaatgacttccttggcggttttggtacgttcattgccggcaatgggcgttgtaacaggaaaagttttcattaactcctgccattcaatgattaatgcatgatagggcctatgaaatgaacttactggttatagtgggaatataaataaagtgagggatccaacattactttaaaagtcaccccaactgtttatatttggattctatgcactgtgatcctaaggttaacagcatgaattaacatgcgtctttaaaggactgtaatgaaagatcattgcatatttattgaattgtttatatctactgtcaagttgttttgacatggaagattttcaagtaacattggcagagaggtacagtatgttatccctatggtgaaaataaattaatttgttgtatatagttcctcaatctctgaagtaaaggtatgagtaatatagggtatgaatggtttaatcaaggctttattttggaagtaagaaaaatggcagtgatgattaaattgctgcagtccataatttgggcttgttatttgtacattaaagattttttccaagtaagttacactctgttaacttcctgctagccatcagcatgagccctactgcctaaacactatttcatttatttatgtttggaaaccccgtaaacatttttgtttgcaatcttgtttcttttgttataagtcaagtttgaatgttacaatacttttattgaaacttttgttaagttttttcttgtaaattttctttacttgtgagtatcatcttgtcctttaatcctgtaccctaaaataagaaatacatttttgacagaggcttaatgttttaacaaaagagtgtggacatttttattttaaaatttaggcaaaagtcactatcaaatggttgcttatttgtctcacacagccatatagtttttcctggagggttttgttttgttgttgttgaaaagactttgcttacagctagatgaaactttctatagaaaaaaaaaattgttgaaaggtccagttctcagtaccatgtgagttaatgatactacaactaagttctttttaaaaagtgattaatgtattttataaattaccttttcacatatgcaaaatctgtttctactacaatgttatttttactaatgccttattgttgcactctttttgaaatatcctgcagtgaatatatgaatcaatttgggcttaaaactgaaagccagttggctgaaaggtttgaaatacgtaccccagtaaaaccattcaatcaataattggtaaataatattttaaaattgtttttaatctgtatagatgacattttgtagctttgtacatgttgttaattaagggcatataattttacactcaaagtataattgctgaactcaggggtgggtagacttcaaaaatatgtctgctatagaaataacttgaaaaaaaaaattaaaaccgtggccagccaccaaattgtggacactgtttatatactgctagttaacaattaccacttttaaaaaattataaccgtttttgttctatcttgactagataaattctcacaatgatctctgtcagttttattagttggcctgtttaaccaagacagaaagtctttgaattactcatagttttaaactgcttttaatatgaaaattgcagctgtaaattatgtattttcatattttgcgtaactgctctacactactgtttgacttgatcttcttctgggggttagggagaaatctgtctccatattgctggttctcttaccaaaatgcttttataaagaaatgaccggtgacatttattcaccaaaggaattaatatactgagtcaaagattaacaatgctatactatagagtaataggtcatatatagcctcaattgagttttttatgacaatattttaacatacctctctctctacatataaataccataaagtaaactaaaatgacacagaggaaagtagaggaaaatgaaataatttcggtacatcttatggtttaaagagtagaaaataagatgaaatatcctaaaatataggagcacagacatttaaaattcataatcaggctaacaacactctcttgaatttaggaatcattgaaaactccttgcacttagatttaatttatatgttagttacattattaaaagtcataaggcatttatctgagtcattgctctacagagagcaattaatggcttgtaataataaaaagaatatttctctgtaatgcattgttgaaagacaaccagaatatcaagaaaatgtatataggaatatgctacttgcctcctccctgcatttcctcgtggggcactatttgcgacataggcctacagaattagactttcatacttagaagataaggtacactcttcttcttttatttatttatttatttatttttaggccattcttctggtttgccaaattctattaagacagtgatacatttgcttccttatttatgcatgcttagatcatgaacatgatgcccttcttttttttttttttctttggtcaagtagggattaatgccataggtttagagagaaggattgttttcagtttttaagagaattttttaaaaatacattttatggttctcttaaggaattaatattcacttctgaaggacttacttgtaatatataatttatcattttagccagcagggaaataaatcatttttaatccccagaagaaagtgctggaaatagcttctatatagtcagcagttcacctggagaaagatcttaattccttgttgttttgactaggaatatcaatatttggtataaaataactagaatagtttattaccttttccctcatgaaattttaaatatatgcaaatatatatatcattagattcctgtggtggataataatttcttcagattctaaaacaggtgtctagtgactgcttaattgtttccaagttgcatcaaagatgaattggtaaataatggaaatgagtagtgatatgaaaatggttatgtaactacatattacttgtttctggtaatcaagtcttattttttaaaagcctattgtttttcagaattgagatatttaaaacttgttataacttcttcctaaaaatagaagagaagaggaggtactgtgtgttacaaaaatttttttaaataaagaattcagtgtcactagttctaaaaaaaaaaaaaaaaaaca

SEQ ID NO: 2290 - protein, 162 aa, Homo sapiens
MASMQTTGRRVEVWFPKRLQKELLALQNDPPPGMTLNEKSVQNSITQWIVDMEGAPGTLYEGEKFQLLFKFSSRYPFDSPQVMFTGENIPVHPHVYSNGHICLSILTEDWSPALSVQSVCLSIISMLSSCKEKRRPPDNSFYVRTCNKNPKKTKWWYHDDTC

SEQ ID NO: 2291 - DNA, 3921 bp, Homo sapiens
agctcctccccctgcgtctctggcctcgccggtcttggggggatggttccatcatggcgtcaatgcagaaacgactacagaaagaactgttggctttgcaaaatgacccacctcctggaatgaccttaaatgagaagagtgttcaaaattcaattacacagtcatgtttactggtgaaaatattcctgttcatcctcatgtttatagcaatggtcatatctgtttatccattctaacagaagactggtccccagcgctctcagtccaatcagtttgtcttagcattattagcatgctttccagctgcaaggaaaagagacgaccaccggataattctttttatgtgcgaacatgtaacaagaatccaaagaaaacaaaatggtggtatcatgatgatacttgttgatgccactgttatcatcctcctagcagaagatagtcctactgagaaaatgagcactttgatcattcagtctttgaactttaacctttgactggaagtgacctataggcaatgaagactacttccttttactgcatttttactcgtgtgcattctgggcgcatgttgatcgctggttcagtccaggcaactgacatgcttttattagtcatacagtattaatgcaggtgtcaggaaatgtcaaatataattccattttttatttttatttttttaagcttttggaaaagctccaggtcctcatgtattgtgcaataacaatgacttccttggcggttttggtacgttcattgccggcaatgggcgttgtaacaggaaaagttttcattaactcctgccattcaatgattaatgcatgatagggcctatgaaatgaacttactggttatagtgggaatataaataaagtgagggatccaacattactttaaaagtcaccccaactgtttatatttggattctatgcactgtgatcctaaggttaacagcatgaattaacatgcgtctttaaaggactgtaatgaaagatcattgcatatttattgaattgtttatatctactgtcaagttgttttgacatggaagattttcaagtaacattggcagagaggtacagtatgttatccctatggtgaaaataaattaatttgttgtatatagttcctcaatctctgaagtaaaggtatgagtaatatagggtatgaatggtttaatcaaggctttattttggaagtaagaaaaatggcagtgatgattaaattgctgcagtccataatttgggcttgttatttgtacattaaagattttttccaagtaagttacactctgttaacttcctgctagccatcagcatgagccctactgcctaaacactatttcatttatttatgtttggaaaccccgtaaacatttttgtttgcaatcttgtttcttttgttataagtcaagtttgaatgttacaatacttttattgaaacttttgttaagttttttcttgtaaattttctttacttgtgagtatcatcttgtcctttaatcctgtaccctaaaataagaaatacatttttgacagaggcttaatgttttaacaaaagagtgtggacatttttattttaaaatttaggcaaaagtcactatcaaatggttgcttatttgtctcacacagccatatagtttttcctggagggttttgttttgttgttgttgaaaagactttgcttacagctagatgaaactttctatagaaaaaaaaaattgttgaaaggtccagttctcagtaccatgtgagttaatgatactacaactaagttctttttaaaaagtgattaatgtattttataaattaccttttcacatatgcaaaatctgtttctactacaatgttatttttactaatgccttattgttgcactctttttgaaatatcctgcagtgaatatatgaatcaatttgggcttaaaactgaaagccagttggctgaaaggtttgaaatacgtaccccagtaaaaccattcaatcaataattggtaaataatattttaaaattgtttttaatctgtatagatgacattttgtagctttgtacatgttgttaattaagggcatataattttacactcaaagtataattgctgaactcaggggtgggtagacttcaaaaatatgtctgctatagaaataacttgaaaaaaaaaattaaaaccgtggccagccaccaaattgtggacactgtttatatactgctagttaacaattaccacttttaaaaaattataaccgtttttgttctatcttgactagataaattctcacaatgatctctgtcagttttattagttggcctgtttaaccaagacagaaagtctttgaattactcatagttttaaactgcttttaatatgaaaattgcagctgtaaattatgtattttcatattttgcgtaactgctctacactactgtttgacttgatcttcttctgggggttagggagaaatctgtctccatattgctggttctcttaccaaaatgcttttataaagaaatgaccggtgacatttattcaccaaaggaattaatatactgagtcaaagattaacaatgctatactatagagtaataggtcatatatagcctcaattgagttttttatgacaatattttaacatacctctctctctacatataaataccataaagtaaactaaaatgacacagaggaaagtagaggaaaatgaaataatttcggtacatcttatggtttaaagagtagaaaataagatgaaatatcctaaaatataggagcacagacatttaaaattcataatcaggctaacaacactctcttgaatttaggaatcattgaaaactccttgcacttagatttaatttatatgttagttacattattaaaagtcataaggcatttatctgagtcattgctctacagagagcaattaatggcttgtaataataaaaagaatatttctctgtaatgcattgttgaaagacaaccagaatatcaagaaaatgtatataggaatatgctacttgcctcctccctgcatttcctcgtggggcactatttgcgacataggcctacagaattagactttcatacttagaagataaggtacactcttcttcttttatttatttatttatttatttttaggccattcttctggtttgccaaattctattaagacagtgatacatttgcttccttatttatgcatgcttagatcatgaacatgatgcccttcttttttttttttttctttggtcaagtagggattaatgccataggtttagagagaaggattgttttcagtttttaagagaattttttaaaaatacattttatggttctcttaaggaattaatattcacttctgaaggacttacttgtaatatataatttatcattttagccagcagggaaataaatcatttttaatccccagaagaaagtgctggaaatagcttctatatagtcagcagttcacctggagaaagatcttaattccttgttgttttgactaggaatatcaatatttggtataaaataactagaatagtttattaccttttccctcatgaaattttaaatatatgcaaatatatatatcattagattcctgtggtggataataatttcttcagattctaaaacaggtgtctagtgactgcttaattgtttccaagttgcatcaaagatgaattggtaaataatggaaatgagtagtgatatgaaaatggttatgtaactacatattacttgtttctggtaatcaagtcttattttttaaaagcctattgtttttcagaattgagatatttaaaacttgttataacttcttcctaaaaatagaagagaagaggaggtactgtgtgttacaaaaatttttttaaataaagaattcagtgtcactagttctaaaaaaaaaaaaaaaaaaca

SEQ ID NO: 2292 - protein, 60 aa, Homo sapiens
MASMQKRLQKELLALQNDPPPGMTLNEKSVQNSITQSCLLVKIFLFILMFIAMVISVYPF

SEQ ID NO: 2293 - DNA, 4024 bp, Homo sapiens
agctcctccccctgcgtctctggcctcgccggtcttggggggatggttccatcatggcgtcaatgcagaaacgactacagaaagaactgttggctttgcaaaatgacccacctcctggaatgaccttaagtgagaagagtgttcaaaattcaattacacagtggattgtagacatggaaggtgcaccaggtaccttatatgaaggggaaaaatttcaacttctatttaaatttagtagtcgatatccttttgactctcctcaggtcatgtttactggtgaaaatattcctgttcatcctcatgtttatagcaatggtcatatctgtttatccattctaacagaagactggtccccagcgctctcagtccaatcagtttgtcttagcattattagcatgctttccagctgcaaggaaaagagacgaccaccggataattctttttatgtgcgaacatgtaacaagaatccaaagaaaacaaaatggtggtatcatgatgatacttgttgatgccactgttatcatcctcctagcagaagatagtcctactgagaaaatgagcactttgatcattcagtctttgaactttaacctttgactggaagtgacctataggcaatgaagactacttccttttactgcatttttactcgtgtgcattctgggcgcatgttgatcgctggttcagtccaggcaactgacatgcttttattagtcatacagtattaatgcaggtgtcaggaaatgtcaaatataattccattttttatttttatttttttaagcttttggaaaagctccaggtcctcatgtattgtgcaataacaatgacttccttggcggttttggtacgttcattgccggcaatgggcgttgtaacaggaaaagttttcattaactcctgccattcaatgattaatgcatgatagggcctatgaaatgaacttactggttatagtgggaatataaataaagtgagggatccaacattactttaaaagtcaccccaactgtttatatttggattctatgcactgtgatcctaaggttaacagcatgaattaacatgcgtctttaaaggactgtaatgaaagatcattgcatatttattgaattgtttatatctactgtcaagttgttttgacatggaagattttcaagtaacattggcagagaggtacagtatgttatccctatggtgaaaataaattaatttgttgtatatagttcctcaatctctgaagtaaaggtatgagtaatatagggtatgaatggtttaatcaaggctttattttggaagtaagaaaaatggcagtgatgattaaattgctgcagtccataatttgggcttgttatttgtacattaaagattttttccaagtaagttacactctgttaacttcctgctagccatcagcatgagccctactgcctaaacactatttcatttatttatgtttggaaaccccgtaaacatttttgtttgcaatcttgtttcttttgttataagtcaagtttgaatgttacaatacttttattgaaacttttgttaagttttttcttgtaaattttctttacttgtgagtatcatcttgtcctttaatcctgtaccctaaaataagaaatacatttttgacagaggcttaatgttttaacaaaagagtgtggacatttttattttaaaatttaggcaaaagtcactatcaaatggttgcttatttgtctcacacagccatatagtttttcctggagggttttgttttgttgttgttgaaaagactttgcttacagctagatgaaactttctatagaaaaaaaaaattgttgaaaggtccagttctcagtaccatgtgagttaatgatactacaactaagttctttttaaaaagtgattaatgtattttataaattaccttttcacatatgcaaaatctgtttctactacaatgttatttttactaatgccttattgttgcactctttttgaaatatcctgcagtgaatatatgaatcaatttgggcttaaaactgaaagccagttggctgaaaggtttgaaatacgtaccccagtaaaaccattcaatcaataattggtaaataatattttaaaattgtttttaatctgtatagatgacattttgtagctttgtacatgttgttaattaagggcatataattttacactcaaagtataattgctgaactcaggggtgggtagacttcaaaaatatgtctgctatagaaataacttgaaaaaaaaaattaaaaccgtggccagccaccaaattgtggacactgtttatatactgctagttaacaattaccacttttaaaaaattataaccgtttttgttctatcttgactagataaattctcacaatgatctctgtcagttttattagttggcctgtttaaccaagacagaaagtctttgaattactcatagttttaaactgcttttaatatgaaaattgcagctgtaaattatgtattttcatattttgcgtaactgctctacactactgtttgacttgatcttcttctgggggttagggagaaatctgtctccatattgctggttctcttaccaaaatgcttttataaagaaatgaccggtgacatttattcaccaaaggaattaatatactgagtcaaagattaacaatgctatactatagagtaataggtcatatatagcctcaattgagttttttatgacaatattttaacatacctctctctctacatataaataccataaagtaaactaaaatgacacagaggaaagtagaggaaaatgaaataatttcggtacatcttatggtttaaagagtagaaaataagatgaaatatcctaaaatataggagcacagacatttaaaattcataatcaggctaacaacactctcttgaatttaggaatcattgaaaactccttgcacttagatttaatttatatgttagttacattattaaaagtcataaggcatttatctgagtcattgctctacagagagcaattaatggcttgtaataataaaaagaatatttctctgtaatgcattgttgaaagacaaccagaatatcaagaaaatgtatataggaatatgctacttgcctcctccctgcatttcctcgtggggcactatttgcgacataggcctacagaattagactttcatacttagaagataaggtacactcttcttcttttatttatttatttatttatttttaggccattcttctggtttgccaaattctattaagacagtgatacatttgcttccttatttatgcatgcttagatcatgaacatgatgcccttcttttttttttttttctttggtcaagtagggattaatgccataggtttagagagaaggattgttttcagtttttaagagaattttttaaaaatacattttatggttctcttaaggaattaatattcacttctgaaggacttacttgtaatatataatttatcattttagccagcagggaaataaatcatttttaatccccagaagaaagtgctggaaatagcttctatatagtcagcagttcacctggagaaagatcttaattccttgttgttttgactaggaatatcaatatttggtataaaataactagaatagtttattaccttttccctcatgaaattttaaatatatgcaaatatatatatcattagattcctgtggtggataataatttcttcagattctaaaacaggtgtctagtgactgcttaattgtttccaagttgcatcaaagatgaattggtaaataatggaaatgagtagtgatatgaaaatggttatgtaactacatattacttgtttctggtaatcaagtcttattttttaaaagcctattgtttttcagaattgagatatttaaaacttgttataacttcttcctaaaaatagaagagaagaggaggtactgtgtgttacaaaaatttttttaaataaagaattcagtgtcactagttctaaaaaaaaaaaaaaaaaaca

SEQ ID NO: 2294 - protein, 151 aa, Homo sapiens
MASMQKRLQKELLALQNDPPPGMTLSEKSVQNSITQWIVDMEGAPGTLYEGEKFQLLFKFSSRYPFDSPQVMFTGENIPVHPHVYSNGHICLSILTEDWSPALSVQSVCLSIISMLSSCKEKRRPPDNSFYVRTCNKNPKKTKWWYHDDTC

SEQ ID NO: 2295 - DNA, 668 bp, Homo sapiens
cggggacccggctgcggtggctgcgggactgacgagaaactactaaagttcctggggaagcaaagtagaatttcataagaacaaaatggatggagaggagaaaacctatggtggctgtgaaggacctgatgccatgtatgtcaaattgatatcatctgatggccatgaatttattgtaaaaagagaacatgcattaacatcaggcacgataaaagccatgttgagtggcccaggtcagtttgctgagaacgaaaccaatgaggtcaattttagagagataccttcacatgtgctatcgaaagtatgcatgtattttacgtacaaggttcgctacactaacagctccaccgagattcctgaattcccaattgcacctgaaattgcactggaactgctgatggctgcgaacttcttagattgttaaataaaataaattataataaactgttaactcttttcagtatttaatacctgtagttcagttagtaactttttcatatatagcatgttgcctgtatgcagttgaactatataaagttcattgcaaagcagattatcttgtttttttgcatagcaatcaaagttgaaatttgtttgctacatcaacaaattaaggacattttcacaaactgagaaataaacaaatatgccaattaaaaaaaaaaaaa

SEQ ID NO: 2296 - protein, 112 aa, Homo sapiens
MDGEEKTYGGCEGPDAMYVKLISSDGHEFIVKREHALTSGTIKAMLSGPGQFAENETNEVNFREIPSHVLSKVCMYFTYKVRYTNSSTEIPEFPIAPEIALELLMAANFLDC

SEQ ID NO: 2297 - DNA, 2044 bp, Homo sapiens
acttgtgcggcagtcgggtgggaagccgtgtctcgcagtcgtggactcgtgcagctggggcgtccgcagccgctcgtcacccgcgtgatgctgtttctggcgttgggcagcccgtgggcggtcgaactgcctctctgcggaaggaggactgcattgtgtgcggccgccgcgctccgaggtccccgggcctctgtctcccgggcgtcctccagcagcgggccttcggggccggtagccggctggagtacggggccttcgggagccgcgcgccttctccggcgtccgggtcgagcgcagatccctgtttattgggaaggatatgttcgattcttaaatacgccatctgacaaatcagaagatggaaggctaatttatactggcaatatggcccgagcagtgtttggtaagtaattggaggtgtgaaatgtttctcttattctacgagtctgattggccttacatttctgccatacatttttacacaaaataatgctatttctgaaagtgtgcctctgcctattcaaatcatattctatggcatcatgggaagctttacggtgatcaccccagtgctgcttcactttattacaaaaggctatgtcattcgattgtaccatgaggccacaacagacacttataaagccattacctacaatgctatgcttgcagaaacgagtacagtgtttcaccagaatgatgtgaagattccagatgctaaacatgtatttaccacattttatgctaaaacaaaatcactgttagttaatccagtgctctttccaaaccgtgaagactatatccatctaatgggttatgacaaagaagaatttattttgtatatggaagaaaccagtgaagagaaacggcataaagatgacaaatgagcctatttgttagtgttcgtgctcaaatgtgatttacgttttaatgtataataataaaattgccttttgcattccgttagtgactgattgttaaaaataatttgaaattatcaaagcttttaatttccagagaatgatgtttgtttataataaaacaagctatgtttgaaaaccaaaatgtagtatctaccattcgtgttttagaaaggtatgtgaataaatatgttcatgctagtataagagttctgtgttactgtggttgactctaaactggggatctgatgtcagtagcaaatgggagagttgctttattctttgtgtatggatttttctaagtgtataaatattttccgacattaaaagacattttctctttgaggaagacacagtcataggtggtgcggagctgtggtccacctgctcctgctcctgactcactgctctttgctgttgcctgaggaccaagtctgtcaggaagctggctaggaagccttgcagcagccatggcttttaaacataccagaaaaacacccgtggagtcagaggtggcaattcaccgaattcatatcactctaacgagttgcaacgtaaaatccctggataaggtgtgtgctgacttgatctgaggagcaaaggaaaagaatcagtgaaaggaccagtttgaatgcctaccaagactttgagaatcactacaagaaaaacttacggtgaaggttctaaggcatgggatcgtttccagatgagaatccacaagcgactcattgacttgcgcagtcctcagatagttaagcagattacttccatcagtattgagccaggagttgagatggaagtcaccattgcaaatgcttaagtcaactgttttcataaattgattaccagttgttaaaaaattttcaaaaaaccgcaaaatttcaagaaattcacaaattatgggagcagttttaagtcttctttggttcagaacacaggtttttgcctaacccctggcatgattgcccataagaacatacatgtacagttgaactggtggttagctatacgggaaatggtaagtagtgttgtcttcagtatcttaatttgtttctgcaactgtgcactcctcccttggtggcaccctatgggtgtaggaaaaccactgttattaaacaggtgaaaaa

SEQ ID NO: 2298 - protein, 107 aa, Homo sapiens
MLFLALGSPWAVELPLCGRRTALCAAAALRGPRASVSRASSSSGPSGPVAGWSTGPSGAARLLRRPGRAQIPVYWEGYVRFLNTPSDKSEDGRLIYTGNMARAVFGK

SEQ ID NO: 2299 - DNA, 2030 bp, Homo sapiens
acttgtgcggcagtcgggtgggaagccgtgtctcgcagtcgtggactcgtgcagctggggcgtccgcagccgctcgtcacccgcgtgatgctgtttctggcgttgggcagcccgtgggcggtcgaactgcctctctgcggaaggaggactgcattgtgtgcggccgccgcgctccgaggtccccgggcctctgtctcccgggcgtcctccagcagcgggccttcggggccggtagccggctggagtacggggccttcgggagccgcgcgccttctccggcgtccgggtcgagcgcagatccctgtttattgggaaggatatgttcgattcttaaatacgccatctgacaaatcagaagatggaaggctaatttatactggcaatatggcccgagcagtgtttggtgtgaaatgtttctcttattctacgagtctgattggccttacatttctgccatacatttttacacaaaataatgctatttctgaaagtgtgcctctgcctattcaaatcatattctatggcatcatgggaagctttacggtgatcaccccagtgctgcttcactttattacaaaaggctatgtcattcgattgtaccatgaggccacaacagacacttataaagccattacctacaatgctatgcttgcagaaacgagtacagtgtttcaccagaatgatgtgaagattccagatgctaaacatgtatttaccacattttatgctaaaacaaaatcactgttagttaatccagtgctctttccaaaccgtgaagactatatccatctaatgggttatgacaaagaagaatttattttgtatatggaagaaaccagtgaagagaaacggcataaagatgacaaatgagcctatttgttagtgttcgtgctcaaatgtgatttacgttttaatgtataataataaaattgccttttgcattccgttagtgactgattgttaaaaataatttgaaattatcaaagcttttaatttccagagaatgatgtttgtttataataaaacaagctatgtttgaaaaccaaaatgtagtatctaccattcgtgttttagaaaggtatgtgaataaatatgttcatgctagtataagagttctgtgttactgtggttgactctaaactggggatctgatgtcagtagcaaatgggagagttgctttattctttgtgtatggatttttctaagtgtataaatattttccgacattaaaagacattttctctttgaggaagacacagtcataggtggtgcggagctgtggtccacctgctcctgctcctgactcactgctctttgctgttgcctgaggaccaagtctgtcaggaagctggctaggaagccttgcagcagccatggcttttaaacataccagaaaaacacccgtggagtcagaggtggcaattcaccgaattcatatcactctaacgagttgcaacgtaaaatccctggataaggtgtgtgctgacttgatctgaggagcaaaggaaaagaatcagtgaaaggaccagtttgaatgcctaccaagactttgagaatcactacaagaaaaacttacggtgaaggttctaaggcatgggatcgtttccagatgagaatccacaagcgactcattgacttgcgcagtcctcagatagttaagcagattacttccatcagtattgagccaggagttgagatggaagtcaccattgcaaatgcttaagtcaactgttttcataaattgattaccagttgttaaaaaattttcaaaaaaccgcaaaatttcaagaaattcacaaattatgggagcagttttaagtcttctttggttcagaacacaggtttttgcctaacccctggcatgattgcccataagaacatacatgtacagttgaactggtggttagctatacgggaaatggtaagtagtgttgtcttcagtatcttaatttgtttctgcaactgtgcactcctcccttggtggcaccctatgggtgtaggaaaaccactgttattaaacaggtgaaaaa

SEQ ID NO: 2300 - protein, 260 aa, Homo sapiens
MLFLALGSPWAVELPLCGRRTALCAAAALRGPRASVSRASSSSGPSGPVAGWSTGPSGAARLLRRPGRAQIPVYWEGYVRFLNTPSDKSEDGRLIYTGNMARAVFGVKCFSYSTSLIGLTFLPYIFTQNNAISESVPLPIQIIFYGIMGSFTVITPVLLHFITKGYVIRLYHEATTDTYKAITYNAMLAETSTVFHQNDVKIPDAKHVFTTFYAKTKSLLVNPVLFPNREDYIHLMGYDKEEFILYMEETSEEKRHKDDK

SEQ ID NO: 2301 - DNA, 587 bp, Homo sapiens
taaatcttttctgcttactgaaaaggaagagtctgatgattagttactgatcctctttgcatttgtaaagctttggagatattgaatcatgttaccatttctgtttttttccaccctgttttcttccatatttactgaagctcagaagcagtattgggtctgcaactcatccgatgcaagtatttcatacacctactgtgataaaatgcaatacccaatttcaattaatgttaacccctgtatagaattgaaaggatccaaaggattattgcacattttctacattccaaggagagatttaaagcaattatatttcaatctctatataactgtcaacaccatgaatcttccaaagcgcaaagaagttatttgccgaggatctgatgacgattactctttttgcagagctctgaagggagagactgtgaatacaacaatatcattctccttcaagggaataaaattttctaagggaaaatacaaatgtgttgttgaagctatttctgggagcccagaagaaatgctcttttgcttggagtttgtcatcctacaccaacctaattcaaattagaataaattgagtattt

SEQ ID NO: 2302 - protein, 160 aa, Homo sapiens
MLPFLFFSTLFSSIFTEAQKQYWVCNSSDASISYTYCDKMQYPISINVNPCIELKGSKGLLHIFYIPRRDLKQLYFNLYITVNTMNLPKRKEVICRGSDDDYSFCRALKGETVNTTISFSFKGIKFSKGKYKCVVEAISGSPEEMLFCLEFVILHQPNSN

SEQ ID NO: 2303 - DNA, 2588 bp, Homo sapiens
gagctcgggcggccggagctggtcgctgcgcgcgccggggggagggccggggctgcgagagaggaagctctttcgcggcgctacggcgttggcaccagtctctagaaaagaagtcagctctggttcggagaagcagcggctggcgtgggccatccggggaatgggcgccctcgtgacctagtgttgcggggcaaaaagggtcttgccggcctcgctcgtgcaggggcgtatctgggcgcctgagcgcggcgtgggagccttgggagccgccgcagcagggggcacacccggaaccggcctgagcgcccgggaccatgaacggggaggccatctgcagcgccctgcccaccattccctaccacaaactcgccgacctgcgctacctgagccgcggcgcctctggcactgtgtcgtccgcccgccacgcagactggcgcgtccaggtggccgtgaagcacctgcacatccacactccgctgctcgacagtgaaagaaaggatgtcttaagagaagctgaaattttacacaaagctagatttagttacattcttccaattttgggaatttgcaatgagcctgaatttttgggaatagttactgaatacatgccaaatggatcattaaatgaactcctacataggaaaactgaatatcctgatgttgcttggccattgagatttcgcatcctgcatgaaattgcccttggtgtaaattacctgcacaatatgactcctcctttacttcatcatgacttgaagactcagaatatcttattggacaatgaatttcatgttaagattgcagattttggtttatcaaagtggcgcatgatgtccctctcacagtcacgaagtagcaaatctgcaccagaaggagggacaattatctatatgccacctgaaaactatgaacctggacaaaaatcaagggccagtatcaagcacgatatatatagctatgcagttatcacatgggaagtgttatccagaaaacagccttttgaagatgtcaccaatcctttgcagataatgtatagtgtgtcacaaggacatcgacctgttattaatgaagaaagtttgccatatgatatacctcaccgagcacgtatgatctctctaatagaaagtggatgggcacaaaatccagatgaaagaccatctttcttaaaatgtttaatagaacttgaaccagttttgagaacatttgaagagataacttttcttgaagctgttattcagctaaagaaaacaaagttacagagtgtttcaagtgccattcacctatgtgacaagaagaaaatggaattatctctgaacatacctgtaaatcatggtccacaagaggaatcatgtggatcctctcagctccatgaaaatagtggttctcctgaaacttcaaggtccctgccagctcctcaagacaatgattttttatctagaaaagctcaagactgttattttatgaagctgcatcactgtcctggaaatcacagttgggatagcaccatttctggatctcaaagggctgcattctgtgatcacaagaccactccatgctcttcagcaataataaatccactctcaactgcaggaaactcagaacgtctgcagcctggtatagcccagcagtggatccagagcaaaagggaagacattgtgaaccaaatgacagaagcctgccttaaccagtcgctagatgcccttctgtccagggacttgatcatgaaagaggactatgaacttgttagtaccaagcctacaaggacctcaaaagtcagacaattactagacactactgacatccaaggagaagaatttgccaaagttatagtacaaaaattgaaagataacaaacaaatgggtcttcagccttacccggaaatacttgtggtttctagatcaccatctttaaatttacttcaaaataaaagcatgtaagtgactgtttttcaagaagaaatgtgtttcataaaaggatatttatatctctgttgctttgactttttttatataaaatccgtgagtattaaagctttattgaaggttctttgggtaaatattagtctccctccatgacactgcagtattttttttaattaatacaagtaaaaagtttgaattttgctacatagttcaatttttatgtctcttttgttaacagaaaccacttttaaaggatagtaattattcttgtttataacagtgccttaaggtatgatgtatttctgatggaagccattttcacattcatgttcttcatggattatttgttacttgtctaagatgcaatttgattttatgaagtatataccctttacccaccagagacagtacagaatccctgccctaaaatcccaggcttaattgccctacaaagggttattaatttaaaactccattattaggattacattttaaagttttatttatgaattccctttaaaaatgatatttcaaaggtaaaacaatacaatataaagaaaaaaataaatatattaataccggcttcctgtccccatttttaacctcagccttccctactgtcaccaacaaccaagctaaataaagtcaacagcctgatgtgtaaaa

SEQ ID NO: 2304 - protein, 540 aa, Homo sapiens
MNGEAICSALPTIPYHKLADLRYLSRGASGTVSSARHADWRVQVAVKHLHIHTPLLDSERKDVLREAEILHKARFSYILPILGICNEPEFLGIVTEYMPNGSLNELLHRKTEYPDVAWPLRFRILHEIALGVNYLHNMTPPLLHHDLKTQNILLDNEFHVKIADFGLSKWRMMSLSQSRSSKSAPEGGTIIYMPPENYEPGQKSRASIKHDIYSYAVITWEVLSRKQPFEDVTNPLQIMYSVSQGHRPVINEESLPYDIPHRARMISLIESGWAQNPDERPSFLKCLIELEPVLRTFEEITFLEAVIQLKKTKLQSVSSAIHLCDKKKMELSLNIPVNHGPQEESCGSSQLHENSGSPETSRSLPAPQDNDFLSRKAQDCYFMKLHHCPGNHSWDSTISGSQRAAFCDHKTTPCSSAIINPLSTAGNSERLQPGIAQQWIQSKREDIVNQMTEACLNQSLDALLSRDLIMKEDYELVSTKPTRTSKVRQLLDTTDIQGEEFAKVIVQKLKDNKQMGLQPYPEILVVSRSPSLNLLQNKSM

SEQ ID NO: 2305 - DNA, 3413 bp, Homo sapiens
atttccctgctgctatgtgaaatgtgcgtcttctccttccgccatgattaagtaagcaaacattttcctctaattcagattctttaaacaaaagttgcaaatgaatgtagccttcatctattgtaaaattaaagatggagatggtcaaggggttaccgccagtctgtttcttgcgctgataatttttctagacattaaatctcaccatttgttcccaacaaagaaagaaagacaggaccaccagactctacagggaagccaagaggaagaagggaaggagcccagaaatggagagaagctggactctagggatggatctggggatgctccacaaagtgcagctgtggagaatgcagaagaagagttggctagtgggacattcccactgaggagcatggcagggggaatgtctaatattcactaagagaattcttgaaatgtaacatttagatgaaactcttcaagtttccttaaaatacaaattcatgactctctttctttctctctctctctttctctctctctttggtatgttaaagtaatcaaggaaagggattttgttttataactgggttacacaggggagagaccagaatagctgaaagctgtgagacatgaagaaaattcaagatttaggagacatgcagaacatcagtgtctaggcaaaatggcagactgaccaacccccacacactgaatccctagagatattaggacagggatattgagaaaaatttacctttaagttgtaaaggacaaggcaactcaacatattgaatgccttgttgacaaccaggggctaatatttgggatgcatattgggcatagatgcacagaaaataatttatcagtgacattaataatatgacatctctttgttgagaatttactgctgtcttaatatcacaactctaaggggtcaacatccagaataaacttcttatcttacatatttaaaattatttgctaggctacatttttcttagaaaaatgcatatctgaaacagaatattgatttttttcctgggtcatacataaagaccatcagaaattaattattgaaaaaacactgctatactcattagagatatattttaattagattaattttgcattaacagtccatgagaagttacaactaacttgcaacgagacattaacatgcatcatgtttgatataagtaaaaatggaaatgattagaagtatacaaatataaagtatgttgctagtatatgcaagcttaaaaaacttttacctgatagaattagcaagagcagctatgttgagcttctttcagttaaaagtcattttcggctatgtctccctaaggatagaaatatcactgcttttgatctcatttagaattctgctcacttttaggaaagtagggctgtttggaaatggtcagccatatccttactgaatttcctagggcttgactgcacctactctagttaacaagtaagatatagttatatattgtattataacttctcaaagcacttatattttgattttccttcttttatgttcattatcttcatttggactactccatgtgacaaaagcagttatttttcttctaccccctaaactggaccacatcgatgctcttaggtccaaatcatattctttaagaaacaagtgttcactgaatgatttactgcattatataataggtactatacaagacacctgaggccccccacaccgtgaaaacagatgtttcttcctggagcttgcccaataggagagaaatttttaatttaccctttctcagtaaaccattatacaaaacagaagtgaaattatggacccagtgaactcaatctggctgacttgcaacccctatgtgttcataaacccactgaaatatataatttgttgtttatattaaatatgcactgaagcatgattagataaacattgaaagtaaattttaattttaaccatcagtggaagtatatggggtgatttaagtcattcatattagtttatttttatcaggtgttcctccttgtccatagtgaaatacaatacagagattatagcctgtggcttgacaggacatcttatagttggtaacaggactacattaaaaggaaaaaacaataaataaggatgtctaattatacagataaagaaagcaagttcactcactcctccaggacagcaccagagacaacgttagaaccaagagtttcaaaacctcgccttgtatggtttgcctgatgccatgattaaagaaaagggggtggggaactaagagaggaagccaaagagaaagaattcagtaccaaacagcaatattcagatgttttattaaataataggaggtgttttgaccttgctggtgaacagaggtgatctcaaaacatttgacagatataattaaggccataaggcaataattgcaaaagtcaaggagcccttgccacctccaaagcatcacgtgtggatgcaggaaccatattaacaacatgggtagtcaaggagaaagcagatagaataaagctgtacccagcaatataaagggacatgcaagtgtgtgttgtgcttaagagtaaacttagggaaaaaagctccccataacctcgagaaacgtttctggatctgagatatccattagcacatttagaaggtacctatttccattattgtgaaggagttgtaaatgaaataaacaactttaaataatacctcccttggtcaaactgcattaagtattccctgatggaattcattcatcatcattcaaacagaatggtttgcaactcaacctgcctagtgtggggtctggaattcccaccacagtcactgtgccttaagcactgttgcagcagaaggacttgaagtaacacatgaatatataatgccaatttgcatgtcagcatggattgttgaaattgaagttagttaattgtcacattgtaacaggaaaagaatccaagttttggagctggttggaactgagttttcatcttctttctctgctacttaactgtgttatcctgaacaagatactcaacctccatgagacacagtgaccatgtgaaatatatatgtaaaatgtctggcaaacatctgattcatgtaggtacccaaaattagatcattttcattttcttttgcttccttggaagttcaaaacaaaattctgaggtaagtttcaattaaaatgggtcaggcagacagattccagcaaggtcaaagcatccttttttctttaataaaatatctgaatatctgaacaagaaacaacttctgtttctcaaggttgaaatgatgaattattgaacttctgttgctgtttgttttctctcttatctccttactactacatataaatgagatatcttgctatcccactgatatctcaaattcagtatttcccaaataaaacgtaatcttt

SEQ ID NO: 2306 - protein, 107 aa, Homo sapiens
MNVAFIYCKIKDGDGQGVTASLFLALIIFLDIKSHHLFPTKKERQDHQTLQGSQEEEGKEPRNGEKLDSRDGSGDAPQSAAVENAEEELASGTFPLRSMAGGMSNIH

SEQ ID NO: 2307 - DNA, 576 bp, Homo sapiens
gcaacaagaagctagggcagaggatttagagggcaagcaagcatgggccaggactttgacagcattcatccagcagcatgcgaactccaaagagaacccgatctccaaagacaaaagtgagcctgaggggagaaaccttgactctccagttgaccactgtgtctctcgacacacggcatatggtgaaacggtgtgatgagaggcatggaaggccattacctcattcacaggaatctcagcatggctctgcaacttcaaagaaggcagttcggggaacagcagacacagctcctttggaaagaatatctgccgcccgaggatgggctctgcctatggaggcaacagtgagtgtcttcagagcccatcagtggcagtggaattaatgaagaaagcaatggcaggaaaagttgaataaagcagacccttcatggtaaatctggttggtaaattgcctgtgaccacatgtgggacaatcactggaggaaccccagttacatttggtcagagtgtggcgaggggaaccttctcaggaaagaaaatagaggtcctgttttaggaaaaaaaataaagatcaga

SEQ ID NO: 2308 - protein, 101 aa, Homo sapiens
MRTPKRTRSPKTKVSLRGETLTLQLTTVSLDTRHMVKRCDERHGRPLPHSQESQHGSATSKKAVRGTADTAPLERISAARGWALPMEATVSVFRAHQWQWN

SEQ ID NO: 2309 - DNA, 3773 bp, Homo sapiens
ggcttttgcactagcagtagcaaggaaggggggtgggcgctctttctttttctcttagaagagggtttagcacaggttttttcgttctcacttccacaccaccttaccgcctcccgaccccccctctccccctccccacctatcgtcatgacggcctctccggattacttggtggtgctttttgggatcactgctggggccaccggggccaagctaggctcggatgagaaggagttgatcctgctgttctggaaagtcgtggatctggccaacaagaaggtgggacagttgcacgaagtgctagttagaccggatcagttggaactgacggaggactgcaaagaagaaactaaaatagacgtcgaaagcctgtcctcggcgtcgcagctggaccaagccctccgacagtttaaccagtcagtgagcaatgaactgaatattggagtagggacttccttctgtctctgtactgatgggcagcttcatgtcaggcaaatcctgcatcctgaggcttccaagaagaatgtactattacctgaatgcttctattccttttttgatcttcgaaaagaattcaagaaatgttgccctggttcacctgatattgacaaactggacgttgccacaatgacagagtatttaaattttgagaagagtagttcagtctctcgatatggagcctctcaagttgaagatatggggaatataattttagcaatgatttcagagccttataatcacaggttttcagatccagagagagtgaattacaagtttgaaagtggaacttgcagcaagatggaacttattgatgataacaccgtagtcagggcacgaggtttaccatggcagtcttcagatcaagatattgcaagattcttcaaaggactcaatattgccaagggaggtgcagcactttgtctgaatgctcagggtcgaaggaacggagaagctctggttaggtttgtaagtgaggagcaccgagacctagcactacagaggcacaaacatcacatggggacccggtatattgaggtttacaaagcaacaggtgaagatttccttaaaattgctggtggtacttccaatgaggtagcccagtttctctccaaggaaaatcaagtcattgtccgcatgcgggggctccctttcacggccacagctgaagaagtggtggccttctttggacagcattgccctattactgggggaaaggaaggcatcctctttgtcacctacccagatggtaggccaacaggggacgcttttgtcctctttgcctgtgaggaatatgcacagaatgcgttgaggaagcataaagacttgttgggtaaaagatacattgaactcttcaggagcacagcagctgaagttcagcaggtgctgaatcgattctcctcggcccctctcattccacttccaacccctcccattattccagtactacctcagcaatttgtgccccctacaaatgttagagactgtatacgccttcgaggtcttccctatgcagccacaattgaggacatcctggatttcctgggggagttcgccacagatattcgtactcatggggttcacatggttttgaatcaccaaggccgcccatcaggagatgcctttatccagatgaagtctgcggacagagcatttatggctgcacagaagtgtcataaaaaaaacatgaaggacagatatgttgaagtctttcagtgttcagctgaggagatgaactttgtgttaatggggggcactttaaatcgaaatggcttatccccaccgccatgcctgtctcctccctcctacacatttccagctcctgctgcagttattcctacagaagctgccatttaccagccctctgtgattttgaatccacgagcactgcagccctccacagcgtactacccagcaggcactcagctcttcatgaactacacagcgtactatcccagccccccaggttcgcctaatagtcttggctacttccctacagctgctaatcttagcggtgtccctccacagcctggcacggtggtcagaatgcagggcctggcctacaatactggagttaaggaaattcttaacttctcccaaggttaccagtatgcaaccgaggatggacttatacacacaaatgaccaggccaggactctacccaaagaatgggtttgtatttaagggccccagcagttagaacatcctcagaaaagaagtgtttgaaagatgtatggtgatcttgaaacctccagacacaagaaaacttctagcaaattcaggggaagtttgtctacactcaggctgcagtatattcagcaaacttgattggacaaacgggcctgtgccttatcttttggtggagtgaaaaaatttgagccagtgaagccaaatcgtaacttacagcaagcagcatgcagcatacctggctctttgctgattgcaaataggcatttaaaatgtgaatttggaatcagatgtctccattacttccagttaaagtggcatcataggcgtttcctaagttttaagtcttggataaaaactccaccagtgtctaccatctccaccatgaactctgttaaggaagcttcattttcgtatattcccgctcttttctcttcatttccctgtcttctgcataatcatgccttcttgctaagtaattcaagcataagatcttggaataataaaatcacaatcttaggagaaagaataaaattgttattttcccagtctcttggccatgatgatatcttatgattaaaaacaaattaaattttaaaacacctgaagatatattagaagaaattgtgcaccctccacaaaacatacaaagtttaaaagtttggatctttttctcagcaggtatcagttgtaaataatgaattaggggccaaaatgcaaaacgaaaaatgaagcagctacatgtagttagtaatttctagtttgaactgtaattgaatattgtggcttcatatgtattattttatattgtacttttttcattattgatggtttggactttaataagagaaattccatagtttttaatatcccagaagtgagacaatttgaacagtgtattctagaaaacaatacactaactgaacagaagtgaatgcttatatatattatgatagccttaaacctttttcctctaatgccttaactgtcaaataattataaccttttaaagcataggactatagtcagcatgctagactgagaggtaaacactgatgcaattagaacaggtactgatgctgtcagtgtttaacactatgtttagctgtgtttatgctataaaagtgcaatattagacactagctagtactgctgcctcatgtaactccaaagaaaacaggatttcattaagtgcattgaatgtggctatttctctaagttactcatattgtcctttgcttgaatgcaatgccgtgcagatttatgtggctgctatttttattttctgtgcattactttaacaccttaaagggagaagcaaacatttccttcttcagctgactggcaatggccctttaactgcaataggaagaaaaaaaaaaaaggtttgtgtgaaaattggtgataactggcacttaagatcgaaaagaaatttctgtatacttgatgccttaagatgcccaaagctgcccaaagctctgaaagactttaagataggcagtaatgcttactacaatactactgagtttttgtagagttaacatttgataataaaacttgcctgtttaatctcaaaaaaaaaaaaaaaa

SEQ ID NO: 2310 - protein, 677 aa, Homo sapiens
MTASPDYLVVLFGITAGATGAKLGSDEKELILLFWKVVDLANKKVGQLHEVLVRPDQLELTEDCKEETKIDVESLSSASQLDQALRQFNQSVSNELNIGVGTSFCLCTDGQLHVRQILHPEASKKNVLLPECFYSFFDLRKEFKKCCPGSPDIDKLDVATMTEYLNFEKSSSVSRYGASQVEDMGNIILAMISEPYNHRFSDPERVNYKFESGTCSKMELIDDNTVVRARGLPWQSSDQDIARFFKGLNIAKGGAALCLNAQGRRNGEALVRFVSEEHRDLALQRHKHHMGTRYIEVYKATGEDFLKIAGGTSNEVAQFLSKENQVIVRMRGLPFTATAEEVVAFFGQHCPITGGKEGILFVTYPDGRPTGDAFVLFACEEYAQNALRKHKDLLGKRYIELFRSTAAEVQQVLNRFSSAPLIPLPTPPIIPVLPQQFVPPTNVRDCIRLRGLPYAATIEDILDFLGEFATDIRTHGVHMVLNHQGRPSGDAFIQMKSADRAFMAAQKCHKKNMKDRYVEVFQCSAEEMNFVLMGGTLNRNGLSPPPCLSPPSYTFPAPAAVIPTEAAIYQPSVILNPRALQPSTAYYPAGTQLFMNYTAYYPSPPGSPNSLGYFPTAANLSGVPPQPGTVVRMQGLAYNTGVKEILNFSQGYQYATEDGLIHTNDQARTLPKEWVCI

SEQ ID NO: 2311 - DNA, 2751 bp, Homo sapiens
ttcggcacgaggaggaaggggggtgggcgctctttctttttctcttagaagagggtttagcacaggttttttcgttctcacttccacaccaccttaccgcctcccgaccccccctctccccctccccacctatcgtcatgacggcctctccggattacttggtggtgctttttgggatcactgctggggccaccggggccaagctaggctcggatgagaaggagttgatcctgctgttctggaaagtcgtggatctggccaacaagaaggtgggacagttgcacgaagtgctagttagaccggatcagttggaactgacggaggactgcaaagaagaaactaaaatagacgtcgaaagcctgtcctcggcgtcgcagctggaccaagccctccgacagtttaaccagtcagtgagcaatgaactgaatattggagtagggacttccttctgtctctgtactgatgggcagcttcatgtcaggcaaatcctgcatcctgaggcttccaagaagaatgtactattacctgaatgcttctattccttttttgatcttcgaaaagaattcaagaaatgttgccctggttcacctgatattgacaaactggacgttgccacaatgacagagtatttaaattttgagaagagtagttcagtctctcgatatggagcctctcaagttgaagatatggggaatataattttagcaatgatttcagagccttataatcacaggttttcagatccagagagagtgaattacaagtttgaaagtggaacttgcagcaagatggaacttattgatgataacaccgtagtcagggcacgaggtttaccatggcagtcttcagatcaagatattgcaagattcttcaaaggactcaatattgccaagggaggtgcagcactttgtctgaatgctcagggtcgaaggaacggagaagctctggttaggtttgtaagtgaggagcaccgagacctagcactacagaggcacaaacatcacatggggacccggtatattgaggtttacaaagcaacaggtgaagatttccttaaaattgctggtggtacttccaatgaggtagcccagtttctctccaaggaaaatcaagtcattgttcgcatgcgggggctccctttcacggccacagctgaagaagtggtggccttctttggacagcattgccctattactgggggaaaggaaggcatcctctttgtcacctacccagatggtaggccaacaggggacgcttttgtcctctttgcctgtgaggaatatgcacagaatgcgttgaggaagcataaagacttgttgggtaaaagatacattgaactcttcaggagcacagcagctgaagttcagcaggtgctgaatcgattctcctcggcccctctcattccacttccaacccctcccattattccagtactacctcagcaatttgtgccccctacaaatgttagagactgtatacgccttcgaggtcttccctatgcagccacaattgaggacatcctggatttcctgggggagttcgccacagatattcgtactcatggggttcacatggttttgaatcaccagggccgcccatcaggagatgcctttatccagatgaagtctgcggacagagcatttatggctgcacagaagtgtcataaaaaaaacatgaaggacagatatgttgaagtctttcagtgttcagctgaggagatgaactttgtgttaatggggggcactttaaatcgaaatggcttatccccaccgccatgtaagttaccatgcctgtctcctccctcctacacatttccagctcctgctgcagttattcctacagaagctgccatttaccagccctctgtgattttgaatccacgagcactgcagccctccacagcgtactacccagcaggcactcagctcttcatgaactacacagcgtactatcccagccccccaggttcgcctaatagtcttggctacttccctacagctgctaatcttagcggtgtccctccacagcctggcacggtggtcagaatgcagggcctggcctacaatactggagttaaggaaattcttaacttcttccaaggttaccagtatgcaaccgaggatggacttatacacacaaatgaccaggccaggactctacccaaagaatgggtttgtatttaagggccccagcagttagaacatcctcagaaaagaagtgtttgaaagatgtatggtgatcttgaaacctccagacacaagaaaacttctagcaaattcaggggaagtttgtctacactcaggctgcagtattttcagcaaacttgattggacaaacgggcctgtgccttatcttttggtggagtgaaaaaatttgagctagtgaagccaaatcgtaacttacagcaagcagcatgcagcatacctggctctttgctgattgcaaataggcatttaaaatgtgaatttggaatcagatgtctccattacttccagttaaagtggcatcataggtgtttcctaagttttaagtcttggataaaaactccaccagtgtctaccatctccaccatgaactctgttaaggaagcttcatttttgtatattcccgctcttttctcttcatttccctgtcttctgcataatcatgccttcttgctaagtaattcaagcataagatcttggaataataaaatcacaatcttaggagaaagaataaaattgttattttcccaaaaaaaaaaaaaaaaaa

SEQ ID NO: 2312 - protein, 681 aa, Homo sapiens
MTASPDYLVVLFGITAGATGAKLGSDEKELILLFWKVVDLANKKVGQLHEVLVRPDQLELTEDCKEETKIDVESLSSASQLDQALRQFNQSVSNELNIGVGTSFCLCTDGQLHVRQILHPEASKKNVLLPECFYSFFDLRKEFKKCCPGSPDIDKLDVATMTEYLNFEKSSSVSRYGASQVEDMGNIILAMISEPYNHRFSDPERVNYKFESGTCSKMELIDDNTVVRARGLPWQSSDQDIARFFKGLNIAKGGAALCLNAQGRRNGEALVRFVSEEHRDLALQRHKHHMGTRYIEVYKATGEDFLKIAGGTSNEVAQFLSKENQVIVRMRGLPFTATAEEVVAFFGQHCPITGGKEGILFVTYPDGRPTGDAFVLFACEEYAQNALRKHKDLLGKRYIELFRSTAAEVQQVLNRFSSAPLIPLPTPPIIPVLPQQFVPPTNVRDCIRLRGLPYAATIEDILDFLGEFATDIRTHGVHMVLNHQGRPSGDAFIQMKSADRAFMAAQKCHKKNMKDRYVEVFQCSAEEMNFVLMGGTLNRNGLSPPPCKLPCLSPPSYTFPAPAAVIPTEAAIYQPSVILNPRALQPSTAYYPAGTQLFMNYTAYYPSPPGSPNSLGYFPTAANLSGVPPQPGTVVRMQGLAYNTGVKEILNFFQGYQYATEDGLIHTNDQARTLPKEWVCI

SEQ ID NO: 2313 - DNA, 4204 bp, Homo sapiens
ggggttcggcgacgcggagggagggagagtctgggccgcgcgggagccgcagggcgccctagccttcgcagaaacgatggcggacgaagaaggaccacctgtagagctgcgccaaagaaaaaagccaaagtcttcagaaaataaggaatctgccaaagaagagaaaatcagtgacattccaattcctgaaagagctccaaaacatgtattatttcaacgctttgcaaagattttcattggctgtcttgcagcggttactagtggtatgatgtatgctctctacttatcagcataccatgaacggaaattctggttttccaacaggcaggagcttgaacgggaaatcacgtttcagggtgacagtgccatttattactcctattataaagatatgttaaaggcaccttcatttgaaagaggtgtttacgaactgacacacaataacaaaactgtatctctgaagactataaatgcagtgcagcaaatgtctctgtatccggaacttattgctagcattttatatcaagccactggtagcaatgagattattgagccagtgtatttctatattggcattgtttttggattgcaaggaatatatgttactgctttatttgttacaagttggcttatgagtggaacatggctagcaggaatgcttactgttgcgtggttcgttattaacagggtagatacaacaagaattgaatactccattcctttaagagaaaactgggcactaccatattttgcatgccaaattgctgcacttacaggctatttaaaaagcaacttaaatacttatggagagaggttttgctacttgttgatgagtgcttcaacttacacatttatgatgatgtgggagtatagccactatctcctgtttcttcaagcaatatctctattcctgctagataccttttcagtggagcaaagtgacaaggtttatgaagtttataaaatctacatattttccctctttctgggatatttactacagtttgagaatccagctttgttggtatctcctttattaagtttagtagcagccttaatgcttgctaagtgccttcagctgaatgtgaagaaaggaagttttgtagctaaaataataaaagtgattaatttttacttggtgtgtactctgacaataacattgaatattataatgaagatgtttgtcccacacaaagaaaatgggcacatgctgaaattccttgaagtaaaatttggactaaatatgaccaagaattttacaatgaattggctcctctgtcaagaatccctgcaggcaccatctcaagatttttttctgcgattgacacagtcttctttattacctttctacattctagtgttaattatttgttttctttctatgttgcaagttatttttaggaggattaatggtaagtccctgaaggaaactgttactcttgaagatggacgaattggagaaagaccagaaataatttatcatgtaattcacactattttattgggttctcttgcaatggttatagaaggcttgaagtacatctggattccttatgtgtgcatgttagcagcatttggtgtatgttctcccgaactttggatgacacttttcaagtggcttcgattaagaactgtacacccaatattgttggctcttattctgagcatggccgtgcctactataataggtctcagcttatggaaagagttttttcccagattaatgacagaattaatggaactacaggaattctatgacccagatacagtggaacttatgacctggataaaaaggcaagctccagttgcagctgtgtttgcagggagtccacagttaatgggtgcgattaaattatgcactggatggatggtgacaagtttgcctctttacaatgatgatgatcttctcaagagaaatgaaaatatctaccaaatctattcaaagcgatctgctgaggatatttataaaatactgacatcttacaaagctaattacctaattgtagaggatgctatctgcaatgaggtgggacccatgagaggctgtagggttaaagatttattagacattgcaaatggccacatggtttgtgaagaaggtgacaagctaacctactcaaaatatgggcgattttgtcatgaggtcaaaattaactattctccatatgtgaattatttcactagagtatactggaacagatcctactttgtatataaaatcaacactgtgatatccttccagtcttgaaaaataacagagccttcatttcaaagactacctgaagtaaaatgcagttttcttctacctactcggtgtcttttgcagatcagagtatggacatttgaaatattgctgcttctttcccccttctgctgttaactggatccagagttctgtgggaaatagaagatcaagcattactgtcctttgattaaatgtgatatctaccactctgcaatattccagacaggtgtcttccttaccgttacatggtctttaacacttttactgattgcaatattttccccataaaatcttcattctattataatattgatcttgaatttgaatatgtgcaaggtcagatacatttctcaaacataacatttaataaataatgtgatataattatttaatagaaagaataattccgaccttcaagcaagtttctgaaggtattttatgatgtataacaactgaagttttacaataaaaactaatttaaatgttagctgaagatatgtggcatttaaattaaaatggaaattatataaaggaaagtgatttttaaggatatacataaagatatatttagaattttcatgatactgttctcctcatctactgcttatgttaagtgagaactttcttagtaatacataatgcatgatgttactgcattttctaaatgactagtaagtgattagttttttcacttatgcctattaatttgataccaatttaatcatgataaaacaataaccgttaacatatattttgttaaatggacatttaaaagaatgttgttcaggttttttttttttaaatactgatatggggcatacaatctattcacatgttttctactgaagtactaagtaaaaaaattaaatcattatcagaataaaaatatgtgttctaaaattagcaacaatttctggggatacatgcagatgttgttaaacgtacctctgcatacagatatattataaaacacaagcaatgttatttatgaaactgtgatgcagtcttcaacatcaagaaaaaatgacaactataataaaatttacaacacagtttcacagtctaaatgctatgttcctttaagtattttcatatttttaatcatttattaagagaaaattgtgaaaagttaatttggccttatagagagattcaggatagatgtagcctatagatgtgtcattttaataagttgggatacgtgtttagtttttccttatattcctgttcagtgaacagattttcataattctcacttgttaaagtgctgcaaaaattgcattttcagtactctaaattactacattagaagagagcatttctccattgtctttattttctgttatatatgtgttgtaaaagtacactacattagaagggagcttttccgttgtctttattttctgttatacatgtgttgttaaagtacatgcattcttagactaactctcagatgctttgctcttttggagctgaagaattgtttgatggtgatgtcatatatctgatagattagtttcagtggttctcatttcacttttatacgtaatttcttaactatattaagatagttgcaggcagtgtacctcaggttgactctgtacatctgaatagtgagtcactagtattttgcttcaagccttctgaaaatataaccatagttacctaagcacacagtgaatagtcacatggtagtacttgtgattagagcatgtaaaacaatgtaattgaaaagtcagcttccatattttgtaggggaaatagaacaccctactttttatctagtgtgaaatatttaatcgaatttttgttgatttatattatgttacctgtgctgaattaggtttggtacttgtgttttgtttgacatattagtaagttgcttttgcttctttctgtcaacttattttttaaataaaattgatctggaaaaattaaaaaaaaaagaaaaaaaaaaaa

SEQ ID NO: 2314 - protein, 723 aa, Homo sapiens
MADEEGPPVELRQRKKPKSSENKESAKEEKISDIPIPERAPKHVLFQRFAKIFIGCLAAVTSGMMYALYLSAYHERKFWFSNRQELEREITFQGDSAIYYSYYKDMLKAPSFERGVYELTHNNKTVSLKTINAVQQMSLYPELIASILYQATGSNEIIEPVYFYIGIVFGLQGIYVTALFVTSWLMSGTWLAGMLTVAWFVINRVDTTRIEYSIPLRENWALPYFACQIAALTGYLKSNLNTYGERFCYLLMSASTYTFMMMWEYSHYLLFLQAISLFLLDTFSVEQSDKVYEVYKIYIFSLFLGYLLQFENPALLVSPLLSLVAALMLAKCLQLNVKKGSFVAKIIKVINFYLVCTLTITLNIIMKMFVPHKENGHMLKFLEVKFGLNMTKNFTMNWLLCQESLQAPSQDFFLRLTQSSLLPFYILVLIICFLSMLQVIFRRINGKSLKETVTLEDGRIGERPEIIYHVIHTILLGSLAMVIEGLKYIWIPYVCMLAAFGVCSPELWMTLFKWLRLRTVHPILLALILSMAVPTIIGLSLWKEFFPRLMTELMELQEFYDPDTVELMTWIKRQAPVAAVFAGSPQLMGAIKLCTGWMVTSLPLYNDDDLLKRNENIYQIYSKRSAEDIYKILTSYKANYLIVEDAICNEVGPMRGCRVKDLLDIANGHMVCEEGDKLTYSKYGRFCHEVKINYSPYVNYFTRVYWNRSYFVYKINTVISFQS

SEQ ID NO: 2315 - DNA, 3393 bp, Homo sapiens
gtttccgggacgttcggagggtggcctctctcccaccgggttccgcataccccaggcaccggcccgcatccaagtgtcaggttggagccgggaagcggccctggtggtagcggcggcgggggcaggatgagcgcggaggcggcggaccgggaggcggccacctccagccggccctgcaccccgccgcagacctgctggtttgagtttctgctggaggagtcactgttggagaaacatctgcgcaagccctgcccggatcctgcaccagttcaacttatagttcagtttttggaacaggcttccaaaccttcagttaatgaacaaaaccaagttcaacctccgcctgataacaagagaaatcgtattttaaaactacttgctcttaaagttgctgcacatttgaagtgggacttagacatattagagaaaagtttgtctgttccagtattgaatatgctactaaatgaactactctgcatcagtaaagttcctcctgggacaaagcatgtagacatggatctggccactttacctccgaccactgccatggctgtacttctctataatagatgggcaattaggacaattgttcaaagtagttttccagtcaaacaggcaaaacccggaccccctcagttaagtgttatgaatcaaatgcaacaggaaaaagagctaacagaaaacattttgaaagtgctcaaagaacaagctgctgattctattttggtactagaagcagccctaaaattaaacaaggatctttatgtccatacgatgagaactctagatttattggccatggaaccaggcatggtaaatggagaaactgagagttctactgctggattgaaagtcaaaaccgaagaaatgcagtgccaggtgtgctatgatttgggcgcagcatacttccagcaaggctccacaaattcagctgtctatgaaaatgccagggaaaaattttttagaaccaaagaactaattgcagagataggttcattatctcttcattgtaccatagatgagaagcggttagctggctattgtcaagcatgtgatgttcttgtaccttcttctgatagtacatctcaacagttgactccatatagtcaagtccatatttgtttgagatctggcaactatcaggaggtaatacagattttcattgaagacaacttaaccttgagtttacctgtccagttccgacagtcagtcctaagagaactctttaagaaagctcaacagggaaatgaagctctagatgaaatctgttttaaagtttgtgcctgtaatacagtccgtgatatactggaaggcagaacaattagtgttcaatttaaccagctatttcttagaccaaataaagagaaaatagactttcttcttgaggtatgttcaagatcagtaaatttagaaaaagcttcagagtctttgaaaggaaacatggctgcttttctaaagaatgtgtgtctggggttggaagatctgcagtatgttttcatgatttcttcacatgagcttttcattacattgttgaaagatgaagaacgaaagctacttgttgatcagatgaggaagagatcccctagagtaaatctgtgcattaaacctgtaacttcattttatgatatcccagcttcagcaagtgtcaacattggtcagttagagcatcaacttatattgtcagtggatccttggaggattagacaaattttaattgaattacatggtatgacttcagagcgccagttctggacagtgtctaataagtgggaagtaccttctgtctatagtggtgttatcctgggaattaaagacaatttaacaagagatttggtttatattcttatggccaaaggtttgcactgcagtactgttaaggacttttcccatgctaaacagctctttgctgcttgtttggagttggtaacagagttctcaccgaagcttcgtcaggtcatgctgaatgagatgttgcttttggatattcatacacacgaagctgggacagggcaggcaggagagagaccgccatccgaccttataagtagagtacgaggctatctggaaatgaggcttcctgatattcctcttcgtcaagttatagctgaggaatgtgttgcctttatgttaaactggagagaaaatgaataccttacactccaagttcctgcatttttgcttcagagtaatccatatgtaaagcttggacagcttttagcagctacatgcaaagaacttccaggccctaaagaaagcagacggactgccaaagacctttgggaagttgttgttcaaatctgtagtgtgtccagtcagcacaaacgaggaaatgatggcagagttagtttaataaaacagagggaatctacgttaggtatcatgtatcggagtgaactgctttcttttatcaaaaaattacgagaaccactcgttttgactattattttatcactctttgtgaaacttcacaatgttcgggaggacattgtgaatgatattacagctgaacacatttctatttggccatcttccattcccaacctccagtctgtggactttgaagctgtggcaatcacagtgaaagagctagttcgatatacactcagtataaatccaaataaccattcttggttaattatccaggcagatatttactttgcaacgaatcagtattcagcagctcttcactattacctccaggcaggagctgtgtgttctgacttctttaacaaggctgtgccccctgatgtttatacagaccaggtaataaaacgaatgataaaatgttgttctttgctgaattgccacacacaggtggctattttatgtcagttcctcagagaaattgactacaaaacagcgtttaaatctctgcaagaacaaaacagtcatgatgctatggactcctactacgactacatatgggatgttaccattttggaatacttgacttatcttcatcataaaagaggagaaacagataaaagacaaattgcaatcaaagccatcggccagacagagttgaatgcaagcaatccagaagaagtgttacagctggcagcgcagagaaggaaaaaaaagtttctccaagcaatggcaaaactttacttttaagcagttaaatttttttaacttttattttttaaacaatgggctaaaaataaacagtattaaaaggttaagtttatataatacatatgtacacaattagtggtgttttcttttcagacaaaatactgaaacaaatattagtttaaaaacaaactatacagaagacttcataccgtaacaataaatgtatagtttcttcaaagggagaagagattcacatatctgataacaaaataaactagcaatctagttttctaatctaaaaaaaaaaaaaaaaaaaaa

SEQ ID NO: 2316 - protein, 995 aa, Homo sapiens
MSAEAADREAATSSRPCTPPQTCWFEFLLEESLLEKHLRKPCPDPAPVQLIVQFLEQASKPSVNEQNQVQPPPDNKRNRILKLLALKVAAHLKWDLDILEKSLSVPVLNMLLNELLCISKVPPGTKHVDMDLATLPPTTAMAVLLYNRWAIRTIVQSSFPVKQAKPGPPQLSVMNQMQQEKELTENILKVLKEQAADSILVLEAALKLNKDLYVHTMRTLDLLAMEPGMVNGETESSTAGLKVKTEEMQCQVCYDLGAAYFQQGSTNSAVYENAREKFFRTKELIAEIGSLSLHCTIDEKRLAGYCQACDVLVPSSDSTSQQLTPYSQVHICLRSGNYQEVIQIFIEDNLTLSLPVQFRQSVLRELFKKAQQGNEALDEICFKVCACNTVRDILEGRTISVQFNQLFLRPNKEKIDFLLEVCSRSVNLEKASESLKGNMAAFLKNVCLGLEDLQYVFMISSHELFITLLKDEERKLLVDQMRKRSPRVNLCIKPVTSFYDIPASASVNIGQLEHQLILSVDPWRIRQILIELHGMTSERQFWTVSNKWEVPSVYSGVILGIKDNLTRDLVYILMAKGLHCSTVKDFSHAKQLFAACLELVTEFSPKLRQVMLNEMLLLDIHTHEAGTGQAGERPPSDLISRVRGYLEMRLPDIPLRQVIAEECVAFMLNWRENEYLTLQVPAFLLQSNPYVKLGQLLAATCKELPGPKESRRTAKDLWEVVVQICSVSSQHKRGNDGRVSLIKQRESTLGIMYRSELLSFIKKLREPLVLTIILSLFVKLHNVREDIVNDITAEHISIWPSSIPNLQSVDFEAVAITVKELVRYTLSINPNNHSWLIIQADIYFATNQYSAALHYYLQAGAVCSDFFNKAVPPDVYTDQVIKRMIKCCSLLNCHTQVAILCQFLREIDYKTAFKSLQEQNSHDAMDSYYDYIWDVTILEYLTYLHHKRGETDKRQIAIKAIGQTELNASNPEEVLQLAAQRRKKKFLQAMAKLYF

SEQ ID NO: 2317 - DNA, 2613 bp, Homo sapiens
agcgggtgcggggcgggaccggcccggcctatatattgggttggcgccggcgccagctgagccgagcggtagctggtctggcgaggttttatacacctgaaagaagagaatgtcaagacgaagtagccgtttacaagctaagcagcagccccagcccagccagacggaatccccccaagaagcccagataatccaggccaagaagaggaaaactacccaggatgtcaaaaaaagaagagaggaggtcaccaagaaacatcagtatgaaattaggaattgttggccacctgtattatctggggggatcagtccttgcattatcattgaaacacctcacaaagaaataggaacaagtgatttctccagatttacaaattacagatttaaaaatctttttattaatccttcacctttgcctgatttaagctggggatgttcaaaagaagtctggctaaacatgttaaaaaaggagagcagatatgttcatgacaaacattttgaagttctgcattctgacttggaaccacagatgaggtccatacttctagactggcttttagaggtatgtgaagtatacacacttcatagggaaacattttatcttgcttacgtcactgatggtgcttgcagtgaagaggatatcttaaggatggaactcattatattaaaggctttaaaatgggaactttgtcctgtaacaatcatctcctggctaaatctctttctccaagttgatgctcttaaagatgctcctaaagttcttctacctcagtattctcaggaaacattcattcaaatagctcagcttttagatctgtgtattctagccattgattcattagagttccagtacagaatactgactgctgctgccttgtgccattttacctccattgaagtggttaagaaagcctcaggtttggagtgggacagtatttcagaatgtgtagattggatggtaccttttgtcaatgtagtaaaaagtactagtccagtgaagctgaagacttttaagaagattcctatggaagacagacataatatccagacacatacaaactatttggctatgctggaggaagtaaattacataaacaccttcagaaaagggggacagttgtcaccagtgtgcaatggaggcattatgacaccaccgaagagcactgaaaaaccaccaggaaaacactaaagaagataactaagcaaacaagttggaattcaccaagattgggtagaactggtatcactgaactactaaagttttacagaaagtagtgctgtgattgattgccctagccaattcacaagttacactgccattctgattttaaaacttacaattggcactaaagaatacatttaattatttcctatgttagctgttaaagaaacagcaggacttgtttacaaagatgtcttcattcccaaggttactggatagaagccaaccacagtctataccatagcaatgtttttcctttaatccagtgttactgtgtttatcttgataaactaggaattttgtcactggagttttggactggataagtgctaccttaaagggtatactaagtgatacagtactttgaatctagttgttagattctcaaaattcctacactcttgactagtgcaatttggttcttgaaaattaaatttaaacttgtttacaaaggtttagttttgtaataaggtgactaatttatctatagctgctatagcaagctattataaaacttgaatttctacaaatggtgaaatttaatgttttttaaactagtttatttgccttgccataacacattttttaactaataaggcttagatgaacatggtgttcaacctgtgctctaaacagtgggagtaccaaagaaattataaacaagataaatgctgtggctccttcctaactggggctttcttgacatgtaggttgcttggtaataacctttttgtatatcacaatttgggtgaaaaacttaagtaccctttcaaactatttatatgaggaagtcactttactactctaagatatccctaaggaatttttttttttaatttagtgtgactaaggctttatttatgtttgtgaaactgttaaggtcctttctaaattcctccattgtgagataaggacagtgtcaaagtgataaagcttaacacttgacctaaacttctattttcttaaggaagaagagtattaaatatatactgactcctagaaatctatttattaaaaaaagacatgaaaacttgctgtacataggctagctatttctaaatattttaaattagcttttctaaaaaaaaaatccagcctcataaagtagattagaaaactagattgctagtttattttgttatcagatatgtgaatctcttctccctttgaagaaactatacatttattgttacggtatgaagtcttctgtatagtttgtttttaaactaatatttgtttcagtattttgtctgaaaagaaaacaccactaattgtgtacatatgtattatataaacttaaccttttaatactgtttatttttagcccattgtttaaaaaataaaagttaaaaaaatttaactgcttaaaagtaaaaaaaaaaaaaaaaaaa

SEQ ID NO: 2318 - protein, 359 aa, Homo sapiens
MSRRSSRLQAKQQPQPSQTESPQEAQIIQAKKRKTTQDVKKRREEVTKKHQYEIRNCWPPVLSGGISPCIIIETPHKEIGTSDFSRFTNYRFKNLFINPSPLPDLSWGCSKEVWLNMLKKESRYVHDKHFEVLHSDLEPQMRSILLDWLLEVCEVYTLHRETFYLAYVTDGACSEEDILRMELIILKALKWELCPVTIISWLNLFLQVDALKDAPKVLLPQYSQETFIQIAQLLDLCILAIDSLEFQYRILTAAALCHFTSIEVVKKASGLEWDSISECVDWMVPFVNVVKSTSPVKLKTFKKIPMEDRHNIQTHTNYLAMLEEVNYINTFRKGGQLSPVCNGGIMTPPKSTEKPPGKH

SEQ ID NO: 2319 - DNA, 2748 bp, Homo sapiens
agcgggtgcggggcgggaccggcccggcctatatattgggttggcgccggcgccagctgagccgagcggtagctggtctggcgaggttttatacacctgaaagaagagaatgtcaagacgaagtagccgtttacaagctaagcagcagccccagcccagccagacggaatccccccaagaagcccagataatccaggccaagaagaggaaaactacccaggatgtcaaaaaaagaagagaggaggtcaccaagaaacatcagtatgaaattaggaattgttggccacctgtattatctggggggatcagtccttgcattatcattgaaacacctcacaaagaaataggaacaagtgatttctccagatttacaaattacagatttaaaaatctttttattaatccttcacctttgcctgatttaagctggggatgttcaaaagaagtctggctaaacatgttaaaaaaggagagcagatatgttcatgacaaacattttgaagttctgcattctgacttggaaccacagatgaggtccatacttctagactggcttttagaggtatgtgaagtatacacacttcatagggaaacattttatcttgcacaagacttttttgatagatttatgttgacacaaaaggatataaataaaaatatgcttcaactcattggaattacctcattattcattgcttccaaacttgaggaaatctatgctcctaaactccaagagtttgcttacgtcactgatggtgcttgcagtgaagaggatatcttaaggatggaactcattatattaaaggctttaaaatgggaactttgtcctgtaacaatcatctcctggctaaatctctttctccaagttgatgctcttaaagatgctcctaaagttcttctacctcagtattctcaggaaacattcattcaaatagctcagcttttagatctgtgtattctagccattgattcattagagttccagtacagaatactgactgctgctgccttgtgccattttacctccattgaagtggttaagaaagcctcaggtttggagtgggacagtatttcagaatgtgtagattggatggtaccttttgtcaatgtagtaaaaagtactagtccagtgaagctgaagacttttaagaagattcctatggaagacagacataatatccagacacatacaaactatttggctatgctggaggaagtaaattacataaacaccttcagaaaagggggacagttgtcaccagtgtgcaatggaggcattatgacaccaccgaagagcactgaaaaaccaccaggaaaacactaaagaagataactaagcaaacaagttggaattcaccaagattgggtagaactggtatcactgaactactaaagttttacagaaagtagtgctgtgattgattgccctagccaattcacaagttacactgccattctgattttaaaacttacaattggcactaaagaatacatttaattatttcctatgttagctgttaaagaaacagcaggacttgtttacaaagatgtcttcattcccaaggttactggatagaagccaaccacagtctataccatagcaatgtttttcctttaatccagtgttactgtgtttatcttgataaactaggaattttgtcactggagttttggactggataagtgctaccttaaagggtatactaagtgatacagtactttgaatctagttgttagattctcaaaattcctacactcttgactagtgcaatttggttcttgaaaattaaatttaaacttgtttacaaaggtttagttttgtaataaggtgactaatttatctatagctgctatagcaagctattataaaacttgaatttctacaaatggtgaaatttaatgttttttaaactagtttatttgccttgccataacacattttttaactaataaggcttagatgaacatggtgttcaacctgtgctctaaacagtgggagtaccaaagaaattataaacaagataaatgctgtggctccttcctaactggggctttcttgacatgtaggttgcttggtaataacctttttgtatatcacaatttgggtgaaaaacttaagtaccctttcaaactatttatatgaggaagtcactttactactctaagatatccctaaggaatttttttttttaatttagtgtgactaaggctttatttatgtttgtgaaactgttaaggtcctttctaaattcctccattgtgagataaggacagtgtcaaagtgataaagcttaacacttgacctaaacttctattttcttaaggaagaagagtattaaatatatactgactcctagaaatctatttattaaaaaaagacatgaaaacttgctgtacataggctagctatttctaaatattttaaattagcttttctaaaaaaaaaatccagcctcataaagtagattagaaaactagattgctagtttattttgttatcagatatgtgaatctcttctccctttgaagaaactatacatttattgttacggtatgaagtcttctgtatagtttgtttttaaactaatatttgtttcagtattttgtctgaaaagaaaacaccactaattgtgtacatatgtattatataaacttaaccttttaatactgtttatttttagcccattgtttaaaaaataaaagttaaaaaaatttaactgcttaaaagtaaaaaaaaaaaaaaaaaaa

SEQ ID NO: 2320 - protein, 404 aa, Homo sapiens
MSRRSSRLQAKQQPQPSQTESPQEAQIIQAKKRKTTQDVKKRREEVTKKHQYEIRNCWPPVLSGGISPCIIIETPHKEIGTSDFSRFTNYRFKNLFINPSPLPDLSWGCSKEVWLNMLKKESRYVHDKHFEVLHSDLEPQMRSILLDWLLEVCEVYTLHRETFYLAQDFFDRFMLTQKDINKNMLQLIGITSLFIASKLEEIYAPKLQEFAYVTDGACSEEDILRMELIILKALKWELCPVTIISWLNLFLQVDALKDAPKVLLPQYSQETFIQIAQLLDLCILAIDSLEFQYRILTAAALCHFTSIEVVKKASGLEWDSISECVDWMVPFVNVVKSTSPVKLKTFKKIPMEDRHNIQTHTNYLAMLEEVNYINTFRKGGQLSPVCNGGIMTPPKSTEKPPGKH

SEQ ID NO: 2321 - DNA, 3716 bp, Homo sapiens
cccgaggagccgggccccggccgctgtccagccgctccgtgccccgcgcgtcctgcgccgccgccaccgcctcctggggagacgcagccacttgcccgccatggatactcccagggtcctgctctcggccgtcttcctcatcagttttctgtgggatttgcccggtttccagcaggcttccatctcatcctcctcgtcgtccgccgagctgggttccaccaagggcatgcgaagccgcaaggaaggcaagatgcagcgggcgccgcgcgacagtgacgcgggccgggagggccaggaaccacagccgcggcctcaggacgaaccccgggctcagcagccccgggcgcaggagccgccaggcaggggtccgcgcgtggtgccccacgagtacatgctgtcaatctacaggacttactccatcgctgagaagctgggcatcaatgccagctttttccagtcttccaagtcggctaatacgatcaccagctttgtagacaggggactagacgatctctcgcacactcctctccggagacagaagtatttgtttgatgtgtccatgctctcagacaaagaagagctggtgggcgcggagctgcggctctttcgccaggcgccctcagcgccctgggggccaccagccgggccgctccacgtgcagctcttcccttgcctttcgcccctactgctggacgcgcggaccctggacccgcagggggcgccgccggccggctgggaagtcttcgacgtgtggcagggcctgcgccaccagccctggaagcagctgtgcttggagctgcgggccgcatggggcgagctggacgccggggaggccgaggcgcgcgcgcggggaccccagcaaccgccgcccccggacctgcggagtctgggcttcggccggagggtgcggcctccccaggagcgggccctgctggtggtattcaccagatcccagcgcaagaacctgttcgcagagatgcgcgagcagctgggctcggccgaggctgcgggcccgggcgcgggcgccgaggggtcgtggccgccgccgtcgggcgccccggatgccaggccttggctgccctcgcccggccgccggcggcggcgcacggccttcgccagtcgccatggcaagcggcacggcaagaagtccaggctacgctgcagcaagaagcccctgcacgtgaacttcaaggagctgggctgggacgactggattatcgcgcccctggagtacgaggcctatcactgcgagggtgtatgcgacttcccgctgcgctcgcacctggagcccaccaaccacgccatcatccagacgctgatgaactccatggaccccggctccaccccgcccagctgctgcgtgcccaccaaattgactcccatcagcattctatacatcgacgcgggcaataatgtggtctacaagcagtacgaggacatggtggtggagtcgtgcggctgcaggtagcggtgcctttcccgccgccttggcccggaaccaaggtgggccaaggtccgccttgcaggggaggcctggctgcagagaggcggaggaggaagctggcgctgggggaggctgagggtgagggaacagcctggatgtgagagccggtgggagagaagggagcgcagccttcccagtaacttctacctgccagcccagagggaaatatggattttcacaccttgcctggccaccctggaaaaacaagccaaggaggatttcttttgttctgttttctctctctctctctctctctctctctctctctctctctctctctctattactgtggctttggatttccttatgtgtcttacaggctttgatagaaggggaggggaggagagatgcatacccgtttctcaactgctccatggattgaaaaaataacagtttaaaaagggaaacaatgtgggaggaagaatcaccgttgacgcatcttgatttggttggtttttacatgtgtaaagaaggtggggtctctggccatgtcatagcccatgtcttgtgccctcccacacagaaagtgttagatagggaaattggcaaaaagaatagttaagtcaggaatggtcctgcctatagaagagctttgagagaggtgggcccacgggtgcccctctcacccatttgtgtactctgtgagtttaccagctctgccctggcctctttcggtaccaggaactggcaaccttcatctcactcctgagggcccaggtctctgccttcattgttgctttttctggtgggggcaaggggagctggtatggatggaatgacaagaattagtccaaatggaaccccttgaaggataatgagaaaccacaaggcctgcctctgactggggctgacacggaggtgcattagcccaggctggaggtagcccacccaaatgccctttctgattctaattgatttctttcaacagaatttgccaaaattcagacatgcacttctaaggggaaggtgattttccagttcaaaaaaatgggcaggagtggggaacaaaacaattaacgtaagagctacaaaggagggaaaaggaaccaagaagtagaaggagtcccatcaggagggaagatggtgggcctcagggaggatggggatcaagggacaggccaggagccaggagtggggaagggagggatgaaaggggacacaagtccctgtctctgaagtttctttaaaatctgagttccctcccctctctttgacattcctgaaagattaccagccagcaatagcccagggctcccccaaaagaattggttcagattgtaattatcagttaggcaatgtttttaaaacttagtaatgagaaactgtgaaaagagccaagtgttacattgagcttggggtgggagatggggaacaggcagtgaggaaggagacaggggtggaattcgtcttctgggaggaagctggagagagcacagtgaaattgaaatacccattcccagatagtcaaaaacatgaactttcccccagcctgcaccagtattgttttcaaacattgcccatgagtaggccctttgaagagttagcttcctcctcatctttgactataaaattgtttaatcaatggaatttgtaccagccttttaaaaagttttagtttttcctaagtgattttgctctcttccaatctaaacctgttgcttgtttggttcagagaactacaaactgtcaaagaaagggtggggatgataagaaatgctaatataaaaatgctaagtgaaaaaaagacttggccaggagaaataatttaaaatgcacatttgctttggatgcactgttgttctgttaaggctgtatatatttgtttatttaaggtgactgaaagtgcaaagaggaaatggacagcatgcaattcatcctaatgtacaaaacgttatatgcactcaaatgttataatttctaatatttttaaagtttatattcgagttgtacaaagttaagcattaatcagatatttcattttttcataatgttaccattttcttaaatattattacaaaattttaagtctgtctaatggagagttttttttaaactgtctacctcatataatacaagtatttacaacgctaaagttaccagaggtcaatgaataatcaaaacattttttacagtacacctttcctggatgatatgcaatcgaatgctatattattaaacgcatttttctccttattaaaaaaaaaaaaaaaaa

SEQ ID NO: 2322 - protein, 455 aa, Homo sapiens
MDTPRVLLSAVFLISFLWDLPGFQQASISSSSSSAELGSTKGMRSRKEGKMQRAPRDSDAGREGQEPQPRPQDEPRAQQPRAQEPPGRGPRVVPHEYMLSIYRTYSIAEKLGINASFFQSSKSANTITSFVDRGLDDLSHTPLRRQKYLFDVSMLSDKEELVGAELRLFRQAPSAPWGPPAGPLHVQLFPCLSPLLLDARTLDPQGAPPAGWEVFDVWQGLRHQPWKQLCLELRAAWGELDAGEAEARARGPQQPPPPDLRSLGFGRRVRPPQERALLVVFTRSQRKNLFAEMREQLGSAEAAGPGAGAEGSWPPPSGAPDARPWLPSPGRRRRRTAFASRHGKRHGKKSRLRCSKKPLHVNFKELGWDDWIIAPLEYEAYHCEGVCDFPLRSHLEPTNHAIIQTLMNSMDPGSTPPSCCVPTKLTPISILYIDAGNNVVYKQYEDMVVESCGCR

SEQ ID NO: 2323 - DNA, 965 bp, Homo sapiens
cagcttgtcctctatgacttacccagaaggcaacgcttctctttctggtcaaaatggctggtaagcaggccgtttcagcatcaggcaagtggctggatggtattcgaaaatggtattacaatgctgcaggattcaataaactggggttaatgcgagatgatacaatatacgaggatgaagatgtaaaagaagccataagaagacttcctgagaacctttataatgacaggatgtttcgcattaagagggcactggacctgaacttgaagcatcagatcttgcctaaagagcagtggaccaaatatgaagaggaaaatttctaccttgaaccgtatctgaaagaggttattcgggaaagaaaagaaagagaagaatgggcaaagaagtaatcatgtagttgaagtctgtggatgcagctgttatgaagatggttaaacttgaaacaaacaattttaagaattatttggtctgaagatgttttactttaaataaatgtctattgtaatggctggagtttttgaattccaaaccttatactgaataactactgaatccctttactgttaaatttttttccaaactttcaagatatatttagttgtgtttaactgctacttggagctcagaagccactttatcagttttcctcactggttggatagcctatcagtttatggaaggatataacttccgtaagttacatccttatggaagctactgaataaaagaagggggtatgcaccccctagtttgccaagattgagaaatagcctcttcactggtatgcaaacagatttgattttgcatcctatcatttaaaaagaaattatgtctgcaccccaacataggcatacttaagtaatatacatactcctgtgctaacatgtatactagaaaacaaaaagatgttagaaaaataaaagtataaagacaaatcaaaaaaaaaaaaaaaaaaaaaaaaaaaa

SEQ ID NO: 2324 - protein, 111 aa, Homo sapiens
MAGKQAVSASGKWLDGIRKWYYNAAGFNKLGLMRDDTIYEDEDVKEAIRRLPENLYNDRMFRIKRALDLNLKHQILPKEQWTKYEEENFYLEPYLKEVIRERKEREEWAKK

SEQ ID NO: 2325 - DNA, 1424 bp, Homo sapiens
gggacgtgcggcccagcgagttggtcggtcccggggtcacccgctacgggaagcaggcctcgccacagactaagaaaaatggctttgtcagcccaacagatacccagatggtttaactcagttaagttgaggagcctcattaatgctgcacaactcacaaaacgttttactagaccagcaagaacactgttacatggcttttctgctcagcctcagatatcctctgacaattgctttctccagtggggatttaagacttacaggacttcctccttatggaatagttcccagtctactagctcaagtagtcaggagaataattctgcccaaagcagtctgcttccttccatgaatgaacagtcacagaagacacaaaatatatccagctttgattctgagctgtttctagaagaactggatgaattgcctccattgtctccaatgcagccaatttcagaggaagaggctattcagattattgcagaccctccattgccaccagcttcattcacacttcgagactatgtggatcattctgagactctgcagaagttggttcttctaggcgtggatttgtccaagatagaaaaacatccagaagcagcaaacctccttctgagactggattttgaaaaagacattaagcaaatgcttctgtttcttaaagatgtgggtatagaggataaccaactgggagcattcctgacaaaaaatcatgcaattttctctgaagaccttgaaaatctgaagaccagggtggcttatctgcattcaaaaaatttcagtaaagcagatgttgcacagatggtcagaaaagcaccatttttgctgaacttttcagtggaaagactggataacagattgggattttttcagaaagaacttgaacttagtgtgaagaagactagagatctggtagttcgtctcccaaggctgctaactggaagtctggaacccgtgaaagaaaatatgaaggtttatcgtcttgaacttggttttaaacataacgaaattcaacatatgatcaccagaatcccaaagatgttaactgcaaataaaatgaaacttaccgagacgtttgattttgtgcacaatgtgatgagcattccccaccacatcattgtcaagttcccacaggtatttaatacaaggctgtttaaggtcaaagaaagacacttgtttcttacctatttaggaagagcacagtatgatccagcaaaacctaactacatctctttggacaaactagtatctattcctgatgaaatattttgtgaagagattgccaaagcatcagtacaggactttgaaaaattcttaaaaacgctttagatttttatgtatgttaaaatgcagtattgtaaagtgaatatatatatgaataaatgaatatatttttaaatgccaaaaaaaaaaaaaaaaaa

SEQ ID NO: 2326 - protein, 417 aa, Homo sapiens
MALSAQQIPRWFNSVKLRSLINAAQLTKRFTRPARTLLHGFSAQPQISSDNCFLQWGFKTYRTSSLWNSSQSTSSSSQENNSAQSSLLPSMNEQSQKTQNISSFDSELFLEELDELPPLSPMQPISEEEAIQIIADPPLPPASFTLRDYVDHSETLQKLVLLGVDLSKIEKHPEAANLLLRLDFEKDIKQMLLFLKDVGIEDNQLGAFLTKNHAIFSEDLENLKTRVAYLHSKNFSKADVAQMVRKAPFLLNFSVERLDNRLGFFQKELELSVKKTRDLVVRLPRLLTGSLEPVKENMKVYRLELGFKHNEIQHMITRIPKMLTANKMKLTETFDFVHNVMSIPHHIIVKFPQVFNTRLFKVKERHLFLTYLGRAQYDPAKPNYISLDKLVSIPDEIFCEEIAKASVQDFEKFLKTL

SEQ ID NO: 2327 - DNA, 3729 bp, Homo sapiens
ggcccaagccgccattgttccgccgagggaggacagcggggcctggcgctggcgccgagacgccgcttagcggccgccactggagacactccctcccgcctcccgggtctcctggcggcggcggagtgaggctgacagcggggaacctgggagacccctccgccctccccgcggtggcagcggccgatccccggctccggcgcgagggacggccgcgatgcgctcggcctgaggttacccggcccggcccttcctcgcttccctcgactattccactgcgtctccgcgccccggcgtcatcctgcgagtccctctgacgggagggaagatggctgcacggagctggcaggacgagctggcccagcaggccgaggagggctcggcccggctgcgggaaatgctctcggtcggcctaggctttctgcgcaccgagctgggcctcgacctggggctggagccgaaacggtaccccggctgggtgatcctggtgggcactggcgcgctcgggctgctgctgctgtttctgctgggctacggctgggccgcggcttgcgccggctcccgcaaaaagcggaggagcccgccccgcaagcgggaggaggcggcggccgtgccggccgcggcccccgacgacctggccttgctgaagaatctccggagcgaggaacagaagaagaagaaccggaagaaactgtccgagaagcccaaaccaaatgggcggactgttgaagtggctgagggtgaagctgttcgaacacctcaaagtgtaacagcaaagcagccaccagagattgacaagaaaaatgaaaagtcaaagaaaaataagaagaaatcaaagtcagatgctaaagcagtgcaaaacagttcacgccatgatggaaaggaagttgatgaaggagcctgggaaactaaaattagtcacagagagaaacgacagcagcgtaaacgtgataaggtgctgactgattctggttcattggattcaactatccctgggatagaaaataccatcacagttaccaccgagcaacttacaaccgcatcatttcctgttggttccaagaagaataaaggtgattctcatctaaatgttcaagttagcaactttaaatctggaaaaggagattctacacttcaggtttcttcaggattgaatgaaaacctcactgtcaatggaggaggctggaatgaaaagtctgtaaaactctcctcacagatcagtgcaggtgaggagaagtggaactccgtttcacctgcttctgcaggaaagaggaaagctgagccatctgcctggagtcaagacactggagatgctaatacaaatggaaaagactggggaaggagttggagtgaccgttcaatattttctggcattgggtctactgctgagccagtttctcagtctaccacttctgattatcagtgggatgttagccgtaatcaaccctatatcgatgatgaatggtctgggttaaatggtctgtcttctgctgatcccaactctgattggaatgcaccagcagaagagtggggcaattgggtagacgaagaaagagcttcacttctaaagtcccaggaaccaattcctgatgatcaaaaggtctcagatgatgataaagaaaagggagagggagctcttccaactgggaaatccaaaaagaaaaaaaagaaaaagaagaagcaaggtgaagataactctactgcacaggacacagaagaattagaaaaagagattagagaagaccttccagtgaatacctctaaaacccgtccaaaacaggaaaaagctttttccttgaagaccataagcactagtgatccagccgaagtactcgtcaaaaatagccagcctatcaagactcttccacctgctacttctaccgagccatctgtaatcttatcaaaaagtgattctgacaagagctcttcccaagtgccgccaatactacaagagacagataaatccaagtcaaataccaagcaaaatagtgtgcctccttcacagaccaagtctgaaactagctgggaatctcccaaacaaataaaaaagaagaaaaaagccagacgagaaacgtgaaattttttttcctgaattggacatgtgtttgcaaacacttgtcttgaagattatgctgtttatgcaataatttgtgaacatgtacagagttttatataaatttaaaccaatttttaaaacaaaactgcggacaccaccataaaaatggaatcaaaagaaagttaatttatgaaattaagaggtcagcagaatatactcagtgatggaagacacttgggaaagtctttttaatagaacaagaacgatcttaatttaagaatattatcctggtttaacaacagtgccctgtttacaacagattgtgccctatctcatctgcagccgaggaataaaggattctgattagaaagagggttgcctacagattagtaagcaattccttggatcttatgcacagaacttgtaccatttgaatctgttttatgcttaaatcaaagtgctttgatcaaatgcataacctgccatatctttacatatttgttggtagcaatttgtattaaagaaatcacaagtgcaaataaaaagtcatttatcatttgtttaactaaactgtcatggtttagtttacaatttttaaaaagttcttaaaatactgaaaatgcagttgacacttgtgtatggcttatgaagttatttttgatagtcttacattacttgaattgttcaaagtacagtatattttaaattaagaaaagtgaactatatgtatttgttttatacatttaaggcttagactcataaataatgctattgtttatgatttgaaaactttcaggcaaaatccaatttacatttttcccttccctagcaattacttttttccagcttcaactcttcttagttactaatactttgttgactttaaaaatgaaatcattcacaaacttttggtatatgatggagaatgaaaaactagagtcagacagctttaattgacattgtcaacacctccagttatcaggaatacatttttttactgccttaacctgtagtgcgtagaatatgcatcaatttcttgaaggagattcatgtttttataagaattttcatgtaattattgcaattgtggtcaaataaggaacgtttcctgcttgaaattatattgatttaaatgatgtgtgagatgtttcaccattttcaggcactgtgtaattctattgtaataaactggcaggtatctttgtaactataaatagtgcatgctcagccatgtacactgtaaatagcctttaccaaacgtgtttgacaaggaccataattaacatcacttagtgaattgtgataaagaaaaaaaagccatgatttattcgatgtgattggcttgtttttatgtggcgccaagaacgaacctgtttaacagctgtaaccaatggtactgatctatccatccaatgttgtcattatatttgactgtggttcaacagtattgcgttgtcagactaggaaagctaaacgaacaaaatggttttagttttgctgaagactggccttattaatggacagctttcctaacaagagattattaacttttatcaggtgttaacatctgtttcaggaacatggcagtatgtttacatgtcagaagttttgtttaattctatggtatttctaaattgacttgtttaaataaattcagcaaaaaaaaaaaaaaa

SEQ ID NO: 2328 - protein, 582 aa, Homo sapiens
MAARSWQDELAQQAEEGSARLREMLSVGLGFLRTELGLDLGLEPKRYPGWVILVGTGALGLLLLFLLGYGWAAACAGSRKKRRSPPRKREEAAAVPAAAPDDLALLKNLRSEEQKKKNRKKLSEKPKPNGRTVEVAEGEAVRTPQSVTAKQPPEIDKKNEKSKKNKKKSKSDAKAVQNSSRHDGKEVDEGAWETKISHREKRQQRKRDKVLTDSGSLDSTIPGIENTITVTTEQLTTASFPVGSKKNKGDSHLNVQVSNFKSGKGDSTLQVSSGLNENLTVNGGGWNEKSVKLSSQISAGEEKWNSVSPASAGKRKAEPSAWSQDTGDANTNGKDWGRSWSDRSIFSGIGSTAEPVSQSTTSDYQWDVSRNQPYIDDEWSGLNGLSSADPNSDWNAPAEEWGNWVDEERASLLKSQEPIPDDQKVSDDDKEKGEGALPTGKSKKKKKKKKKQGEDNSTAQDTEELEKEIREDLPVNTSKTRPKQEKAFSLKTISTSDPAEVLVKNSQPIKTLPPATSTEPSVILSKSDSDKSSSQVPPILQETDKSKSNTKQNSVPPSQTKSETSWESPKQIKKKKKARRET

SEQ ID NO: 2329 - DNA, 2242 bp, Homo sapiens
gaatctcgacccttgaatggagttacacgaacggccagatgaaagaaggaaggcccggacctccactcagggccgactaggggactggcggagggtgcacgctgatggatttactcaccgggtgcttggagctccagcagctggctggagcccgcgatgacgtcacggactcgggtcacatggccaagtccgccccgccccctccccgtccccgccgctgcagcggtcgccttcggagcgaagggtaccgacccggcagaagctcggagctctcggggtatcgaggaggcaggcccgcgggcgcacgggcgagcgggccgggagccggagcggcggaggagccggcagcagcggcgcggcgggctccaggcgaggcggtcgacgctcctgaaaacttgcgcgcgcgctcgcgccactgcgcccggagcgatgaagatggtcgcgccctggacgcggttctactccaacagctgctgcttgtgctgccatgtccgcaccggcaccatcctgctcggcgtctggtatctgatcatcaatgctgtggtactgttgattttattgagtgccctggctgatccggatcagtataacttttcaagttctgaactgggaggtgactttgagttcatggatgatgccaacatgtgcattgccattgcgatttctcttctcatgatcctgatatgtgctatggctacttacggagcgtacaagcaacgcgcagcctggatcatcccattcttctgttaccagatctttgactttgccctgaacatgttggttgcaatcactgtgcttatttatccaaactccattcaggaatacatacggcaactgcctcctaattttccctacagagatgatgtcatgtcagtgaatcctacctgtttggtccttattattcttctgtttattagcattatcttgacttttaagggttacttgattagctgtgtttggaactgctaccgatacatcaatggtaggaactcctctgatgtcctggtttatgttaccagcaatgacactacggtgctgctacccccgtatgatgatgccactgtgaatggtgctgccaaggagccaccgccaccttacgtgtctgcctaagccttcaagtgggcggagctgagggcagcagcttgactttgcagacatctgagcaatagttctgttatttcacttttgccatgagcctctctgagcttgtttgttgctgaaatgctactttttaaaatttagatgttagattgaaaactgtagttttcaacatatgctttgctggaacactgtgatagattaactgtagaattcttcctgtacgattggggatataatgggcttcactaaccttccctaggcattgaaacttcccccaaatctgatggacctagaagtctgcttttgtacctgctgggccccaaagttgggcatttttctctctgttccctctcttttgaaaatgtaaaataaaaccaaaaatagacaactttttcttcagccattccagcatagagaacaaaaccttatggaaacaggaatgtcaattgtgtaatcattgttctaattaggtaaatagaagtccttatgtatgtgttacaagaatttcccccacaacatcctttatgactgaagttcaatgacagtttgtgtttggtggtaaaggattttctccatggcctgaattaagaccattagaaagcaccaggccgtgggagcagtgaccatctgctgactgttcttgtggatcttgtgtccagggacatggggtgacatgcctcgtatgtgttagagggtggaatggatgtgtttggcgctgcatgggatctggtgcccctcttctcctggattcacatccccacccagggcccgcttttactaagtgttctgccctagattggttcaaggaggtcatccaactgactttatcaagtggaattgggatatatttgatatacttctgcctaacaacatggaaaagggttttcttttccctgcaagctacatcctactgctttgaacttccaagtatgtctagtcaccttttaaaatgtaaacattttcagaaaaatgaggattgccttccttgtatgcgctttttaccttgactacctgaattgcaagggatttttatatattcatatgttacaaagtcagcaactctcctgttggttcattattgaatgtgctgtaaattaagttgtttgcaattaaaacaaggtttgcccacatccaagaaaaa

SEQ ID NO: 2330 - protein, 317 aa, Homo sapiens
MTSRTRVTWPSPPRPLPVPAAAAVAFGAKGTDPAEARSSRGIEEAGPRAHGRAGREPERRRSRQQRRGGLQARRSTLLKTCARARATAPGAMKMVAPWTRFYSNSCCLCCHVRTGTILLGVWYLIINAVVLLILLSALADPDQYNFSSSELGGDFEFMDDANMCIAIAISLLMILICAMATYGAYKQRAAWIIPFFCYQIFDFALNMLVAITVLIYPNSIQEYIRQLPPNFPYRDDVMSVNPTCLVLIILLFISIILTFKGYLISCVWNCYRYINGRNSSDVLVYVTSNDTTVLLPPYDDATVNGAAKEPPPPYVSA

SEQ ID NO: 2331 - DNA, 2123 bp, Homo sapiens
gcagcctgaggcagagctcgggggctgtcggtggggaccttgcaggagggcaccccaagcccgcccggcccgcccaacccagcccctgcgcgcagcccgggccgagtaggaccccgcgcgcccctcgctatggcggcgccctcgcggctcctgatccgcgggggtcgcgtggtcaacgatgacttctcggaggtggccgacgtgctggtggaggacggcgtggtgcgggcactcgggcacgacctgctgcctcccgggggcgctcctgcggggctgcgggtcctcgacgccgccggcaagctcgtcctgcccggaggcatcgacacacacacgcacatgcagttccccttcatgggctcgcggtccatcgacgacttccaccagggcaccaaggctgctctctcaggaggcaccaccatgattattgatttcgccattcctcagaaaggtggctccctcattgaggccttcgagacctggcgaagctgggctgatcccaaagtttgctgcgactacagccttcatgtggcagtgacgtggtggagtgaccaggttaaagaagaaatgaaaatccttgtgcaagataaaggtgttaactctttcaagatgtttatggcctataaagatctgtacatggtgacagacctggagctgtacgaagccttctctcggtgcaaggaaattggagcaattgcccaggtccatgcggaaaatggagacttaattgcagagggagcaaagaagatgttggctctggggataacaggccctgagggccacgagctgtgccgcccagaggcagtggaggcagaggccacgctgagagccatcaccatagccagcgctgtgaactgtcctctctacattgtgcatgtgatgagcaagtctgcagctaaggtgatagcggatgcaaggagagatgggaaggtggtctatggtgaacccatagcagccagtcttggcacagatggcactcactactggaataaagaatggcaccatgcagcccaccatgtcatgggtccacctttgcgaccagacccctcaacacccgacttcctcatgaatctgttggctaatgatgatctaaccacaacagggactgataactgcactttcaacacctgccagaaagctcttgggaaggatgattttaccaagatccccaatggggtgaatggtgttgaagatcggatgtccgtaatatgggaaaaaggcgtgcatagtggtaaaatggatgaaaacagatttgtggcagttaccagcacaaatgcagccaaaatttttaatctctatccaagaaaaggaagaatagctgtaggatcagatgctgacattgttatttgggacccaaaaggcacaaggactatctcagcaaaaactcatcatcaggctgttaacttcaacattttcgagggcatggtttgccacggggtgccccttgtgactatttcaagaggcaaagtggtatatgaagccggagtgttcagtgtcacggcaggagatgggaagtttattcctcgaaaaccatttgctgaatatatttacaaacgaataaagcagcgagaccggacttgcacacctacccctgtggagcgtgcaccctataagggagaagtcgccacactgaaatccagagtgacaaaagaagatgccacagcagggaccaggaaacaggcccacccctgaagtgtgtgccatcggtaaaaaaaatcagaggaaaggaggctgccattcccttcacagccaaacattgtcaacccatggagaagcaggccttattcaactccctaggatcctttagaaaaaattcaccactataggcttctttgattttctttcagaagcaattgctgtctttctcactgtgtttttgttgctgcataagattgaaggtataaatttatattattgtgatggaaaggctgtgtggaaattcattgatgatactttaaaatgtcatctttgcttgtactagatttcttacttagaatttttaaaaatcattttcttgtttaaatagtttctttttttaaaaaaatggttacattagttttaaaatagctctgtgattttactttttattgtaattaataaacattgagatcttcattttatacctt

SEQ ID NO: 2332 - protein, 519 aa, Homo sapiens
MAAPSRLLIRGGRVVNDDFSEVADVLVEDGVVRALGHDLLPPGGAPAGLRVLDAAGKLVLPGGIDTHTHMQFPFMGSRSIDDFHQGTKAALSGGTTMIIDFAIPQKGGSLIEAFETWRSWADPKVCCDYSLHVAVTWWSDQVKEEMKILVQDKGVNSFKMFMAYKDLYMVTDLELYEAFSRCKEIGAIAQVHAENGDLIAEGAKKMLALGITGPEGHELCRPEAVEAEATLRAITIASAVNCPLYIVHVMSKSAAKVIADARRDGKVVYGEPIAASLGTDGTHYWNKEWHHAAHHVMGPPLRPDPSTPDFLMNLLANDDLTTTGTDNCTFNTCQKALGKDDFTKIPNGVNGVEDRMSVIWEKGVHSGKMDENRFVAVTSTNAAKIFNLYPRKGRIAVGSDADIVIWDPKGTRTISAKTHHQAVNFNIFEGMVCHGVPLVTISRGKVVYEAGVFSVTAGDGKFIPRKPFAEYIYKRIKQRDRTCTPTPVERAPYKGEVATLKSRVTKEDATAGTRKQAHP

SEQ ID NO: 2333 - DNA, 4083 bp, Homo sapiens
ctcctcctccgtctcctcctctctctctcatctgctgtggttatggcctgtcgctggagcacaaaagagtctccgcggtggaggtctgcgttgctcttgcttttcctcgctggggtgtacggaaatggtgctcttgcagaacattctgaaaatgtgcatatttcaggagtgtcaactgcttgtggagagactccagagcaaatacgagcaccaagtggcataatcacaagcccaggctggccttctgaatatcctgcaaaaatcaactgtagctggttcataagggcaaacccaggcgaaatcattactataagttttcaggattttgatattcaaggatccagaaggtgcaatttggactggttgacaatagaaacatacaagaatattgaaagttacagagcttgtggttccacaattccacctccgtatatctcttcacaagaccacatctggattaggtttcattcggatgacaacatctctagaaagggtttcagactggcatatttttcagggaaatctgaggaaccaaattgtgcttgtgatcagtttcgttgtggtaatggaaagtgtataccagaagcctggaaatgtaataacatggatgaatgtggagatagttccgatgaagagatctgtgccaaagaagcaaatcctccaactgctgctgcttttcaaccctgtgcttacaaccagttccagtgtttatcccgttttaccaaagtttacacttgcctccccgaatctttaaaatgtgatgggaacattgactgccttgacctaggagatgagatagactgtgatgtgccaacatgtgggcaatggctaaaatatttttatggtacttttaattctcccaattatccagacttttatcctcctggaagcaattgcacctggttaatagacactggtgatcaccgtaaagtcattttacgcttcactgactttaaacttgatggtactggttatggtgattatgtcaaaatatatgatggattagaggagaatccacacaagcttttgcgtgtgttgacagcttttgattctcatgcacctcttacagttgtttcttcttctggacagataagggtacatttttgtgctgataaagtgaatgctgcaaggggatttaatgctacttaccaagtagatgggttctgtttgccatgggaaataccctgtggaggtaactgggggtgttatactgagcagcagcgttgtgatgggtattggcattgcccaaatggaagggatgaaaccaattgtaccatgtgccagaaggaagaatttccatgttcccgaaatggtgtctgttatcctcgttctgatcgctgcaactaccagaatcattgcccaaatggctcagatgaaaaaaactgctttttttgccaaccaggaaatttccattgtaaaaacaatcgttgtgtgtttgaaagttgggtgtgtgattctcaagatgactgtggtgatggcagcgatgaagaaaattgcccagtaatcgtgcctacaagagtcatcactgctgccgtcatagggagcctcatctgtggcctgttactcgtcatagcattgggatgtacttgtaagctttattctctgagaatgtttgaaagaagatcatttgaaacacagttgtcaagagtggaagcagaattgttaagaagagaagctcctccctcgtatggacaattgattgctcagggtttaattccaccagttgaagattttcctgtttgttcacctaatcaggcttctgttttggaaaatctgaggctagcggtacgatctcagcttggatttacttcagtcaggcttcctatggcaggcagatcaagcaacatttggaaccgtatttttaattttgcaagatcacgtcattctgggtcattggctttggtctcagcagatggagatgaggttgtccctagtcagagtaccagtagagaacctgagagaaatcatactcacagaagtttgttttccgtggagtctgatgatacagacacagaaaatgagagaagagatatggcaggagcatctggtggggttgcagctcctttgcctcaaaaagtccctcccacaacggcagtagaagcgacagtaggagcatgtgcaagttcctcaactcagagtacccgaggtggtcatgcagataatggaagggatgtgacaagtgtggaacccccaagtgtgagtccagcacgtcaccagcttacaagtgcactcagtcgtatgactcaggggctacgctgggtacgttttacattaggacgatcaagttccctaagtcagaaccagagtcctttgagacaacttgataatggggtaagtggaagagaagatgatgatgatgttgaaatgctaattccaatttctgatggatcttcagactttgatgtgaatgactgctccagacctcttcttgatcttgcctcagatcaaggacaagggcttagacaaccatataatgcaacaaatcctggagtaaggccaagtaatcgagatggcccctgtgagcgctgtggtattgtccacactgcccagataccagacacttgcttagaagtaacactgaaaaacgaaacgagtgatgatgaggctttgttactttgttaggtacgaatcacataagggagattgtatacaagttggagcaatatccatttattattttgtaactttacagttaaactagttttagtttaaaaagaaaaaatgcagggtgatttcttattattatatgttagcctgcatggttaaattcgacaacttgtaactctatgaacttagagtttactattttagcagctaaaaatgcatcacatattcatattgttcaataatgtcctttcatttgtttctgattgttttcatcctgatactgtagttcactgtagaaatgtggctgctgaaactcatttgattgtcatttttatctatcctatgttaaatggtttgtttttacaaaataataccttattttaattgaaacgtttatgcttttgccaacacatcttgtaacttaatatactagatgttaaggttgttaatgtacaaaaaaaaaacccttatactcacctgcgttttcatttgtttgacatttgtctattattggatttcattatcatatgaacttgtcagtgggaaacaaactgtctaaaaatttttctcttacgtttaacatacaatcatgtgaaatttaggcagagttcgataaattactggcaaaaacaaaactcttttataaagattttctaatgttgactttaatactctaacatggtacaaaccaaatggtaaaatcccaagtcatttcttttttcatctctatttagcaacagaattaagtggatgaagatattctactatgcattaaatcttgaactttataaaacatgtacaaaaattgtacaagataagttccacctggtaatgtctttccctaatacagggttgcgcttgcattggaccctagggatttgcactaaaattatatcaaggtctcagatgagcttagtgcacaagcactatcactttaaatactattatttgctaccacagcaactatatatttccatagcttttggctgggggcgggggacatttttattacaacttgaaattgctttgctggtttcatatttatttgttgtatttaaaaaatacattgttgtaagagtgattttttcaatatattttattcctgggggggatcatgctacactctcaaaagaaaattaagaaatcattcagatcatcccccctttttaagtagtgtgaattgcaaaacccaacatattttttttactgtcagttgcggtttatttattctttaactgtctgttttagtagtttaatgattatgaaaaatgtatctgtgtgtgatttgctatttattaaattttaagtactttgctgaatgtcattttaaagcatgtttgaagtcttgtgtatttgtctgtgttaatgctgtcaggaggaactgactaagatgttttaatatgtatcaaaaattaaaatgattttttttattgccttgaggtactttttaaaaaaaaaaaaaaaaaaaaaaaaaaa

SEQ ID NO: 2334 - protein, 859 aa, Homo sapiens
MACRWSTKESPRWRSALLLLFLAGVYGNGALAEHSENVHISGVSTACGETPEQIRAPSGIITSPGWPSEYPAKINCSWFIRANPGEIITISFQDFDIQGSRRCNLDWLTIETYKNIESYRACGSTIPPPYISSQDHIWIRFHSDDNISRKGFRLAYFSGKSEEPNCACDQFRCGNGKCIPEAWKCNNMDECGDSSDEEICAKEANPPTAAAFQPCAYNQFQCLSRFTKVYTCLPESLKCDGNIDCLDLGDEIDCDVPTCGQWLKYFYGTFNSPNYPDFYPPGSNCTWLIDTGDHRKVILRFTDFKLDGTGYGDYVKIYDGLEENPHKLLRVLTAFDSHAPLTVVSSSGQIRVHFCADKVNAARGFNATYQVDGFCLPWEIPCGGNWGCYTEQQRCDGYWHCPNGRDETNCTMCQKEEFPCSRNGVCYPRSDRCNYQNHCPNGSDEKNCFFCQPGNFHCKNNRCVFESWVCDSQDDCGDGSDEENCPVIVPTRVITAAVIGSLICGLLLVIALGCTCKLYSLRMFERRSFETQLSRVEAELLRREAPPSYGQLIAQGLIPPVEDFPVCSPNQASVLENLRLAVRSQLGFTSVRLPMAGRSSNIWNRIFNFARSRHSGSLALVSADGDEVVPSQSTSREPERNHTHRSLFSVESDDTDTENERRDMAGASGGVAAPLPQKVPPTTAVEATVGACASSSTQSTRGGHADNGRDVTSVEPPSVSPARHQLTSALSRMTQGLRWVRFTLGRSSSLSQNQSPLRQLDNGVSGREDDDDVEMLIPISDGSSDFDVNDCSRPLLDLASDQGQGLRQPYNATNPGVRPSNRDGPCERCGIVHTAQIPDTCLEVTLKNETSDDEALLLC

SEQ ID NO: 2335 - DNA, 1395 bp, Homo sapiens
atgaaggagtacactaaagatgaggaactgagtcaccgcaatgccaaatgtaacacgctgtgggtcaaaatttggatggttgcgttggaaattattctgaagccacagacagggctaaaaggactgagttctacatgttatcagaacataggtctgggaaccagggaagacgtcttgctgaaaccgccaataggaactagctcctcaaaacagagacgccaatacagacgacaaaaccagcagtcttcatctgactctggttcctccttctcctcagaagatgaacgacccaagagatcccatgtgaagaatggtgaggttggcaagcggcggagacattccccttcccggagtgcttctccatcaccacgaaagcaccaaaaagagacttcccctcatggtagacggaggagaagtccatccccaccacccaccagaaggcgacggtctccttctcccgcccctcatcctcgacggctcaggactcccacaccaccaccaccacgacgaaggactccttctcctcccctacgtcggcgctcaccttctcctagaagatactctcctccaatacagaggagatactctccttctccacctccaaagagaagaacggcttcacctcctccccctcctaaacgaagagcatcaccatttccaccaccaaagcggcgggtctcccattctccaccttccaaagaagctccccagtcaccaagagacgttcaccttcactatcatccaagcataggaaagggtcttccccaagccgctctacccgggaggcccgatcaccgcatccaaacaaatggcattcgccctcatcacggcctcgagctcctcagacctcaagtcctccacccgttcgaagaggagcgtcgtcatcaccccaaagaaggcagtccccgtctccaagtactaggcccattaggagagtctccaggactccggaacctaaaaagataaaaaaaggctgcttccccaagcccacagtctgtaaggagggtctcatcctcccgatctgtctctgggtctcctgagccagcagctaaaaagcccccagcatctccatcccccatccagtctcagtcaccgtctacaaactggtcaccagctgtaccggtcaaaaaggccaaaagcccaacaccgagcccatcactgccaagaaattcagatcaagaaggagatggaaagaaaaagaagaaaaagaaggacaggaaacacaaaaaggataagaagcacaagaagcacaaaaaacacaagaaggaaaaggctgtggctgcagctgctgcagctgctgtgacccctgcagccattgcagctgccacaaccacattagcacaggaagagccagtggcagcgccagagccgaagaaggagactgaaagaaaaaga

SEQ ID NO: 2336 - protein, 321 aa, Homo sapiens
MKEYTKDEELSHRNAKCNTLWVKIWMVALEIILKPQTGLKGLSSTCYQNIGLGTREDVLLKPPIGTSSSKQRRQYRRQNQQSSSDSGSSFSSEDERPKRSHVKNGEVGKRRRHSPSRSASPSPRKHQKETSPHGRRRRSPSPPPTRRRRSPSPAPHPRRLRTPTPPPPRRRTPSPPLRRRSPSPRRYSPPIQRRYSPSPPPKRRTASPPPPPKRRASPFPPPKRRVSHSPPSKEAPQSPRDVHLHYHPSIGKGLPQAALPGRPDHRIQTNGIRPHHGLELLRPQVLHPFEEERRHHPKEGSPRLQVLGPLGESPGLRNLKR

SEQ ID NO: 2337 - DNA, 3275 bp, Homo sapiens
cgtgcgagtgtctccctctccctctcgctctctctctctctccctctctctctctcttttgtgagttatagcaaccgttgccttgtgaatcaagcgccatagtcaccgtagtcctggcgactgttacccatcaacaacaactactcctctcctcctcctcctcctcttcctcctcctcctccccaccaccaccatctccatcacccaccaacaacaccacaataatccacagccaaggccacttggtcattctggcattttatggtagagaatacgttgagtttggctctggaaggaatatgagagaccatcatgcagacatcagagactgggtcggacacaggctcgacagtgaccttacaaacatctgtggctagtcaagcagcagtgcctacgcaggtggtacagcaagtaccagtacaacaacaggtacagcaggtacagactgtgcagcaggtacaacatgtctatcccgctcaggtgcagtatgtggaaggaagcgatactgtctataccaatggagcaatccgaacaacaacgtatccttacacagagacacagatgtacagccaaaatactggagggaattactttgatactcaagggagttccgcccaggtgactaccgtggtctcatcccacagtatggtgggcactggtgggattcagatgggcgtcacaggaggacaactcatcagcagctctggaggaacctatctgatcggcaactcaatggagaattctggtcactcagtgacacacacaactcgggcctccccagcgacaattgaaatggcgattgagacgctgcaaaagtctgacggtctgtccactcacagaagctctcttctcaacagccatctccagtggctgttggacaattatgagacagcagaaggagtgagccttcccagaagcactctgtacaaccactaccttcgacactgtcaggaacacaaactggacccagtcaatgctgcctcttttggaaaattaataagatcaatttttatggggctacgaaccaggagattgggcactagaggaaactccaaataccactactatgggattcgtgtcaagccagattcccctcttaatcgtctgcaagaagacatgcagtatatggctatgagacaacaacccatgcaacagaaacaaaggtacaagcctatgcagaaagtggatggggttgcagatggtttcacaggaagtggtcaacagacaggcacatctgttgagcaaactgtaattgcccaaagccaacatcatcaacagtttttagatgcatctcgagcacttccagagtttggagaagttgaaatctcttctctgccagatggtactacctttgaggatatcaagtcactgcagagtctttatagagagcactgtgaggcaatattggacgttgttgtgaatcttcaatttagcctgatagaaaaattgtggcaaacattctggcgctattctccctctactccaactgatggcactaccattaccgaatcgagcaatctgagtgaaatagaaagtcgacttccgaaagcaaagctgataactctgtgcaaacatgagtctatcctgaaatggatgtgtaactgtgaccatgggatgtaccaggctttggtggagattctcatccccgacgtccttagacctattcctagtgccttgacccaagccattcgaaattttgcaaaaagccttgaaggttggctttccaatgccatgaacaatattccacagagaatgatacaaaccaaggttgccgctgtaagtgcctttgcccagactctgcgaagatacacgtcgcttaatcacctggcccaggcagctcgtgcagtgcttcagaacacttcccaaatcaaccagatgcttagtgacctcaaccgtgtcgactttgccaatgtccaggagcaggcttcctgggtgtgccagtgtgatgacaacatggttcagagactagaaacagacttcaagatgactcttcagcagcagagcaccctggagcagtgggctgcgtggcttgacaatgtgatgatgcaagcactgaaaccctatgaaggaagacccagttttcctaaagccgccaggcagtttctgctaaaatggtctttctacagctcaatggttattcgggacttaaccttacgcagtgctgctagctttggctccttccacctgatccgtctactctacgacgaatatatgttttacttagtagaacatcgtgttgctcaggcaacaggagagactcctatagcagtcatgggcgaggtaagagaggctgaaagagctgtgacccactgggttattaaaaataagccagaattacacttcagtctaaatacattattgattaaaaccatggttcctaaccaagtcagcctcagagccaggagggactgtggagttattgcaagagttccttaaattcctctgttcttatgtgcttaatcaaaagattctaaaattgtggattatatcatgtgaaagttcatggaatgtgtctctatattatacaggtacctatgtaaaagaaaaacttgagaaccactggaatatgaaaaatattttaagtgggaaaaagattggtgctcctgataaagcaaagggctgggaatacaatggaaaggattaaatatgtattttgtagactctttcccggtctccaagaacaaagtaaatgattctattttagaaggataaaaatggtaatgatgataactaacattttttggacacttactatgtgcgaggcacagttctatgttttttacatgtaataaagcacttaatgcaagtctttgagatacgttctactttattctgttttacaataagcatccgaggtttatgcagaaagctaaggcacagaaaggttaaatgattactcagctaaaaaatggtagagatttttttttcaaacacagtctgattttcaaacccatatgcttctaaccactaatgatgtaagggggaaaattctcttcttcagaatttctgaatagtcatcaaaatggcttatcaaaaagcttaaactctgaatataacaagggctggttaatataatgaggaatagatgcaaatgctcagatggttcagcactggcttattttgttatattgaatgcaggaggcgggggtagtttataccttgtcgaatcataccagattattaaatgtgacaaattacccaaggcggtaaaaaagacatgttcacttttaagctatgtgtatgtgcttatataaataaaaaagagtgaaaacaga

SEQ ID NO: 2338 - protein, 707 aa, Homo sapiens
MQTSETGSDTGSTVTLQTSVASQAAVPTQVVQQVPVQQQVQQVQTVQQVQHVYPAQVQYVEGSDTVYTNGAIRTTTYPYTETQMYSQNTGGNYFDTQGSSAQVTTVVSSHSMVGTGGIQMGVTGGQLISSSGGTYLIGNSMENSGHSVTHTTRASPATIEMAIETLQKSDGLSTHRSSLLNSHLQWLLDNYETAEGVSLPRSTLYNHYLRHCQEHKLDPVNAASFGKLIRSIFMGLRTRRLGTRGNSKYHYYGIRVKPDSPLNRLQEDMQYMAMRQQPMQQKQRYKPMQKVDGVADGFTGSGQQTGTSVEQTVIAQSQHHQQFLDASRALPEFGEVEISSLPDGTTFEDIKSLQSLYREHCEAILDVVVNLQFSLIEKLWQTFWRYSPSTPTDGTTITESSNLSEIESRLPKAKLITLCKHESILKWMCNCDHGMYQALVEILIPDVLRPIPSALTQAIRNFAKSLEGWLSNAMNNIPQRMIQTKVAAVSAFAQTLRRYTSLNHLAQAARAVLQNTSQINQMLSDLNRVDFANVQEQASWVCQCDDNMVQRLETDFKMTLQQQSTLEQWAAWLDNVMMQALKPYEGRPSFPKAARQFLLKWSFYSSMVIRDLTLRSAASFGSFHLIRLLYDEYMFYLVEHRVAQATGETPIAVMGEVREAERAVTHWVIKNKPELHFSLNTLLIKTMVPNQVSLRARRDCGVIARVP

SEQ ID NO: 2339 - DNA, 3018 bp, Homo sapiens
cgtgcgagtgtctccctctccctctcgctctctctctctctccctctctctctctcttttgtgagttatagcaaccgttgccttgtgaatcaagcgccatagtcaccgtagtcctggcgactgttacccatcaacaacaactactcctctcctcctcctcctcctcttcctcctcctcctccccaccaccaccatctccatcacccaccaacaacaccacaataatccacagccaaggccacttggtcattctggcattttatggtagagaatacgttgagtttggctctggaaggaatatgagagaccatcatgcagacatcagagactgggtcggacacaggctcgacagtgaccttacaaacatctgtggctagtcaagcagcagtgcctacgcaggtggtacagcaagtaccagtacaacaacaggtacagcaggtacagactgtgcagcaggtacaacatgtctatcccgctcaggtgcagtatgtggaaggaagcgatactgtctataccaatggagcaatccgaacaacaacgtatccttacacagagacacagatgtacagccaaaatactggagggaattactttgatactcaagggagttccgcccaggtgactaccgtggtctcatcccacagtatggtgggcactggtgggattcagatgggcgtcacaggaggacaactcatcagcagctctggaggaacctatctgatcggcaactcaatggagaattctggtcactcagtgacacacacaactcgggcctccccagcgacaattgaaatggcgattgagacgctgcaaaagtctgacggtctgtccactcacagaagctctcttctcaacagccatctccagtggctgttggacaattatgagacagcagaaggagtgagccttcccagaagcactctgtacaaccactaccttcgacactgtcaggaacacaaactggacccagtcaatgctgcctcttttggaaaattaataagatcaatttttatggggctacgaaccaggagattgggcactagaggaaactccaaataccactactatgggattcgtgtcaagccagattcccctcttaatcgtctgcaagaagacatgcagtatatggctatgagacaacaacccatgcaacagaaacaaaggtacaagcctatgcagaaagtggatggggttgcagatggtttcacaggaagtggtcaacagacaggcacatctgttgagcaaactgtaattgcccaaagccaacatcatcaacagtttttagatgcatctcgagcacttccagagtttggagaagttgaaatctcttctctgccagatggtactacctttgaggatatcaagtcactgcagagtctttatagagagcactgtgaggcaatattggacgttgttgtgaatcttcaatttagcctgatagaaaaattgtggcaaacattctggcgctattctccctctactccaactgatggcactaccattaccgaatcgagcaatctgagtgaaatagaaagtcgacttccgaaagcaaagctgataactctgtgcaaacatgagtctatcctgaaatggatgtgtaactgtgaccatgggatgtaccaggctttggtggagattctcatccccgacgtccttagacctattcctagtgccttgacccaagccattcgaaattttgcaaaaagccttgaaggttggctttccaatgccatgaacaatattccacagagaatgatacaaaccaaggttgccgctgtaagtgcctttgcccagactctgcgaagatacacgtcgcttaatcacctggcccaggcagctcgtgcagtgcttcagaacacttcccaaatcaaccagatgcttagtgacctcaaccgtgtcgactttgccaatgtccaggagcaggcttcctgggtgtgccagtgtgatgacaacatggttcagagactagaaacagacttcaagatgactcttcagcagcagagcaccctggagcagtgggctgcgtggcttgacaatgtgatgatgcaagcactgaaaccctatgaaggaagacccagttttcctaaagccgccaggcagtttctgctaaaatggtctttctacagctcaatggttattcgggacttaaccttacgcagtgctgctagctttggctccttccacctgatccgtctactctacgacgaatatatgttttacttagtagaacatcgtgttgctcaggcaacaggagagactcctatagcagtcatgggcgagtttggtgatttaaatgccgtgtctcctggaaatctggataaagatgaaggcagtgaagtagaaagtgaaatggatgaagaactggatgactcttcagagcctcaagccaaaagagagaaaacagagctgagccaggcatttccagtgggctgcatgcagcctgttctcgagactggcgtgcaaccaagcctcctgaatccaattcacagcgagcacattgtcacaagtactcagactatcagacagtgcagcgctacaggaaatacctacactgcagtctaaagaatattaaagcgtatttttccagcttacattaaccctgttgatattgggcttaagttgaaaatttaataagcctgaaggtcgactgttgtcaaattctatctgtgctgaacattaactttttggagttgtgaaatggaatgggtgtatgtattttgccagatctttttttttaacgtaaacaaattatttgcttcttaataatgaattttttcccttagtttcaggtgtcaagaaggatttttacaacacttaatgtcaatgttttgttttcttataattaaaaagtaatttacattttttgtagcttaaaatattttattgttgattgttagtcttggtgtatgatttcatgtgtaagttttttaattagatgcacttctgtgaaatatcaaaaaaaaaaaaaaaaaaaaaaaaaaaaaaaaaaaaaaaaaaaaaaaaaaaaaaaaaaaaaaa

SEQ ID NO: 2340 - protein, 749 aa, Homo sapiens
MQTSETGSDTGSTVTLQTSVASQAAVPTQVVQQVPVQQQVQQVQTVQQVQHVYPAQVQYVEGSDTVYTNGAIRTTTYPYTETQMYSQNTGGNYFDTQGSSAQVTTVVSSHSMVGTGGIQMGVTGGQLISSSGGTYLIGNSMENSGHSVTHTTRASPATIEMAIETLQKSDGLSTHRSSLLNSHLQWLLDNYETAEGVSLPRSTLYNHYLRHCQEHKLDPVNAASFGKLIRSIFMGLRTRRLGTRGNSKYHYYGIRVKPDSPLNRLQEDMQYMAMRQQPMQQKQRYKPMQKVDGVADGFTGSGQQTGTSVEQTVIAQSQHHQQFLDASRALPEFGEVEISSLPDGTTFEDIKSLQSLYREHCEAILDVVVNLQFSLIEKLWQTFWRYSPSTPTDGTTITESSNLSEIESRLPKAKLITLCKHESILKWMCNCDHGMYQALVEILIPDVLRPIPSALTQAIRNFAKSLEGWLSNAMNNIPQRMIQTKVAAVSAFAQTLRRYTSLNHLAQAARAVLQNTSQINQMLSDLNRVDFANVQEQASWVCQCDDNMVQRLETDFKMTLQQQSTLEQWAAWLDNVMMQALKPYEGRPSFPKAARQFLLKWSFYSSMVIRDLTLRSAASFGSFHLIRLLYDEYMFYLVEHRVAQATGETPIAVMGEFGDLNAVSPGNLDKDEGSEVESEMDEELDDSSEPQAKREKTELSQAFPVGCMQPVLETGVQPSLLNPIHSEHIVTSTQTIRQCSATGNTYTAV

SEQ ID NO: 2341 - DNA, 4359 bp, Homo sapiens
gttgtaaacttcacctcccgggggctcttccccttctgtacccctttgctgtttgtccccctcctcccgggtcctggagtccgtcgtgttccaacagtttttgctcttattcccgtgggctgcctgggcctcctttcacccgtgagacttggagcggcccctggggtcttgggtgtgcagcacggatcacgcgagacccctgagacctcaaatcatctaacgtgaagccacagacatcttgggcaattttaatcatcaagaaagaaatatgtcattaagaaatagcagggtattttgaaagagttggaaaacatcatgaatttgaatacttcaagtaatactggtgatacccaaaggttgaagattgcctcattggatgtaaaacaaatacttaaaaatgaaacagagttggatattactgataatctcaggaagaaactccattgggctaaaaaagaaaagttagaaataacaaccaaacacaatgcagagctggcaagctatgagagccagattgccaagctacggtccgaggttgaaaagggagaagcattgcgacaaagtctggaatatgacctagctgttgctagaaaggaagctggtcttggaagacgggctgctgaagaaagattagccgaggcacataggatccaagaaaaactctgtgcacagaattcagaacttcaagcaaagacaaatgagactgagaaagcatttcagacttctcagcaaaaatggaaagaagaatgcagaagatttgaacatgatttggaggaaagagacaatatgatccaaaattgcaatcgagaatatgatttacttatgaaagaaaaaagcagactagagaaaactctacaggaagcgttggaaaaacatcaacgggagaagaatgagatggagtctcatatcagggagacagcattggaggagtttagattacaagaagaacaatgggaagcagaaagaagagaattacaatttatagtacaggagcaagatactgctgtgcaaaatatgcataagaaagtagaaaaattagaaacagaacatatggactgctctgaccttttacggcgacaaacaagtgaacttgaatttagcactcaacgagaggaacgccttagaaaagaatttgaggcaactactctaagagtgaggaaattagaagaaaacattgaagcagaaagagcagcgcatttggaatcaaaatttaattctgaaattattcagttacggattcgagaccttgaaggagctttgcaagtagagaaggccagtcaagcagaagctgttgctgatttggaaattatcaagaatgaattcaaagaagttgaaagtgcatatgagcgagaaaagcataatgcacaagagagctttgcaaaactaaatttattagaaaaagagtatttctccaaaaataagaaactaaatgaagacatcgaggaacagaagaaagtaattatagacctttcaaagagactccagtataatgaaaaaagttgcagtgaattacaggaagaactagtaatggctaagaagcaccaggccttcctagtagagacatgtgaaaataacgtgaaagaattggaatcgatcttggacagctttactgtgtcgggccagtggacatcaggcatccacaaggacaaagataaacctcccagcttctctgttgtccttgagagattgaggcgtaccttgacagattaccagaacaagctggaagatgcatctaatgaggaaaaggcatgtaatgaacttgattctacgaaacagaagatagactctcacactaaaaatataaaggaacttcaggataaactggctgatgttaataaagagttaagtcatttacacactaaatgtgcagaccgagaggctttaataagcactttaaaagtggaactacaaaatgtgctgcactgttgggagaaagaaaaggctcaggcagcccagtctgaaagtgaactgcagaagctttcccaggctttccataaggatgcagaggagaagctaaccttccttcacaccttatatcagcacttggtagcaggctgtgtgctcataaaacaaccagaaggcatgctggataaattctcttggtctgagctttgtgcagtcttacaggagaatgttgatgccctgattgcagacctcaacagggctaatgagaagataaggcatctagagtatatctgtaaaaacaagtctgacacgatgagagagcttcagcagactcaggaagacacctttaccaaagtggcagaacagatcaaagcccaagagagctgctggcacagacaaaagaaggaactagagctgcagtattctgaactcttcctggaggtgcagaagagggcacagaaatttcaagaaattgctgaaaaaaacatggaaaaattgaaccatattgagaagtcacatgaacagttggttcttgaaaattcgcacttcaaaaaactgttatcacagactcaaagggaacagatgtccttgctggcagcctgtgcattaatggctggtgccttatatcccctctatagccgatcatgcgccttgtctacacagagagattttctccaggagcaggtcaacacctttgagttgttcaaactggaaattagaactctagcccaggctttgtcaactgtagaggaaaagaagcaagaggaagccaagatgaaaaagaaaacattcaaaggattgatacgtatatttcggaaaggtgttattgctgttttggcagcaaacagactcaagattttgggccaatcatgtgcctctctttttacctggatggagagtttcaaagaaggcataggcatgttagtgtgcacaggagagccccaagacaagcataaatttccaaaacatcaaaaggagcagttgcgttgtttacaagcgctcagttggctcaccagttctgaccttcttgctgcaataatcagttctatggctgaattacaagacgtcattggtaaagcagatccaaattccagaatttgtggacatttactcataggtgcagccaagaattcttttgcaaaactcatggataaaattagtctggtaatggaatgtatacctctgcacagtagcaggagtattacatatgtagaaaaagattccctggttcagaggctggcccatggacttcataaagtaaacacactggccctgaaatatggtttgcgtggccatgtgcccattacgaaaagcacagcatcgttgcagaagcaaatacttggatttacacaaagactgcatgctgcagaagtggagcgccgctcactacgcttagaggtcacagaattcaaacgaagtgtgaatgaaatgaaaaaggagcttgacaaagcccagggtctgcaaatgcaattaaatgaatttaagcagtctaaattgatcacccatgagaagtttgaaagtgcatgtgaagaactaaataatgcattacttcgggaagagcaggcacaaatgctattgaatgaacaggcacaacaactacaggaattgaattataaacttgaattgcactccagtgaggaagctgacaaaaaccaaactcttggagaagctgttaagagtctctccgaggcaaagatggagctgagaagaaaagatcaatctctgcgtcagctcaatagacatcttacccagctggagcaggacaagcgtcgactggaggagaacatccatgatgcagagagtgccctccgcatggcagccaaagacaaagaatgtgttgctaatcacatgagagcagtagaaaatacgcttcacaaggtcagagatcagatctcgctgtcatggtctgcggcaagtaggaatgacttcaccctacagctacccaaactgcacctggagacctttgcaatggaggggctcaagggcgggccagaggtggtagcatgccaggctatgattaaaagtttcatggatgtctaccagcttgcaagcactagaatcatgacattagagaaggaaatgacatctcatcgaagtcacattgcagccttgaaatcagaacttcacacagcttgtttacgtgaaaatgcaagtttacaatcaataggatcacgagaccattcaaatctctccattccttcaagagctcctcttcctgctgacacaactggtattggggatttcttaccattgaaagctgaacttgatactacttacactttcttaaaggagacatttataaatactgtgccccatgctctgacatcatctcactcctctccagtgactatgtctgctaatgccaacagaccaactcagattggattatgacttcatgaaattaaaaaatggaggaagagttaacagtacaattaaaattgttttgaatgggaa

SEQ ID NO: 2342 - protein, 1326 aa, Homo sapiens
MNLNTSSNTGDTQRLKIASLDVKQILKNETELDITDNLRKKLHWAKKEKLEITTKHNAELASYESQIAKLRSEVEKGEALRQSLEYDLAVARKEAGLGRRAAEERLAEAHRIQEKLCAQNSELQAKTNETEKAFQTSQQKWKEECRRFEHDLEERDNMIQNCNREYDLLMKEKSRLEKTLQEALEKHQREKNEMESHIRETALEEFRLQEEQWEAERRELQFIVQEQDTAVQNMHKKVEKLETEHMDCSDLLRRQTSELEFSTQREERLRKEFEATTLRVRKLEENIEAERAAHLESKFNSEIIQLRIRDLEGALQVEKASQAEAVADLEIIKNEFKEVESAYEREKHNAQESFAKLNLLEKEYFSKNKKLNEDIEEQKKVIIDLSKRLQYNEKSCSELQEELVMAKKHQAFLVETCENNVKELESILDSFTVSGQWTSGIHKDKDKPPSFSVVLERLRRTLTDYQNKLEDASNEEKACNELDSTKQKIDSHTKNIKELQDKLADVNKELSHLHTKCADREALISTLKVELQNVLHCWEKEKAQAAQSESELQKLSQAFHKDAEEKLTFLHTLYQHLVAGCVLIKQPEGMLDKFSWSELCAVLQENVDALIADLNRANEKIRHLEYICKNKSDTMRELQQTQEDTFTKVAEQIKAQESCWHRQKKELELQYSELFLEVQKRAQKFQEIAEKNMEKLNHIEKSHEQLVLENSHFKKLLSQTQREQMSLLAACALMAGALYPLYSRSCALSTQRDFLQEQVNTFELFKLEIRTLAQALSTVEEKKQEEAKMKKKTFKGLIRIFRKGVIAVLAANRLKILGQSCASLFTWMESFKEGIGMLVCTGEPQDKHKFPKHQKEQLRCLQALSWLTSSDLLAAIISSMAELQDVIGKADPNSRICGHLLIGAAKNSFAKLMDKISLVMECIPLHSSRSITYVEKDSLVQRLAHGLHKVNTLALKYGLRGHVPITKSTASLQKQILGFTQRLHAAEVERRSLRLEVTEFKRSVNEMKKELDKAQGLQMQLNEFKQSKLITHEKFESACEELNNALLREEQAQMLLNEQAQQLQELNYKLELHSSEEADKNQTLGEAVKSLSEAKMELRRKDQSLRQLNRHLTQLEQDKRRLEENIHDAESALRMAAKDKECVANHMRAVENTLHKVRDQISLSWSAASRNDFTLQLPKLHLETFAMEGLKGGPEVVACQAMIKSFMDVYQLASTRIMTLEKEMTSHRSHIAALKSELHTACLRENASLQSIGSRDHSNLSIPSRAPLPADTTGIGDFLPLKAELDTTYTFLKETFINTVPHALTSSHSSPVTMSANANRPTQIGL

SEQ ID NO: 2343 - DNA, 2792 bp, Homo sapiens
aatttagagaagatgtagggagtgttcaacatgttcgttgtggaagagaaagagctaagagagaggagcttaaagacacaaacgggtagaatcaaggagtgtgctctcaaatgagaggaacaggagtgacattaaccttgaaatgctcggagactctactccttcatgacagtaggaggataattaacaatagatacaaatgcaggaattgatgagtgccatcagaaagctgtatcatgagctgcctgcacttctaaagtgtccagtggatttttaatcacatgagcctggaaatagggttatgaaaagaagctcagagcagagcaccgaaagtggccactaccagcatgaagagcccaacaattcaaactggtgaagtgagaaaaacagaatgcagctttcaaggttcgtttcaagcagttggcttgtgggactctgagagatgctgctgcccatgacatgcgggaattatcatgatcaactacccagcttggatttcatccagtggccaagagctttgtgtgggagacggcaagggttggatttttcaaaagagtaaaccaggataaatcatgaggaacctataacccttttggccacatgcaaaaaagcaagacccgtgaccaaggtgtagactaagaagtggagtcatgcttcacacggccatatcatgctggcagccattcctgggtctggctgtggtgttaatcttcatgggatccaccattggctgccccgctcgctgtgagtgctctgcccagaacaaatctgttagctgtcacagaaggcgattgatcgccatcccagagggcattcccatcgaaaccaaaatcttggacctcagtaaaaacaggctaaaaagcgtcaaccctgaagaattcatatcatatcctctgctggaagagatagacttgagtgacaacatcattgccaatgtggaaccaggagcattcaacaatctctttaacctgcgttccctccgcctaaaaggcaatcgtctaaagctggtccctttgggagtattcacggggctgtccaatctcactaagcttgacattagtgagaataagattgtcattttactagactacatgttccaagatctacataacctgaagtctctagaagtgggggacaatgatttggtttatatatcacacagggcattcagtgggcttcttagcttggagcagctcaccctggagaaatgcaacttaacagcagtaccaacagaagccctctcccacctccgcagcctcatcagcctgcatctgaagcatctcaatatcaacaatatgcctgtgtatgcctttaaaagattgttccacctgaaacacctagagattgactattggcctttactggatatgatgcctgccaatagcctctacggtctcaacctcacatccctttcagtcaccaacaccaatctgtctactgtacccttccttgcctttaaacacctggtatacctgactcaccttaacctctcctacaatcccatcagcactattgaagcaggcatgttctctgacctgatccgccttcaggagcttcatatagtgggggcccagcttcgcaccattgagcctcactccttccaagggctccgcttcctacgcgtgctcaatgtgtctcagaacctgctggaaactttggaagagaatgtcttctcctcccctagggctctggaggtcttgagcattaacaacaaccctctggcctgtgactgccgccttctctggatcttgcagcgacagcccaccctgcagtttggtggccagcaacctatgtgtgctggcccagacaccatccgtgagaggtctttcaaggatttccatagcactgccctttctttttactttacctgcaaaaaacccaaaatccgtgaaaagaagttgcagcatctgctagtagatgaagggcagacagtccagctagaatgcagtgcagatggagacccgcagcctgtgatttcctgggtgacaccccgaaggcgtttcatcaccaccaagtccaatggaagagccaccgtgttgggtgatggcaccttggaaatccgctttgcccaggatcaagacagcgggatgtatgtttgcatcgctagcaatgctgctgggaatgataccttcacagcctccttaactgtgaaaggattcgcttcagatcgttttctttatgcgaacaggacccctatgtacatgaccgactccaatgacaccatttccaatggcaccaatgccaatactttttccctggaccttaaaacaatactggtgtctacagctatgggctgcttcacattcctgggagtggttttattttgttttcttctcctttttgtgtggagccgagggaaaggcaagcacaaaaacagcattgaccttgagtatgtgcccagaaaaaacaatggtgctgttgtggaaggagaggtagctggacccaggaggttcaacatgaaaatgatttgaaggcccacccctcacattactgtctctttgtcaatgtgggtaatcagtaagacagtatggcacagtaaattactagattaagaggcagccatgtgcagctgcccctgtatcaaaagcagggtctatggaagcaggaggacttccaatggagactctccatcgaaaggcaggcaggcaggcatgtgtcagagcccttcacacagtgggatactaagtgtttgcgttgcaaatattggcgttctggggatctcagtaatgaacctgaatatttggctcacactcacggacaattattcagcattttctaccactgcaaaaaac

SEQ ID NO: 2344 - protein, 606 aa, Homo sapiens
MLHTAISCWQPFLGLAVVLIFMGSTIGCPARCECSAQNKSVSCHRRRLIAIPEGIPIETKILDLSKNRLKSVNPEEFISYPLLEEIDLSDNIIANVEPGAFNNLFNLRSLRLKGNRLKLVPLGVFTGLSNLTKLDISENKIVILLDYMFQDLHNLKSLEVGDNDLVYISHRAFSGLLSLEQLTLEKCNLTAVPTEALSHLRSLISLHLKHLNINNMPVYAFKRLFHLKHLEIDYWPLLDMMPANSLYGLNLTSLSVTNTNLSTVPFLAFKHLVYLTHLNLSYNPISTIEAGMFSDLIRLQELHIVGAQLRTIEPHSFQGLRFLRVLNVSQNLLETLEENVFSSPRALEVLSINNNPLACDCRLLWILQRQPTLQFGGQQPMCAGPDTIRERSFKDFHSTALSFYFTCKKPKIREKKLQHLLVDEGQTVQLECSADGDPQPVISWVTPRRRFITTKSNGRATVLGDGTLEIRFAQDQDSGMYVCIASNAAGNDTFTASLTVKGFASDRFLYANRTPMYMTDSNDTISNGTNANTFSLDLKTILVSTAMGCFTFLGVVLFCFLLLFVWSRGKGKHKNSIDLEYVPRKNNGAVVEGEVAGPRRFNMKMI

SEQ ID NO: 2345 - DNA, 5101 bp, Homo sapiens
cggaacccggtcgaaagggtcctctctggcgtccttctgcttccgtgggtttctggataggctgcgttttgttctcaggggatgcaagttcttcctttcagggttgaagcgtgagagaggttggtttttgaaacgggagtgtttcaggttattgaggtccaaaaagaaataaagtttttgtttacgtctgtatggcttgtaagatatctcccggggccaattcagcatctctacctggccatcctaacaaggtgatttgtgaaagggtgagacttcagagcctgttccctctcctcccaagtgatcagaacactaccgttcaagaggatgctcacttcaaagctttcttccagagtgaagatagtccaagtcctaagagacagcgcctctctcattcagtctttgattatacatcagcatcaccagctccctcaccaccaatgcgaccatgggagatgacatcaaataggcagcccccttcagttcgaccaagccaacatcacttctcaggggaacgatgcaacacacctgcacgcaacagaagaagtcctcctgtcaggcgccagagaggaagaagggatcgtctgtctcgacataattccattagtcaagatgaaaactatcaccatctcccttacgcacagcagcaagcaatagaggagcctcgagccttccaccctccgaatgtatctccccgtctgctacatcctgctgctcatccaccccagcagaatgcagtcatggttgacatacatgatcagctccatcaaggaacagtccctgtttcttacacagtaacaacagtggcaccacatgggattccactctgcacaggccagcacatccctgcttgtagtacacagcaggtcccaggatgctctgtggttttcagtggacagcacctccctgtctgtagtgtgcctcctccaatgcttcaggcatgttcagttcagcacttaccagtaccatatgctgcattcccaccccttatttctagtgatccatttcttatacatcctcctcacctttctccccatcatcctcctcatttgccaccaccaggccagtttgtccctttccaaacacagcaatcacgatcgcctctgcaaaggatagaaaatgaagtggaactcttaggagaacatcttccagtaggaggttttacttaccctccatcagcccaccccccaacattacctccatcagctcccttgcagttcttaacacatgatcctttgcatcaggaggtgtcctttggagtaccttatcctccatttatgcctcggaggcttacaggacgtagtagataccgatcccagcagccaataccacctcccccttatcatcccagcttactgccatatgtgttatcaatgcttccagtgccacctgcagtgggcccaactttcagctttgaattagatgtagaagatggagaagtagaaaattacgaggccctgttaaacctggcagagcgactgggagaggcaaagcctcgtggactgactaaagcagatattgaacaacttccttcttatcggttcaatcctaacaaccaccagtcagaacagactttgtgtgtagtatgcatgtgtgattttgagtcaaggcagctacttagagtcttaccctgtaaccacgagttccatgccaagtgtgttgacaaatggcttaaggcaaatcgtacttgcccaatttgccgagctgatgcttcagaagtgcatcgggattcagaatgaccaacctaagaagcacaaatttagtttgggtgttcctcatcacatgtatatacggactatccattgaacttaatctgtgtggcttccagccctccctttaccaaaagggtcaatggacctttctttgcactgtgtgacttaatcaactataaaagcttacaattagtcttcacagttatgggattgttatactaaccgtgtgattggaactccaaagactttttctttagcttaattttgtgtgtgcactaacattccctggtttttgtgtgatcattccgagtgttgctgcaagattacagtggacgtgatcttttagcatgtgcttttataaaaagtggtagctacagatgatatagcaatctaccttatatagagccttcagaaactgtgagtggaaatgaatgcgcagcgtatgactgttggtgataagtgtatctgtgtgagtgtgtgcaactacttgtgtgagggcatggtagctaacgtgtgtatgagatcctatataccagcatgtaccaagaatgtgtgtgtagttttaattatgctgcaatgtataatctggtgtgttatttaaacagcactagtactgtacactggtttttttcccttgtgtttgctgttgcacactgattgctgagggtgcatcaattacaagcattgaatactccatccccttccctcccagtgaatggaatgagaaaagccttcttcctttgcttcaggcagctgtcaccttctctttattggtggtcctaagtgggtcacttaagaaaaaaaagtgtaacaaattctcgctccatgaacctggtttttttttattctgttgtggaaatttttaaatctccaacttgctgtttccaaaaagaaggtgcaatatcatatatcatcagttagcaatattagcatttcaatcagtgatttgaatgttgatacttttttttcctttacatttccagtaagtttcttacagaaagtacctgtgattttttttaatgtttagatttgtagtctagtctattctgaagatatttgattaatatatttctaagaagaccactagtcccatgaagtctcaccttgttgacttccaccagaacaaaacctgttaattcagcttgacttctcatatgtgttctgtgttcaagctcctgtgggcaactcaattgttttaagaaaactctatttctgttcatattaattcacttgccagactccaattctgaaagttgtctagttcttccttcatcacacgtgcttctcatcgaaaccctggtttcaggatggatcaagtgctgttacagctcatgttccttagacctgatttgttttgatattttactgcctttccttttaatttttgtttgaatgagaaaagtttaatacaacaggtgtccagaatacttgcagtataaatgaagatttggtttttgtataaaaaaataatgctgttaaacaggagttgaccttcatttagttgatgtaatacatagctgtatggggttttttttagtaagttctttgagcataattcactttaaagtcatttttccagcaatgtttaaattactttctcattcttttagtgtattcaacattgtctgcctcttcctgcagttgatgtaattgctttgtttgcaatagcacaagctgcattattccagtcaggactgtgataacttgctgccagccccactcaactttcagttggctctgtgtcagttttccattcagtgttaactacttgttactgccatgctgcttgccctcccttgaagtgtctataagctcatcacagcctagagttaagtaaagtcaattcacagaagcacaattttgccctttgcgagacattgttgcctctatctagtcctacaagtagggttttgcatactgtgtttgcccctagggttgtcagtgcatcagaaatacttctaaatagtggtaaaaatgcacatggttaatgcacatgttacttttaaatcattaggatatccctcacctgttcctgatgaataaaaagtgtgttaaagaccaaaattcttggcataataatcagctacatacaaatcacatatagtttaatcttttttaatgaaaaaaaatcatgtttaaaatggcaaaagcccatcttatacacttttatatagctgcaaaaaatttatatctgtacagatctaacactacgacactcagtattcattttattgaagcatgcaagtaaagcactttttctaatttatatagaggtatctaattaacacagcacattgtactaatgactaggagtagcagctttttcttctctccctctatgaattcttataatgtccctttttctgtaagtttttgagaggcaattggcaatttaggaggcagcagggtctgttttggtcaaatcttgaatttcgttgttgcactctagtgactgatctttgggaatgtcttgtctttgcatggggctcatagagatgtgtgcagacttgcttattgtggttagtgtgtatcaggaacacacacacaggtgttctgaccagctcaggcttgccacagtgagcaactctgtggctagcaaaagagaagtttatttgtgcccagccattggtcaccttgggtgatgcaccagatagcaggcagatgttggttcattggccttcgtcctctttcctcctaaaataatattggctttaccatcttaactcagctgtgggttttttgtgggttcttgtttgttttttggcatgaattgtcatctttggtgtttttttaacccccagcccctcaaaaaaataaggcctccaggtatcaagatctcatattaggattttctgtccttaattttttgagcaaaatctggaaaatgtgaaagcatatttagattttatatactatctgaaatgtgatttgttaagattcttaaatttgggcctcttagaataattttgaatgagatctaccgactcacttgtgagaatatttttcacagattatctttgggccttttcattagaaagctgtttgtttgtccccctgttggtacatttggttacctcattttgccgtttcagattgtgaaagctcacaggggtgttttttggaatcatttgctgagtcattttctcaaatcatattccattgtatcagttaacatatagttttaaatgtatgtattataaatatctgtaaccaaatcatttgaaggcttgataaatttttaacaaagtttgtacattttttatgaaagttactagtaatgctttactaagtagtgcaatgaatttttatttttaatccctgtgcccaattttggagttgagagggttgttggtaataaatgtatgatgtacacttaaaaaaaaaaaaaa

SEQ ID NO: 2346 - protein, 515 aa, Homo sapiens
MACKISPGANSASLPGHPNKVICERVRLQSLFPLLPSDQNTTVQEDAHFKAFFQSEDSPSPKRQRLSHSVFDYTSASPAPSPPMRPWEMTSNRQPPSVRPSQHHFSGERCNTPARNRRSPPVRRQRGRRDRLSRHNSISQDENYHHLPYAQQQAIEEPRAFHPPNVSPRLLHPAAHPPQQNAVMVDIHDQLHQGTVPVSYTVTTVAPHGIPLCTGQHIPACSTQQVPGCSVVFSGQHLPVCSVPPPMLQACSVQHLPVPYAAFPPLISSDPFLIHPPHLSPHHPPHLPPPGQFVPFQTQQSRSPLQRIENEVELLGEHLPVGGFTYPPSAHPPTLPPSAPLQFLTHDPLHQEVSFGVPYPPFMPRRLTGRSRYRSQQPIPPPPYHPSLLPYVLSMLPVPPAVGPTFSFELDVEDGEVENYEALLNLAERLGEAKPRGLTKADIEQLPSYRFNPNNHQSEQTLCVVCMCDFESRQLLRVLPCNHEFHAKCVDKWLKANRTCPICRADASEVHRDSE

SEQ ID NO: 2347 - DNA, 5268 bp, Homo sapiens
gcggcggggcgcggcggggcggggaggggcgtggccgggccgggcccctagtgcggtgttgcgggacggggccgaggcccggtcggttggggcgtgggggcggagaggatggagcctccgaggcgttaggcgactctgtcatctctgggcgtgcagccgtcgtttcctggcgcggcccgtgtgatggtgccgggaggaaggaagcgcagtgacagtgcctaagttggagccggggttccgggggtgaggaggcccgcggacggcggatctggcgagctggccgcgggctgggcgagcagtcacaataggaggcggcggcccagcgaggatccgcgggagctgcccggcagggcggagcctcccctcgcagatatctcccggggccaattcagcatctctacctggccatcctaacaaggtgatttgtgaaagggtgagacttcagagcctgttccctctcctcccaagtgatcagaacactaccgttcaagaggatgctcacttcaaagctttcttccagagtgaagatagtccaagtcctaagagacagcgcctctctcattcagtctttgattatacatcagcatcaccagctccctcaccaccaatgcgaccatgggagatgacatcaaataggcagcccccttcagttcgaccaagccaacatcacttctcaggggaacgatgcaacacacctgcacgcaacagaagaagtcctcctgtcaggcgccagagaggaagaagggatcgtctgtctcgacataattccattagtcaagatgaaaactatcaccatctcccttacgcacagcagcaagcaatagaggagcctcgagccttccaccctccgaatgtatctccccgtctgctacatcctgctgctcatccaccccagcagaatgcagtcatggttgacatacatgatcagctccatcaaggaacagtccctgtttcttacacagtaacaacagtggcaccacatgggattccactctgcacaggccagcacatccctgcttgtagtacacagcaggtcccaggatgctctgtggttttcagtggacagcacctccctgtctgtagtgtgcctcctccaatgcttcaggcatgttcagttcagcacttaccagtaccatatgctgcattcccaccccttatttctagtgatccatttcttatacatcctcctcacctttctccccatcatcctcctcatttgccaccaccaggccagtttgtccctttccaaacacagcaatcacgatcgcctctgcaaaggatagaaaatgaagtggaactcttaggagaacatcttccagtaggaggttttacttaccctccatcagcccaccccccaacattacctccatcagctcccttgcagttcttaacacatgatcctttgcatcaggaggtgtcctttggagtaccttatcctccatttatgcctcggaggcttacaggacgtagtagataccgatcccagcagccaataccacctcccccttatcatcccagcttactgccatatgtgttatcaatgcttccagtgccacctgcagtgggcccaactttcagctttgaattagatgtagaagatggagaagtagaaaattacgaggccctgttaaacctggcagagcgactgggagaggcaaagcctcgtggactgactaaagcagatattgaacaacttccttcttatcggttcaatcctaacaaccaccagtcagaacagactttgtgtgtagtatgcatgtgtgattttgagtcaaggcagctacttagagtcttaccctgtaaccacgagttccatgccaagtgtgttgacaaatggcttaaggcaaatcgtacttgcccaatttgccgagctgatgcttcagaagtgcatcgggattcagaatgaccaacctaagaagcacaaatttagtttgggtgttcctcatcacatgtatatacggactatccattgaacttaatctgtgtggcttccagccctccctttaccaaaagggtcaatggacctttctttgcactgtgtgacttaatcaactataaaagcttacaattagtcttcacagttatgggattgttatactaaccgtgtgattggaactccaaagactttttctttagcttaattttgtgtgtgcactaacattccctggtttttgtgtgatcattccgagtgttgctgcaagattacagtggacgtgatcttttagcatgtgcttttataaaaagtggtagctacagatgatatagcaatctaccttatatagagccttcagaaactgtgagtggaaatgaatgcgcagcgtatgactgttggtgataagtgtatctgtgtgagtgtgtgcaactacttgtgtgagggcatggtagctaacgtgtgtatgagatcctatataccagcatgtaccaagaatgtgtgtgtagttttaattatgctgcaatgtataatctggtgtgttatttaaacagcactagtactgtacactggtttttttcccttgtgtttgctgttgcacactgattgctgagggtgcatcaattacaagcattgaatactccatccccttccctcccagtgaatggaatgagaaaagccttcttcctttgcttcaggcagctgtcaccttctctttattggtggtcctaagtgggtcacttaagaaaaaaaagtgtaacaaattctcgctccatgaacctggtttttttttattctgttgtggaaatttttaaatctccaacttgctgtttccaaaaagaaggtgcaatatcatatatcatcagttagcaatattagcatttcaatcagtgatttgaatgttgatacttttttttcctttacatttccagtaagtttcttacagaaagtacctgtgattttttttaatgtttagatttgtagtctagtctattctgaagatatttgattaatatatttctaagaagaccactagtcccatgaagtctcaccttgttgacttccaccagaacaaaacctgttaattcagcttgacttctcatatgtgttctgtgttcaagctcctgtgggcaactcaattgttttaagaaaactctatttctgttcatattaattcacttgccagactccaattctgaaagttgtctagttcttccttcatcacacgtgcttctcatcgaaaccctggtttcaggatggatcaagtgctgttacagctcatgttccttagacctgatttgttttgatattttactgcctttccttttaatttttgtttgaatgagaaaagtttaatacaacaggtgtccagaatacttgcagtataaatgaagatttggtttttgtataaaaaaataatgctgttaaacaggagttgaccttcatttagttgatgtaatacatagctgtatggggttttttttagtaagttctttgagcataattcactttaaagtcatttttccagcaatgtttaaattactttctcattcttttagtgtattcaacattgtctgcctcttcctgcagttgatgtaattgctttgtttgcaatagcacaagctgcattattccagtcaggactgtgataacttgctgccagccccactcaactttcagttggctctgtgtcagttttccattcagtgttaactacttgttactgccatgctgcttgccctcccttgaagtgtctataagctcatcacagcctagagttaagtaaagtcaattcacagaagcacaattttgccctttgcgagacattgttgcctctatctagtcctacaagtagggttttgcatactgtgtttgcccctagggttgtcagtgcatcagaaatacttctaaatagtggtaaaaatgcacatggttaatgcacatgttacttttaaatcattaggatatccctcacctgttcctgatgaataaaaagtgtgttaaagaccaaaattcttggcataataatcagctacatacaaatcacatatagtttaatcttttttaatgaaaaaaaatcatgtttaaaatggcaaaagcccatcttatacacttttatatagctgcaaaaaatttatatctgtacagatctaacactacgacactcagtattcattttattgaagcatgcaagtaaagcactttttctaatttatatagaggtatctaattaacacagcacattgtactaatgactaggagtagcagctttttcttctctccctctatgaattcttataatgtccctttttctgtaagtttttgagaggcaattggcaatttaggaggcagcagggtctgttttggtcaaatcttgaatttcgttgttgcactctagtgactgatctttgggaatgtcttgtctttgcatggggctcatagagatgtgtgcagacttgcttattgtggttagtgtgtatcaggaacacacacacaggtgttctgaccagctcaggcttgccacagtgagcaactctgtggctagcaaaagagaagtttatttgtgcccagccattggtcaccttgggtgatgcaccagatagcaggcagatgttggttcattggccttcgtcctctttcctcctaaaataatattggctttaccatcttaactcagctgtgggttttttgtgggttcttgtttgttttttggcatgaattgtcatctttggtgtttttttaacccccagcccctcaaaaaaataaggcctccaggtatcaagatctcatattaggattttctgtccttaattttttgagcaaaatctggaaaatgtgaaagcatatttagattttatatactatctgaaatgtgatttgttaagattcttaaatttgggcctcttagaataattttgaatgagatctaccgactcacttgtgagaatatttttcacagattatctttgggccttttcattagaaagctgtttgtttgtccccctgttggtacatttggttacctcattttgccgtttcagattgtgaaagctcacaggggtgttttttggaatcatttgctgagtcattttctcaaatcatattccattgtatcagttaacatatagttttaaatgtatgtattataaatatctgtaaccaaatcatttgaaggcttgataaatttttaacaaagtttgtacattttttatgaaagttactagtaatgctttactaagtagtgcaatgaatttttatttttaatccctgtgcccaattttggagttgagagggttgttggtaataaatgtatgatgtacacttaaaaaaaaaaaaaa

SEQ ID NO: 2348 - protein, 432 aa, Homo sapiens
MRPWEMTSNRQPPSVRPSQHHFSGERCNTPARNRRSPPVRRQRGRRDRLSRHNSISQDENYHHLPYAQQQAIEEPRAFHPPNVSPRLLHPAAHPPQQNAVMVDIHDQLHQGTVPVSYTVTTVAPHGIPLCTGQHIPACSTQQVPGCSVVFSGQHLPVCSVPPPMLQACSVQHLPVPYAAFPPLISSDPFLIHPPHLSPHHPPHLPPPGQFVPFQTQQSRSPLQRIENEVELLGEHLPVGGFTYPPSAHPPTLPPSAPLQFLTHDPLHQEVSFGVPYPPFMPRRLTGRSRYRSQQPIPPPPYHPSLLPYVLSMLPVPPAVGPTFSFELDVEDGEVENYEALLNLAERLGEAKPRGLTKADIEQLPSYRFNPNNHQSEQTLCVVCMCDFESRQLLRVLPCNHEFHAKCVDKWLKANRTCPICRADASEVHRDSE

SEQ ID NO: 2349 - DNA, 4951 bp, Homo sapiens
cggaacccggtcgaaagggtcctctctggcgtccttctgcttccgtgggtttctggataggctgcgttttgttctcaggggatgcaagttcttcctttcagggttgaagcgtgagagaggttggtttttgaaacgggagtgtttcaggttattgaggtccaaaaagaaataaagtttttgtttacgtctgtatggcttgtaagagtgaagatagtccaagtcctaagagacagcgcctctctcattcagtctttgattatacatcagcatcaccagctccctcaccaccaatgcgaccatgggagatgacatcaaataggcagcccccttcagttcgaccaagccaacatcacttctcaggggaacgatgcaacacacctgcacgcaacagaagaagtcctcctgtcaggcgccagagaggaagaagggatcgtctgtctcgacataattccattagtcaagatgaaaactatcaccatctcccttacgcacagcagcaagcaatagaggagcctcgagccttccaccctccgaatgtatctccccgtctgctacatcctgctgctcatccaccccagcagaatgcagtcatggttgacatacatgatcagctccatcaaggaacagtccctgtttcttacacagtaacaacagtggcaccacatgggattccactctgcacaggccagcacatccctgcttgtagtacacagcaggtcccaggatgctctgtggttttcagtggacagcacctccctgtctgtagtgtgcctcctccaatgcttcaggcatgttcagttcagcacttaccagtaccatatgctgcattcccaccccttatttctagtgatccatttcttatacatcctcctcacctttctccccatcatcctcctcatttgccaccaccaggccagtttgtccctttccaaacacagcaatcacgatcgcctctgcaaaggatagaaaatgaagtggaactcttaggagaacatcttccagtaggaggttttacttaccctccatcagcccaccccccaacattacctccatcagctcccttgcagttcttaacacatgatcctttgcatcaggaggtgtcctttggagtaccttatcctccatttatgcctcggaggcttacaggacgtagtagataccgatcccagcagccaataccacctcccccttatcatcccagcttactgccatatgtgttatcaatgcttccagtgccacctgcagtgggcccaactttcagctttgaattagatgtagaagatggagaagtagaaaattacgaggccctgttaaacctggcagagcgactgggagaggcaaagcctcgtggactgactaaagcagatattgaacaacttccttcttatcggttcaatcctaacaaccaccagtcagaacagactttgtgtgtagtatgcatgtgtgattttgagtcaaggcagctacttagagtcttaccctgtaaccacgagttccatgccaagtgtgttgacaaatggcttaaggcaaatcgtacttgcccaatttgccgagctgatgcttcagaagtgcatcgggattcagaatgaccaacctaagaagcacaaatttagtttgggtgttcctcatcacatgtatatacggactatccattgaacttaatctgtgtggcttccagccctccctttaccaaaagggtcaatggacctttctttgcactgtgtgacttaatcaactataaaagcttacaattagtcttcacagttatgggattgttatactaaccgtgtgattggaactccaaagactttttctttagcttaattttgtgtgtgcactaacattccctggtttttgtgtgatcattccgagtgttgctgcaagattacagtggacgtgatcttttagcatgtgcttttataaaaagtggtagctacagatgatatagcaatctaccttatatagagccttcagaaactgtgagtggaaatgaatgcgcagcgtatgactgttggtgataagtgtatctgtgtgagtgtgtgcaactacttgtgtgagggcatggtagctaacgtgtgtatgagatcctatataccagcatgtaccaagaatgtgtgtgtagttttaattatgctgcaatgtataatctggtgtgttatttaaacagcactagtactgtacactggtttttttcccttgtgtttgctgttgcacactgattgctgagggtgcatcaattacaagcattgaatactccatccccttccctcccagtgaatggaatgagaaaagccttcttcctttgcttcaggcagctgtcaccttctctttattggtggtcctaagtgggtcacttaagaaaaaaaagtgtaacaaattctcgctccatgaacctggtttttttttattctgttgtggaaatttttaaatctccaacttgctgtttccaaaaagaaggtgcaatatcatatatcatcagttagcaatattagcatttcaatcagtgatttgaatgttgatacttttttttcctttacatttccagtaagtttcttacagaaagtacctgtgattttttttaatgtttagatttgtagtctagtctattctgaagatatttgattaatatatttctaagaagaccactagtcccatgaagtctcaccttgttgacttccaccagaacaaaacctgttaattcagcttgacttctcatatgtgttctgtgttcaagctcctgtgggcaactcaattgttttaagaaaactctatttctgttcatattaattcacttgccagactccaattctgaaagttgtctagttcttccttcatcacacgtgcttctcatcgaaaccctggtttcaggatggatcaagtgctgttacagctcatgttccttagacctgatttgttttgatattttactgcctttccttttaatttttgtttgaatgagaaaagtttaatacaacaggtgtccagaatacttgcagtataaatgaagatttggtttttgtataaaaaaataatgctgttaaacaggagttgaccttcatttagttgatgtaatacatagctgtatggggttttttttagtaagttctttgagcataattcactttaaagtcatttttccagcaatgtttaaattactttctcattcttttagtgtattcaacattgtctgcctcttcctgcagttgatgtaattgctttgtttgcaatagcacaagctgcattattccagtcaggactgtgataacttgctgccagccccactcaactttcagttggctctgtgtcagttttccattcagtgttaactacttgttactgccatgctgcttgccctcccttgaagtgtctataagctcatcacagcctagagttaagtaaagtcaattcacagaagcacaattttgccctttgcgagacattgttgcctctatctagtcctacaagtagggttttgcatactgtgtttgcccctagggttgtcagtgcatcagaaatacttctaaatagtggtaaaaatgcacatggttaatgcacatgttacttttaaatcattaggatatccctcacctgttcctgatgaataaaaagtgtgttaaagaccaaaattcttggcataataatcagctacatacaaatcacatatagtttaatcttttttaatgaaaaaaaatcatgtttaaaatggcaaaagcccatcttatacacttttatatagctgcaaaaaatttatatctgtacagatctaacactacgacactcagtattcattttattgaagcatgcaagtaaagcactttttctaatttatatagaggtatctaattaacacagcacattgtactaatgactaggagtagcagctttttcttctctccctctatgaattcttataatgtccctttttctgtaagtttttgagaggcaattggcaatttaggaggcagcagggtctgttttggtcaaatcttgaatttcgttgttgcactctagtgactgatctttgggaatgtcttgtctttgcatggggctcatagagatgtgtgcagacttgcttattgtggttagtgtgtatcaggaacacacacacaggtgttctgaccagctcaggcttgccacagtgagcaactctgtggctagcaaaagagaagtttatttgtgcccagccattggtcaccttgggtgatgcaccagatagcaggcagatgttggttcattggccttcgtcctctttcctcctaaaataatattggctttaccatcttaactcagctgtgggttttttgtgggttcttgtttgttttttggcatgaattgtcatctttggtgtttttttaacccccagcccctcaaaaaaataaggcctccaggtatcaagatctcatattaggattttctgtccttaattttttgagcaaaatctggaaaatgtgaaagcatatttagattttatatactatctgaaatgtgatttgttaagattcttaaatttgggcctcttagaataattttgaatgagatctaccgactcacttgtgagaatatttttcacagattatctttgggccttttcattagaaagctgtttgtttgtccccctgttggtacatttggttacctcattttgccgtttcagattgtgaaagctcacaggggtgttttttggaatcatttgctgagtcattttctcaaatcatattccattgtatcagttaacatatagttttaaatgtatgtattataaatatctgtaaccaaatcatttgaaggcttgataaatttttaacaaagtttgtacattttttatgaaagttactagtaatgctttactaagtagtgcaatgaatttttatttttaatccctgtgcccaattttggagttgagagggttgttggtaataaatgtatgatgtacacttaaaaaaaaaaaaaa

SEQ ID NO: 2350 - protein, 465 aa, Homo sapiens
MACKSEDSPSPKRQRLSHSVFDYTSASPAPSPPMRPWEMTSNRQPPSVRPSQHHFSGERCNTPARNRRSPPVRRQRGRRDRLSRHNSISQDENYHHLPYAQQQAIEEPRAFHPPNVSPRLLHPAAHPPQQNAVMVDIHDQLHQGTVPVSYTVTTVAPHGIPLCTGQHIPACSTQQVPGCSVVFSGQHLPVCSVPPPMLQACSVQHLPVPYAAFPPLISSDPFLIHPPHLSPHHPPHLPPPGQFVPFQTQQSRSPLQRIENEVELLGEHLPVGGFTYPPSAHPPTLPPSAPLQFLTHDPLHQEVSFGVPYPPFMPRRLTGRSRYRSQQPIPPPPYHPSLLPYVLSMLPVPPAVGPTFSFELDVEDGEVENYEALLNLAERLGEAKPRGLTKADIEQLPSYRFNPNNHQSEQTLCVVCMCDFESRQLLRVLPCNHEFHAKCVDKWLKANRTCPICRADASEVHRDSE

SEQ ID NO: 2351 - DNA, 4999 bp, Homo sapiens
cttccccctcggggtggaaacaaagggggttcggcgcgcggtgcggagcctgggggaaaagggaggagcgctccggtggtctggcgcgctgggctcgctagatatctcccggggccaattcagcatctctacctggccatcctaacaaggtgatttgtgaaagggtgagacttcagagcctgttccctctcctcccaagtgatcagaacactaccgttcaagaggatgctcacttcaaagctttcttccagagtgaagatagtccaagtcctaagagacagcgcctctctcattcagtctttgattatacatcagcatcaccagctccctcaccaccaatgcgaccatgggagatgacatcaaataggcagcccccttcagttcgaccaagccaacatcacttctcaggggaacgatgcaacacacctgcacgcaacagaagaagtcctcctgtcaggcgccagagaggaagaagggatcgtctgtctcgacataattccattagtcaagatgaaaactatcaccatctcccttacgcacagcagcaagcaatagaggagcctcgagccttccaccctccgaatgtatctccccgtctgctacatcctgctgctcatccaccccagcagaatgcagtcatggttgacatacatgatcagctccatcaaggaacagtccctgtttcttacacagtaacaacagtggcaccacatgggattccactctgcacaggccagcacatccctgcttgtagtacacagcaggtcccaggatgctctgtggttttcagtggacagcacctccctgtctgtagtgtgcctcctccaatgcttcaggcatgttcagttcagcacttaccagtaccatatgctgcattcccaccccttatttctagtgatccatttcttatacatcctcctcacctttctccccatcatcctcctcatttgccaccaccaggccagtttgtccctttccaaacacagcaatcacgatcgcctctgcaaaggatagaaaatgaagtggaactcttaggagaacatcttccagtaggaggttttacttaccctccatcagcccaccccccaacattacctccatcagctcccttgcagttcttaacacatgatcctttgcatcaggaggtgtcctttggagtaccttatcctccatttatgcctcggaggcttacaggacgtagtagataccgatcccagcagccaataccacctcccccttatcatcccagcttactgccatatgtgttatcaatgcttccagtgccacctgcagtgggcccaactttcagctttgaattagatgtagaagatggagaagtagaaaattacgaggccctgttaaacctggcagagcgactgggagaggcaaagcctcgtggactgactaaagcagatattgaacaacttccttcttatcggttcaatcctaacaaccaccagtcagaacagactttgtgtgtagtatgcatgtgtgattttgagtcaaggcagctacttagagtcttaccctgtaaccacgagttccatgccaagtgtgttgacaaatggcttaaggcaaatcgtacttgcccaatttgccgagctgatgcttcagaagtgcatcgggattcagaatgaccaacctaagaagcacaaatttagtttgggtgttcctcatcacatgtatatacggactatccattgaacttaatctgtgtggcttccagccctccctttaccaaaagggtcaatggacctttctttgcactgtgtgacttaatcaactataaaagcttacaattagtcttcacagttatgggattgttatactaaccgtgtgattggaactccaaagactttttctttagcttaattttgtgtgtgcactaacattccctggtttttgtgtgatcattccgagtgttgctgcaagattacagtggacgtgatcttttagcatgtgcttttataaaaagtggtagctacagatgatatagcaatctaccttatatagagccttcagaaactgtgagtggaaatgaatgcgcagcgtatgactgttggtgataagtgtatctgtgtgagtgtgtgcaactacttgtgtgagggcatggtagctaacgtgtgtatgagatcctatataccagcatgtaccaagaatgtgtgtgtagttttaattatgctgcaatgtataatctggtgtgttatttaaacagcactagtactgtacactggtttttttcccttgtgtttgctgttgcacactgattgctgagggtgcatcaattacaagcattgaatactccatccccttccctcccagtgaatggaatgagaaaagccttcttcctttgcttcaggcagctgtcaccttctctttattggtggtcctaagtgggtcacttaagaaaaaaaagtgtaacaaattctcgctccatgaacctggtttttttttattctgttgtggaaatttttaaatctccaacttgctgtttccaaaaagaaggtgcaatatcatatatcatcagttagcaatattagcatttcaatcagtgatttgaatgttgatacttttttttcctttacatttccagtaagtttcttacagaaagtacctgtgattttttttaatgtttagatttgtagtctagtctattctgaagatatttgattaatatatttctaagaagaccactagtcccatgaagtctcaccttgttgacttccaccagaacaaaacctgttaattcagcttgacttctcatatgtgttctgtgttcaagctcctgtgggcaactcaattgttttaagaaaactctatttctgttcatattaattcacttgccagactccaattctgaaagttgtctagttcttccttcatcacacgtgcttctcatcgaaaccctggtttcaggatggatcaagtgctgttacagctcatgttccttagacctgatttgttttgatattttactgcctttccttttaatttttgtttgaatgagaaaagtttaatacaacaggtgtccagaatacttgcagtataaatgaagatttggtttttgtataaaaaaataatgctgttaaacaggagttgaccttcatttagttgatgtaatacatagctgtatggggttttttttagtaagttctttgagcataattcactttaaagtcatttttccagcaatgtttaaattactttctcattcttttagtgtattcaacattgtctgcctcttcctgcagttgatgtaattgctttgtttgcaatagcacaagctgcattattccagtcaggactgtgataacttgctgccagccccactcaactttcagttggctctgtgtcagttttccattcagtgttaactacttgttactgccatgctgcttgccctcccttgaagtgtctataagctcatcacagcctagagttaagtaaagtcaattcacagaagcacaattttgccctttgcgagacattgttgcctctatctagtcctacaagtagggttttgcatactgtgtttgcccctagggttgtcagtgcatcagaaatacttctaaatagtggtaaaaatgcacatggttaatgcacatgttacttttaaatcattaggatatccctcacctgttcctgatgaataaaaagtgtgttaaagaccaaaattcttggcataataatcagctacatacaaatcacatatagtttaatcttttttaatgaaaaaaaatcatgtttaaaatggcaaaagcccatcttatacacttttatatagctgcaaaaaatttatatctgtacagatctaacactacgacactcagtattcattttattgaagcatgcaagtaaagcactttttctaatttatatagaggtatctaattaacacagcacattgtactaatgactaggagtagcagctttttcttctctccctctatgaattcttataatgtccctttttctgtaagtttttgagaggcaattggcaatttaggaggcagcagggtctgttttggtcaaatcttgaatttcgttgttgcactctagtgactgatctttgggaatgtcttgtctttgcatggggctcatagagatgtgtgcagacttgcttattgtggttagtgtgtatcaggaacacacacacaggtgttctgaccagctcaggcttgccacagtgagcaactctgtggctagcaaaagagaagtttatttgtgcccagccattggtcaccttgggtgatgcaccagatagcaggcagatgttggttcattggccttcgtcctctttcctcctaaaataatattggctttaccatcttaactcagctgtgggttttttgtgggttcttgtttgttttttggcatgaattgtcatctttggtgtttttttaacccccagcccctcaaaaaaataaggcctccaggtatcaagatctcatattaggattttctgtccttaattttttgagcaaaatctggaaaatgtgaaagcatatttagattttatatactatctgaaatgtgatttgttaagattcttaaatttgggcctcttagaataattttgaatgagatctaccgactcacttgtgagaatatttttcacagattatctttgggccttttcattagaaagctgtttgtttgtccccctgttggtacatttggttacctcattttgccgtttcagattgtgaaagctcacaggggtgttttttggaatcatttgctgagtcattttctcaaatcatattccattgtatcagttaacatatagttttaaatgtatgtattataaatatctgtaaccaaatcatttgaaggcttgataaatttttaacaaagtttgtacattttttatgaaagttactagtaatgctttactaagtagtgcaatgaatttttatttttaatccctgtgcccaattttggagttgagagggttgttggtaataaatgtatgatgtacacttaaaaaaaaaaaaaa

SEQ ID NO: 2352 - protein, 432 aa, Homo sapiens; identical to SEQ ID NO: 2348

SEQ ID NO: 2353 - DNA, 5118 bp, Homo sapiens
gcggcggggcgcggcggggcggggaggggcgtggccgggccgggcccctagtgcggtgttgcgggacggggccgaggcccggtcggttggggcgtgggggcggagaggatggagcctccgaggcgttaggcgactctgtcatctctgggcgtgcagccgtcgtttcctggcgcggcccgtgtgatggtgccgggaggaaggaagcgcagtgacagtgcctaagttggagccggggttccgggggtgaggaggcccgcggacggcggatctggcgagctggccgcgggctgggcgagcagtcacaataggaggcggcggcccagcgaggatccgcgggagctgcccggcagggcggagcctcccctcgcagagtgaagatagtccaagtcctaagagacagcgcctctctcattcagtctttgattatacatcagcatcaccagctccctcaccaccaatgcgaccatgggagatgacatcaaataggcagcccccttcagttcgaccaagccaacatcacttctcaggggaacgatgcaacacacctgcacgcaacagaagaagtcctcctgtcaggcgccagagaggaagaagggatcgtctgtctcgacataattccattagtcaagatgaaaactatcaccatctcccttacgcacagcagcaagcaatagaggagcctcgagccttccaccctccgaatgtatctccccgtctgctacatcctgctgctcatccaccccagcagaatgcagtcatggttgacatacatgatcagctccatcaaggaacagtccctgtttcttacacagtaacaacagtggcaccacatgggattccactctgcacaggccagcacatccctgcttgtagtacacagcaggtcccaggatgctctgtggttttcagtggacagcacctccctgtctgtagtgtgcctcctccaatgcttcaggcatgttcagttcagcacttaccagtaccatatgctgcattcccaccccttatttctagtgatccatttcttatacatcctcctcacctttctccccatcatcctcctcatttgccaccaccaggccagtttgtccctttccaaacacagcaatcacgatcgcctctgcaaaggatagaaaatgaagtggaactcttaggagaacatcttccagtaggaggttttacttaccctccatcagcccaccccccaacattacctccatcagctcccttgcagttcttaacacatgatcctttgcatcaggaggtgtcctttggagtaccttatcctccatttatgcctcggaggcttacaggacgtagtagataccgatcccagcagccaataccacctcccccttatcatcccagcttactgccatatgtgttatcaatgcttccagtgccacctgcagtgggcccaactttcagctttgaattagatgtagaagatggagaagtagaaaattacgaggccctgttaaacctggcagagcgactgggagaggcaaagcctcgtggactgactaaagcagatattgaacaacttccttcttatcggttcaatcctaacaaccaccagtcagaacagactttgtgtgtagtatgcatgtgtgattttgagtcaaggcagctacttagagtcttaccctgtaaccacgagttccatgccaagtgtgttgacaaatggcttaaggcaaatcgtacttgcccaatttgccgagctgatgcttcagaagtgcatcgggattcagaatgaccaacctaagaagcacaaatttagtttgggtgttcctcatcacatgtatatacggactatccattgaacttaatctgtgtggcttccagccctccctttaccaaaagggtcaatggacctttctttgcactgtgtgacttaatcaactataaaagcttacaattagtcttcacagttatgggattgttatactaaccgtgtgattggaactccaaagactttttctttagcttaattttgtgtgtgcactaacattccctggtttttgtgtgatcattccgagtgttgctgcaagattacagtggacgtgatcttttagcatgtgcttttataaaaagtggtagctacagatgatatagcaatctaccttatatagagccttcagaaactgtgagtggaaatgaatgcgcagcgtatgactgttggtgataagtgtatctgtgtgagtgtgtgcaactacttgtgtgagggcatggtagctaacgtgtgtatgagatcctatataccagcatgtaccaagaatgtgtgtgtagttttaattatgctgcaatgtataatctggtgtgttatttaaacagcactagtactgtacactggtttttttcccttgtgtttgctgttgcacactgattgctgagggtgcatcaattacaagcattgaatactccatccccttccctcccagtgaatggaatgagaaaagccttcttcctttgcttcaggcagctgtcaccttctctttattggtggtcctaagtgggtcacttaagaaaaaaaagtgtaacaaattctcgctccatgaacctggtttttttttattctgttgtggaaatttttaaatctccaacttgctgtttccaaaaagaaggtgcaatatcatatatcatcagttagcaatattagcatttcaatcagtgatttgaatgttgatacttttttttcctttacatttccagtaagtttcttacagaaagtacctgtgattttttttaatgtttagatttgtagtctagtctattctgaagatatttgattaatatatttctaagaagaccactagtcccatgaagtctcaccttgttgacttccaccagaacaaaacctgttaattcagcttgacttctcatatgtgttctgtgttcaagctcctgtgggcaactcaattgttttaagaaaactctatttctgttcatattaattcacttgccagactccaattctgaaagttgtctagttcttccttcatcacacgtgcttctcatcgaaaccctggtttcaggatggatcaagtgctgttacagctcatgttccttagacctgatttgttttgatattttactgcctttccttttaatttttgtttgaatgagaaaagtttaatacaacaggtgtccagaatacttgcagtataaatgaagatttggtttttgtataaaaaaataatgctgttaaacaggagttgaccttcatttagttgatgtaatacatagctgtatggggttttttttagtaagttctttgagcataattcactttaaagtcatttttccagcaatgtttaaattactttctcattcttttagtgtattcaacattgtctgcctcttcctgcagttgatgtaattgctttgtttgcaatagcacaagctgcattattccagtcaggactgtgataacttgctgccagccccactcaactttcagttggctctgtgtcagttttccattcagtgttaactacttgttactgccatgctgcttgccctcccttgaagtgtctataagctcatcacagcctagagttaagtaaagtcaattcacagaagcacaattttgccctttgcgagacattgttgcctctatctagtcctacaagtagggttttgcatactgtgtttgcccctagggttgtcagtgcatcagaaatacttctaaatagtggtaaaaatgcacatggttaatgcacatgttacttttaaatcattaggatatccctcacctgttcctgatgaataaaaagtgtgttaaagaccaaaattcttggcataataatcagctacatacaaatcacatatagtttaatcttttttaatgaaaaaaaatcatgtttaaaatggcaaaagcccatcttatacacttttatatagctgcaaaaaatttatatctgtacagatctaacactacgacactcagtattcattttattgaagcatgcaagtaaagcactttttctaatttatatagaggtatctaattaacacagcacattgtactaatgactaggagtagcagctttttcttctctccctctatgaattcttataatgtccctttttctgtaagtttttgagaggcaattggcaatttaggaggcagcagggtctgttttggtcaaatcttgaatttcgttgttgcactctagtgactgatctttgggaatgtcttgtctttgcatggggctcatagagatgtgtgcagacttgcttattgtggttagtgtgtatcaggaacacacacacaggtgttctgaccagctcaggcttgccacagtgagcaactctgtggctagcaaaagagaagtttatttgtgcccagccattggtcaccttgggtgatgcaccagatagcaggcagatgttggttcattggccttcgtcctctttcctcctaaaataatattggctttaccatcttaactcagctgtgggttttttgtgggttcttgtttgttttttggcatgaattgtcatctttggtgtttttttaacccccagcccctcaaaaaaataaggcctccaggtatcaagatctcatattaggattttctgtccttaattttttgagcaaaatctggaaaatgtgaaagcatatttagattttatatactatctgaaatgtgatttgttaagattcttaaatttgggcctcttagaataattttgaatgagatctaccgactcacttgtgagaatatttttcacagattatctttgggccttttcattagaaagctgtttgtttgtccccctgttggtacatttggttacctcattttgccgtttcagattgtgaaagctcacaggggtgttttttggaatcatttgctgagtcattttctcaaatcatattccattgtatcagttaacatatagttttaaatgtatgtattataaatatctgtaaccaaatcatttgaaggcttgataaatttttaacaaagtttgtacattttttatgaaagttactagtaatgctttactaagtagtgcaatgaatttttatttttaatccctgtgcccaattttggagttgagagggttgttggtaataaatgtatgatgtacacttaaaaaaaaaaaaaa

SEQ ID NO: 2354 - protein, 432 aa, Homo sapiens; identical to SEQ ID NO: 2348

SEQ ID NO: 2355 - DNA, 2501 bp, Homo sapiens
cgaaaagattcttaggaacgccgtaccagccgcgtctctcaggacagcaggcccctgtccttctgtcgggcgccgctcagccgtgccctccgcccctcaggttctttttctaattccaaataaacttgcaagaggactatgaaagattatgatgaacttctcaaatattatgaattacatgaaactattgggacaggtggctttgcaaaggtcaaacttgcctgccatatccttactggagagatggtagctataaaaatcatggataaaaacacactagggagtgatttgccccggatcaaaacggagattgaggccttgaagaacctgagacatcagcatatatgtcaactctaccatgtgctagagacagccaacaaaatattcatggttcttgagtactgccctggaggagagctgtttgactatataatttcccaggatcgcctgtcagaagaggagacccgggttgtcttccgtcagatagtatctgctgttgcttatgtgcacagccagggctatgctcacagggacctcaagccagaaaatttgctgtttgatgaatatcataaattaaagctgattgactttggtctctgtgcaaaacccaagggtaacaaggattaccatctacagacatgctgtgggagtctggcttatgcagcacctgagttaatacaaggcaaatcatatcttggatcagaggcagatgtttggagcatgggcatactgttatatgttcttatgtgtggatttctaccatttgatgatgataatgtaatggctttatacaagaagattatgagaggaaaatatgatgttcccaagtggctctctcccagtagcattctgcttcttcaacaaatgctgcaggtggacccaaagaaacggatttctatgaaaaatctattgaaccatccctggatcatgcaagattacaactatcctgttgagtggcaaagcaagaatccttttattcacctcgatgatgattgcgtaacagaactttctgtacatcacagaaacaacaggcaaacaatggaggatttaatttcactgtggcagtatgatcacctcacggctacctatcttctgcttctagccaagaaggctcggggaaaaccagttcgtttaaggctttcttctttctcctgtggacaagccagtgctaccccattcacagacatcaagtcaaataattggagtctggaagatgtgaccgcaagtgataaaaattatgtggcgggattaatagactatgattggtgtgaagatgatttatcaacaggtgctgctactccccgaacatcacagtttaccaagtactggacagaatcaaatggggtggaatctaaatcattaactccagccttatgcagaacacctgcaaataaattaaagaacaaagaaaatgtatatactcctaagtctgctgtaaagaatgaagagtactttatgtttcctgagccaaagactccagttaataagaaccagcataagagagaaatactcactacgccaaatcgttacactacaccctcaaaagctagaaaccagtgcctgaaagaaactccaattaaaataccagtaaattcaacaggaacagacaagttaatgacaggtgtcattagccctgagaggcggtgccgctcagtggaattggatctcaaccaagcacatatggaggagactccaaaaagaaagggagccaaagtgtttgggagccttgaaagggggttggataaggttatcactgtgctcaccaggagcaaaaggaagggttctgccagagacgggcccagaagactaaagcttcactataatgtgactacaactagattagtgaatccagatcaactgttgaatgaaataatgtctattcttccaaagaagcatgttgactttgtacaaaagggttatacactgaagtgtcaaacacagtcagattttgggaaagtgacaatgcaatttgaattagaagtgtgccagcttcaaaaacccgatgtggtgggtatcaggaggcagcggcttaagggcgatgcctgggtttacaaaagattagtggaagacatcctatctagctgcaaggtataattgatggattcttccatcctgccggatgagtgtgggtgtgatacagcctacataaagactgttatgatcgctttgattttaaagttcattggaactaccaacttgtttctaaagagctatcttaagaccaatatctctttgtttttaaacaaaagatattattttgtgtatgaatctaaatcaagcccatctgtcattatgttactgtcttttttaatcatgtggttttgtatattaataattgttgactttcttagattcacttccatatgtgaatgtaagctcttaactatgtctctttgtaatgtgtaatttctttctgaaataaaaccatttgtgaatataaaaaaaaaaaaaaaaaaaaaaaaaaaaaaaaaaaaaaaaaaaaaaaaaaaaaaaaaaaaaaa

SEQ ID NO: 2356 - protein, 651 aa, Homo sapiens
MKDYDELLKYYELHETIGTGGFAKVKLACHILTGEMVAIKIMDKNTLGSDLPRIKTEIEALKNLRHQHICQLYHVLETANKIFMVLEYCPGGELFDYIISQDRLSEEETRVVFRQIVSAVAYVHSQGYAHRDLKPENLLFDEYHKLKLIDFGLCAKPKGNKDYHLQTCCGSLAYAAPELIQGKSYLGSEADVWSMGILLYVLMCGFLPFDDDNVMALYKKIMRGKYDVPKWLSPSSILLLQQMLQVDPKKRISMKNLLNHPWIMQDYNYPVEWQSKNPFIHLDDDCVTELSVHHRNNRQTMEDLISLWQYDHLTATYLLLLAKKARGKPVRLRLSSFSCGQASATPFTDIKSNNWSLEDVTASDKNYVAGLIDYDWCEDDLSTGAATPRTSQFTKYWTESNGVESKSLTPALCRTPANKLKNKENVYTPKSAVKNEEYFMFPEPKTPVNKNQHKREILTTPNRYTTPSKARNQCLKETPIKIPVNSTGTDKLMTGVISPERRCRSVELDLNQAHMEETPKRKGAKVFGSLERGLDKVITVLTRSKRKGSARDGPRRLKLHYNVTTTRLVNPDQLLNEIMSILPKKHVDFVQKGYTLKCQTQSDFGKVTMQFELEVCQLQKPDVVGIRRQRLKGDAWVYKRLVEDILSSCKV

SEQ ID NO: 2357 - DNA, 6147 bp, Homo sapiens
gcgggcgccggcaatcgagtggcttcctggccatggagaggagatctggacccgaggacgccagggactcctctccgtctccctggaccgctgtgtaggcacctgagttaacggacgctaagcggggtaggggaagtaacagtgtatcatgtatgccactgattccaggggacactcccctgctttcctccaacctcagaatggaaatagtcgtcacccatctggctatgttccagggaaggttgtcccattgcgtccccctcctcctccaaagagtcaagcttcagccaaatttacctccatcagacgagaagaccgggcaaccttcgcattctcacctgaagaacagcaagcccagagagaaagtcaaaagcaaaagagacacaaaaatactttcatttgttttgctattactagtttctcattttttattgcacttgcaatcattttaggaatatcctcaaaatatgctccagatgaaaattgcccagatcaaaatcctcgtctcaggaattgggatccaggacaagattctgcaaagcaagttgttatcaaggagggagatatgctccgtctgacctcagacgccaccgtgcattctatagtcattcaggatggaggactgcttgtatttggggacaataaagatggatccagaaatattactttgaggactcattacatcctgatccaggatggtggggcgcttcatattggagcagaaaaatgccgctataaatccaaagcgacaattaccttgtatggcaagtcagatgaaggtgaaagtatgccaacatttggcaaaaagtttattggtgtggaagctggcgggacactggagttacatggggcacggaaggcatcgtggacgttgttggcaaggaccctgaattcctcaggcttgccctttgggtcctatacctttgaaaaggacttttcccggggcctcaatgtgagggtcattgaccaagacacggccaaaattttggaaagtgagagatttgatacccatgaataccgcaatgagagcaggcggcttcaggagtttctgagattccaggatccaggtcggattgttgccatagctgtcggggattcagccgctaaaagtctcttacaaggaaccatccagatgatccaggaacggttgggaagtgaactgatccaaggactgggctacaggcaagcttgggctttagttggtgtcattgatggtggaagcacttcttgcaatgaatccgtgagaaactatgaaaatcatagcagtggcgggaaggctcttgcccaaagagaattttatactgtggatggccagaagttctctgtgacagcttatagtgaatggattgaaggcgtttctctttcaggattccgggtagaggttgtagatggagtgaagctaaatttgctagatgatgttagtagttggaaacctggagaccagattgtggtcgcaagcacagactattccatgtaccaagcagaggagttcactcttcttccctgttctgaatgcagccattttcaggtcaaagtcaaagaaacccctcagttcctgcacatgggtgagatcatagacggtgtagacatgagagctgaggttggaattcttacccggaatattgtgatccaaggagaagtggaggactcatgctacgcagaaaatcagtgccaattttttgattatgatacctttgggggacacattatgataatgaaaaattttacttcagtccatctttcttatgtggaattgaaacacatgggtcagcagcagatggggcgataccctgttcattttcacctgtgtggtgacgtggattataaaggaggatacagacatgcaacatttgtggacggcctgtctattcatcacagcttctcaaggtgcatcactgtgcatgggacaaatggcttgctaataaaagacaccattgggtttgacacactaggtcattgtttctttttggaagatggtattgaacagaggaatactttgttccacaatctgggactcctcaccaagccgggtactctcctgcccaccgataggaacaactccatgtgtaccaccatgcgagataaagtgtttggaaattacattcctgtgcctgctactgactgtatggctgtttcaactttctggattgctcatcccaacaataatctgattaataatgcagctgcaggctcacaggatgctggaatatggtatttattccacaaggaaccaactggggaatccagtggattgcagctcttggcaaaaccagaactcactccattgggtatattttataacaacagggtccattcaaattttaaggctggcttatttattgacaaaggtgtcaaaacaaccaactctagtgctgctgacccaagggaatacctctgtttggacaatagtgcaagatttcgacctcatcaggatgcaaaccccgaaaaaccacgtgttgctgctctaattgacaggctcattgcttttaaaaataatgataatggagcttgggtcagaggaggagatattatcgttcaaaattcagcatttgcagataatggaataggactgacctttgccagtgatggaagcttcccaagtgatgaaggttccagccaagaggtatctgaatctctctttgttggggagagcaggaattacggctttcagggtggtcagaacaagtatgtaggcactggaggaatagaccagaagcctcgaacattacccaggaacaggacgttcccaattagaggctttcagatttatgatgggcccattcatctcacaaggagcactttcaaaaaatatgtgccaactccagataggtacagcagtgcaattggcttcctcatgaagaattcctggcagataacccccaggaataatatctccctcgtgaagtttggtccacatgtctctctgaatgtcttttttggaaagcctggtccctggtttgaagattgtgagatggatggtgataagaactccatattccatgacattgatggctctgtgacaggatacaaggatgcttatgtgggaagaatggacaactacctgatccgccatccaagctgtgtaaatgtgtctaagtggaatgcagtgatctgcagtgggacctatgcacaggtctatgtacagacatggagcactcagaatctttctatgaccattacacgagatgagtatccgtccaaccctatggtgctccgaggtattaatcagaaggctgcctttccacagtaccagcctgtcgtcatgctggagaagggttataccatccactggaatgggccggcaccacggactacatttctatacctcgtcaacttcaacaagaatgactggattcgagttggcctttgctatccatcaaacacaagttttcaagttacctttggctatttgcagcggcagaatggctcattatccaaaatcgaagaatatgagcctgtgcattcactggaagaactgcaaagaaagcaatccgagaggaaattctattttgactccagcacggggttactgtttttgtatctcaaagccaaaagccacaggcatggccacagttactgttcatctcagggatgtgaaagagtcaagatccaagcagccacagactcaaaggacatcagtaactgcatggccaaagcatacccacagtactacagaaagccgtcagtggtcaagcggatgccggccatgctcactggactctgtcaaggctgtggcactcggcaggtggtgtttactagtgatcctcataaaagttacctccctgtgcaattccagtcacctgataaagcagaaacccagcgtggagacccgtctgttatttctgtcaatggcactgactttaccttccgaagtgcaggcgtcctcctccttgttgtggatccgtgcagcgttccattccgcttgacggaaaaaacggtttttcctcttgctgatgtcagtcgcattgaagagtatttaaaaacaggcatccctccaaggtccattgttctgttgagcacaagaggagaaataaagcagttaaacatttcacacttactagtacctctgggattagccaaaccagctcatctttatgacaaagggagtaccatatttttgggattcagtggaaactttaaaccatcatggactaagctatttaccagtcctgctggacagggccttggggtgcttgaacaattcatacctttgcagctggacgaatatggttgtcccagagccaccactgtccgcagaagagacctggaactgctaaagcaagcttcaaaagcacattagagactaactgtaacttaagtgctgggggaaaaaaaatgtgaactaacttatttaatttatggcattttaaaatgacactgttaacccaacggaaccattttccagtttgatacagaatggggagaaaagaaagcgtttgaaattattgcttggataccagcttcatgcaccttctagttgtacaaaatgttaaagacgttgtttgtatttgtaaggctggtgtattcagagagcagatctcttattcctcactttccacccccgtattttgtaatgaccatgagcaatgtttttactttttgtataatggggtggggtggagtgggggcttctgagagtcagcctgaggtctttagaggaccagctattgtagcaccttggatacttgaagtttaatgctcagttgggtcgggtggcagttgacttggtggctggcatgttcagcagtgcctggggccctgtttctgggcagcctttgaggattttctatgatattgaatgacagttttaagtggcaactcaggcccagctcatgcccttttttgcctggacatgtgctatttttattcacttatatatcaattacttgtaagggttaaactttcaaacaggaagtatattgggacaaaagggctcttggggattagatatccctttaatctgtgaccatggggcaaaaaattttcctgcagcaaaagtctgaggctgttgggaccatttttgcagctttaatccttagcctcttttgactgtatatttgtgtttaaaatgcagagctcaactgaatatttccttttttgttttgttttgttttgttttaagaagtaggttgttttcctgaaccgtaaacttgtatcattttaacttgcacaaaggaagtctgttcttggtattgctcttgcacttgggttttttgttattgttttgtgtggattttttaaagcttttctgttcaccctcctgccaggaaaatcccagaaagcttaatgataccccaaaatgattacacccagggaggaaaaaaaggagcgctttctagggtcagaatcgtggagagaatactcagaacatgaacctctttaaagccttgcaggaatgagtcactcttacttaatgaaatgttaaagccaattaaaaagcatgctgtgatgcccagcttccctttccacagggtgcatgcgtctcctgctggtgaatcacatgcggcaagaggcaactggctccacagcctgggatgctgccgtaccaagaggaaagaagcagcaaaatgcctttacgttgttctaaacccccgacgcataaagtgtagaggagggatggccaagggtgggtggtagaaagtgtgttcaggctgacactggcaatgagtacagataatttcactttcctcttccaggggcaaaggctgatggcctctacctttgtatccaggagaaactgcagagcagccctgtgactttacaaaatatgctacctcaaagtgctaccgataaacctttctaattgtaagtgcccttactaagggcacatgtcttaatcaaagttagttttttgttttctggtttgttttttttttttttgtatattgatgaatgagatcttacctattaaatatattattggaaaaaaaaaaaaaaaaaaaattaaagtttgagtgtgtgtgtgtgtgtgtgtgtgtgtgtgtgtgtgtgtgttttatgacttaaatatctttacgtgtgttttttagagcttggttctttaaagatttggagaagatatgtaaattaccaaggcacttggtttttctgttttatatactaataatcagggcctaagttaaataaaaatatgtgtgcatgtatttt

SEQ ID NO: 2358 - protein, 1383 aa, Homo sapiens
MYATDSRGHSPAFLQPQNGNSRHPSGYVPGKVVPLRPPPPPKSQASAKFTSIRREDRATFAFSPEEQQAQRESQKQKRHKNTFICFAITSFSFFIALAIILGISSKYAPDENCPDQNPRLRNWDPGQDSAKQVVIKEGDMLRLTSDATVHSIVIQDGGLLVFGDNKDGSRNITLRTHYILIQDGGALHIGAEKCRYKSKATITLYGKSDEGESMPTFGKKFIGVEAGGTLELHGARKASWTLLARTLNSSGLPFGSYTFEKDFSRGLNVRVIDQDTAKILESERFDTHEYRNESRRLQEFLRFQDPGRIVAIAVGDSAAKSLLQGTIQMIQERLGSELIQGLGYRQAWALVGVIDGGSTSCNESVRNYENHSSGGKALAQREFYTVDGQKFSVTAYSEWIEGVSLSGFRVEVVDGVKLNLLDDVSSWKPGDQIVVASTDYSMYQAEEFTLLPCSECSHFQVKVKETPQFLHMGEIIDGVDMRAEVGILTRNIVIQGEVEDSCYAENQCQFFDYDTFGGHIMIMKNFTSVHLSYVELKHMGQQQMGRYPVHFHLCGDVDYKGGYRHATFVDGLSIHHSFSRCITVHGTNGLLIKDTIGFDTLGHCFFLEDGIEQRNTLFHNLGLLTKPGTLLPTDRNNSMCTTMRDKVFGNYIPVPATDCMAVSTFWIAHPNNNLINNAAAGSQDAGIWYLFHKEPTGESSGLQLLAKPELTPLGIFYNNRVHSNFKAGLFIDKGVKTTNSSAADPREYLCLDNSARFRPHQDANPEKPRVAALIDRLIAFKNNDNGAWVRGGDIIVQNSAFADNGIGLTFASDGSFPSDEGSSQEVSESLFVGESRNYGFQGGQNKYVGTGGIDQKPRTLPRNRTFPIRGFQIYDGPIHLTRSTFKKYVPTPDRYSSAIGFLMKNSWQITPRNNISLVKFGPHVSLNVFFGKPGPWFEDCEMDGDKNSIFHDIDGSVTGYKDAYVGRMDNYLIRHPSCVNVSKWNAVICSGTYAQVYVQTWSTQNLSMTITRDEYPSNPMVLRGINQKAAFPQYQPVVMLEKGYTIHWNGPAPRTTFLYLVNFNKNDWIRVGLCYPSNTSFQVTFGYLQRQNGSLSKIEEYEPVHSLEELQRKQSERKFYFDSSTGLLFLYLKAKSHRHGHSYCSSQGCERVKIQAATDSKDISNCMAKAYPQYYRKPSVVKRMPAMLTGLCQGCGTRQVVFTSDPHKSYLPVQFQSPDKAETQRGDPSVISVNGTDFTFRSAGVLLLVVDPCSVPFRLTEKTVFPLADVSRIEEYLKTGIPPRSIVLLSTRGEIKQLNISHLLVPLGLAKPAHLYDKGSTIFLGFSGNFKPSWTKLFTSPAGQGLGVLEQFIPLQLDEYGCPRATTVRRRDLELLKQASKAH

SEQ ID NO: 2359 - DNA, 3153 bp, Homo sapiens
agtaggctggagccggggtcagctttggcaccttcctccagtcagtggccaactcctggctcagtggggattgtgctcgtcccctccgttcccctccagtcttcctcccgctaccggaacgagcctcgcgcttggcaggctgaggaggagcaaagaaagcaggattaaagagaaggaagacctggctaggtctgggtggcgtctgcagtgccagaaagggaggcggtggcggcggcggctgcgaccacggccgcgcgggacgtgaggcccgagagcaaccgacgggcagcggcggccgctccagcgccccgcaccggggccgttagtcagcagaacgcgagctcttgtggaggagcagggccggcgcgaggcgagactcgggagcgtgagcggggcccctggggcgccgccgtccttcttcgccccggcgccgggggctgtagccctggtccccgctcctctgtcgggccagtctgcaggcggagagagtcggacggcgcccggagcgcggatctcgccttgtggaggacagcgcgtcggctgcggttctctctcgaccccttctgcccggcgcttcggcccgggccgctcaggtgcagagcatgaataatctttcatttagtgagctatgttgcctcttctgctgtccaccttgtccagggaagattgcttcaaaattagcgtttttgccacctgatccaacttacacactgatgtgtgatgaaagcggaagccgttggactttacatctgtctgaacgagcagactggcagtattcttctagagaaaaagatgctattgagtgtttcatgactagaaccagtaaaggcaacagaattgcttgtatgtttgtacgttgttcacccaatgcgaaatacactttactcttctcacatggaaatgctgttgatcttggtcaaatgagcagcttttacataggactaggatcacggattaattgtaatatattctcatatgattattctggatatggtgccagttccgggaaacccacagagaagaacctctatgcagacattgaagctgcttggcttgctcttaggacaagatatggcattcgccctgaaaatgtgattatatatggccaaagtatagggacagtaccgtctgtggatcttgctgctcgatatgagagtgctgctgttattcttcattctcctctgacttcgggaatgcgagttgcctttcctgataccaagaagacctactgttttgatgcattcccaaacattgacaaaatctctaagataacctctccagtattaataattcatgggactgaagatgaagtcattgacttttcacatggcctcgcattgtttgaacgttgccaaagacctgtggagcctctctgggttgaaggagcaggtcacaatgatgtggaactttatggacagtatcttgaaaggttgaaacagtttgtgtcacaggaactggtaaatttgtaaaatattctgtaaatttgctactgggttttcctttcttgctgaactgcactctttggtaaataacataaaacctgaaggttttgtttgcaaatcatgtcagttgccttcataaatgtacaggtaatgatttgttaacagacttaatgaaggttttaattaccagaactaaaaactggaaataacagtaccgtgcagtcaggctgtgtaatttatattttttctgtgaatttttttttaacatcaagatgagtactgtatgagattttaattctataaaatcaaatgctgtaaaagtattgccaaatgcttttgcatactagaaacaaatttataaatatttttaaaacatctcaatatattaaatcttatcctggaatacaactgtaatattttgaaaaaagctatgtatctaaagcaatttaagtactcataatggaatgaactgtaaaagagatttaaaaccatgcaagttcactagaattaacctaaaccctgttgtacagggatagaggtttaaagttattttattgtaaaatacattgaattttctgtatactctgattacatacatttatcctttaaaaaagatgtaaatcttaatttttatgccatctattaatttaccaatgagttaccttgtaaatgagaagtcatgatagcactgaattttaactagttttgacttctaagtttggtactgtgaggcaagtacttaaaattttcatgctggttacttaaaaggcatttagagatttcaagaatgattttgtatacgatgttttaaattttgactgatctcatagtcttcatagaattgcagtagtcttcattgtatgaaatcccgaaagtccatgagttgatcttaaagaccactaacagactggctatcagatcccttttcactttggctatttttttcattttttgagatggagtcttgctgtgtcactgaggctggagtgcagtggcgcgatcttgactcactgcaacctctgcctcccaggatcaagtgattctcctgcctcagcctcctgagtagctggtattacagatgcttgccaccacgcctggctaatttttgtatttttagtagagacagggttttgccatgttgatcaggctggtcttgaactcctgacctcatgatctgcccttggcctcccaaagtgtcggaattacaggcatgagccactgcgcctggcccactttagctatttttaaaaataggacctattgttttggattactatctgagaatttcatggattcactcctgggtataggagataagaatacgtttaattcataacttttatattaaccaatatagtaaaaaaataaagctcacacatacaaaaactaagttgcctttccttgaatgaaccctgtctgaataaaacaatgaaaaataaaaataaaattaatggtatgtagtctaatttgtaaatgaatgaatatggaaataatacacactgtggatatattttaaggccttatgtagttttaattgttctgctcgttccgtggttatgtttaagactatagtatatgactctcttcaaagtatatcaagtattgtgaatgctttggttcagatgtgtcaaattaacagtaaaacaacaaatataccactgaaaaaaaaaaaaaaaaaaaaaaaaaaaaaaaaaaaaaaaaaaaaaaaaaa

SEQ ID NO: 2360 - protein, 288 aa, Homo sapiens
MNNLSFSELCCLFCCPPCPGKIASKLAFLPPDPTYTLMCDESGSRWTLHLSERADWQYSSREKDAIECFMTRTSKGNRIACMFVRCSPNAKYTLLFSHGNAVDLGQMSSFYIGLGSRINCNIFSYDYSGYGASSGKPTEKNLYADIEAAWLALRTRYGIRPENVIIYGQSIGTVPSVDLAARYESAAVILHSPLTSGMRVAFPDTKKTYCFDAFPNIDKISKITSPVLIIHGTEDEVIDFSHGLALFERCQRPVEPLWVEGAGHNDVELYGQYLERLKQFVSQELVNL

SEQ ID NO: 2361 - DNA, 1614 bp, Homo sapiens
agtaggctggagccggggtcagctttggcaccttcctccagtcagtggccaactcctggctcagtggggattgtgctcgtcccctccgttcccctccagtcttcctcccgctaccggaacgagcctcgcgcttggcaggctgaggaggagcaaagaaagcaggattaaagagaaggaagacctggctaggtctgggtggcgtctgcagtgccagaaagggaggcggtggcggcggcggctgcgaccacggccgcgcgggacgtgaggcccgagagcaaccgacgggcagcggcggccgctccagcgccccgcaccggggccgttagtcagcagaacgcgagctcttgtggaggagcagggccggcgcgaggcgagactcgggagcgtgagcggggcccctggggcgccgccgtccttcttcgccccggcgccgggggctgtagccctggtccccgctcctctgtcgggccagtctgcaggcggagagagtcggacggcgcccggagcgcggatctcgccttgtggaggacagcgcgtcggctgcggttctctctcgaccccttctgcccggcgcttcggcccgggccgctcaggtgcagagcatgaataatctttcatttagtgagctatgttgcctcttctgctgtccaccttgtccagggaagattgcttcaaaattagcgtttttgccacctgatccaacttacacactgatgtgtgatgaaagcggaagccgttggactttacatctgtctgaacgagcagactggcagtattcttctagagaaaaagatgctattgagtgtttcatgactagaaccagtaaaggcaacagaattgcttgtatgtttgtacgttgttcacccaatgcgaaatacactttactcttctcacatggaaatgctgttgatcttggtcaaatgagcagcttttacataggactaggatcacggattaattgtaatatattctcatatgattattctggatatggtgccagttccgggaaacccacagagaagaacctctatgcagacattgaagctgcttggcttgctcttaggacaagatatggcattcgccctgaaaatgtgattatatatggccaaagtatagggacagtaccgtctgtggatcttgctgctcgatatgagagtgctgctgttattcttcattctcctctgacttcgggaatgcgagttgcctttcctgataccaagaagacctactgttttgatgcattcccaaacattgacaaaatctctaagataacctctccagtattaataattcatgggactgaagatgaagtcattgacttttcacatggcctcgcattgtttgaacgttgccaaagacctgtggagcctctctgggttgaaggagcaggtcacaatgatgtggaactttatggacagtatcttgaaaggttgaaacagtttgtgtcacaggaactggtgcagaaacataaagaagggaagtgattttctcaaggtctacagttttcaatgacggtactatgtattccattatcttctctttaccaaacttaactggattaatataccaatgatcctttcaaattatatgacataaacttatttgctctccaaa

SEQ ID NO: 2362 - protein, 293 aa, Homo sapiens
MNNLSFSELCCLFCCPPCPGKIASKLAFLPPDPTYTLMCDESGSRWTLHLSERADWQYSSREKDAIECFMTRTSKGNRIACMFVRCSPNAKYTLLFSHGNAVDLGQMSSFYIGLGSRINCNIFSYDYSGYGASSGKPTEKNLYADIEAAWLALRTRYGIRPENVIIYGQSIGTVPSVDLAARYESAAVILHSPLTSGMRVAFPDTKKTYCFDAFPNIDKISKITSPVLIIHGTEDEVIDFSHGLALFERCQRPVEPLWVEGAGHNDVELYGQYLERLKQFVSQELVQKHKEGK

SEQ ID NO: 2363 - DNA, 1328 bp, Homo sapiens
cgaggctgcgccgcgtggagtggcttggcttaacagcagggagggcagagcgatgctctttgacctcccagaagagtcacgtgggctgacccagagccggggcggaaaggctgcgttagtttcttccgggtcattgacagaagcgtcaattcctgggagtagttcgttggttttctttcccctcatccttttgcctgctcccggcgaggggtggctttgatttcggcgatgagctcccagaaaggcaacgtggctcgttccagacctcagaagcaccagaatacgtttagcttcaaaaatgacaagttcgataaaagtgtgcagaccaagaaaattaatgcaaaacttcatgatggagtatgtcagcgctgtaaagaagttcttgagtggcgtgtaaaatacagcaaatacaaaccattatcaaaacctaaaaagtgtgttaaatgtttacaaaagacagtgaaggattcttatcacataatgtgcaggccatgtgcctgtgaacttgaagtttgcgcaaaatgtggaaagaaagaagacattgttattccgttgaataaagaaacagaaaaaatagaacatactgaaaataatctaagttccaaccatagaagaagctgcagaagaaatgaagaaagtgatgatgatttagattttgatattgatttagaagacacaggaggagaccatcaaatgaattaatatcactgtattaaaagtctgccgggcacagtggctcacgcctgtaatcccaacactttgggaggccaaggagggtggatcacctgaggtcaggagttcgagaccagcctggccaacatggcggaaccccatctccactaaaagtacaaaaaattagctgggcgtggtggctcatgcctgtaatcccagctactcaggaggctgaggcaggaggattgcttgaaccctggaggcggagattgaagtgagctgagttcgtgccattacactccagcctgggtgacagagtgagactctgtctcaaaaaaaataaaataaaaagtcaatttagaatgtgaaattctgaccaccttttggctttgagtattttccaaaagatatttgaaatcctaatgaggaaatcagaaaaagctatggaaaaatagacaaatttcatacatgaacaatataaattgtgtatattacttaacatcaaactaaacaagattcagaattgatggttgtataagaactagctcatgtaaaaataaaataacattattacattgcctcaaaaattggtcctcggtaagtgccttttgataaatgatctcaaataaatgactcatagcaaaaaaaaaaaaaaa

SEQ ID NO: 2364 - protein, 157 aa, Homo sapiens
MSSQKGNVARSRPQKHQNTFSFKNDKFDKSVQTKKINAKLHDGVCQRCKEVLEWRVKYSKYKPLSKPKKCVKCLQKTVKDSYHIMCRPCACELEVCAKCGKKEDIVIPLNKETEKIEHTENNLSSNHRRSCRRNEESDDDLDFDIDLEDTGGDHQMN

SEQ ID NO: 2365 - DNA, 1570 bp, Homo sapiens
atgggggtgggattcactgagctagaatacttggctccctggcttcggccccccttttcagtggatcagagtgtcgctttcagttgtaacggacttcatcacatcacaaattgtactcgttctcatccttttaagaaagttcagacccaggaaaatttccatagtaccttaatgaaaaagatagaaatcagtgggacgtgtctttcctttcatctccttttcggcttggaaatcagaatgagaaggattgtttttgctggtgttatcttattccgcctcttaggtgttatcttattccgcctcttaggtgttatcttattcggccgcttaggtgacctgggaacctgccagacaaaacctggtcagtactggaaagaagaggtccacattcaagatgttggaggtttgatttgcagagcatgcaatctttcactgcccttccatggatgtcttttagacctgggaacctgccaggcagaacctggtcagtactgtaaagaagaggtccacattcaaggtggcattcaatggtattcagtcaaaggctgcacaaagaacacatcagagtgcttcaagagtactctcgtcaagagaattctgcaactgcatgaacttgtaactactcactgctgcaatcattctttgtgcaatttctgagtcagtggcccatatctaaaatgcttggcagatcaatcagtctcgaagcctgacctggctatcacaaaatgatggctattgtcaattagcccacttcagaaacctcagacccttgtaggtagaaggaattttgatctgaaattgactttggttttcaatattcccaatatctcccccaccacctccaactcatctgagaaatagccctttcaacaccatttctctcctctcctccttctgcttaatttaccttcctaccacaaggctacaaagaaggaaaaatgttagtgattctccaagtcaaactaggcatgtcacctctaactactttcatttccctcaataattccatactccaaaatatggttacaaatgtttcacaagacagcaagtgacctgagaatattcatttggtttccaaagcaaactgccttgctcctttggggtgatttatggtatagaagaaactgacttaacatatactatagggaaaaaataagccatgaatcagcaagccaggcctgcgggaaaagtatgaacccaaacaggaaagggctgaggcaggtggtagggctggcacttatttcttccatctgcctcagagtttatccaaattttgaattttccgtaccttaaccatgcctaaatgctttggcttgttcaattttggcagattaagcagttcaaggtaagcagagaagtaagttcccaaccacaaggaatttaaaaggagtaggaacgtactttgaactacatttcccattttgcgatcattacgtcttctattacaatgccctactttggcagcatgaagagtactgcattaatttaatttaatttaaaatttaatttaaaactgtctttctctgtattttcaggagtttgaaaattcaaaaaataaataataaatgtc

SEQ ID NO: 2366 - protein, 218 aa, Homo sapiens [sequence omitted]

SEQ ID NO: 2367 - DNA, 5451 bp, Homo sapiens
gtagggagccagcccctgggcgcggcctgcagggtaccggcaaccgcccgggtaagcgggggcaggacaaggccggagcctgtgtccgcccggcagccgcccgcagctgcagagagtcccgctgcgtctccgccgcgtgcgccctcctcgaccagcagacccgcgctgcgctccgccgctgacatgtgtgccgctcagatgccgcccctggcgcacatcttccgagggacgttcgtccactccacctggacctgccccatggaggtgctgcgggatcacctcctcggcgtgagcgacagcggcaaaatagtgtttttagaagaagcatctcaacaggaaaaactggccaaagaatggtgcttcaagccgtgtgaaataagagaactgagccaccatgagttcttcatgcctgggctggttgatacacacatccatgcctctcagtattcctttgctggaagtagcatagacctgccactcttggagtggctgaccaagtacacatttcctgcagaacacagattccagaacatcgactttgcagaagaagtatataccagagttgtcaggagaacactaaagaatggaacaaccacagcttgttactttgcaacaattcacactgactcatctctgctccttgccgacattacagataaatttggacagcgggcatttgtgggcaaagtttgcatggatttgaatgacacttttccagaatacaaggagaccactgaggaatcgatcaaggaaactgagagatttgtgtcagaaatgctccaaaagaactattctagagtgaagcccatagtgacaccacgtttttccctctcctgctctgagactttgatgggtgaactgggcaacattgctaaaacccgtgatttgcacattcagagccatataagtgaaaatcgtgatgaagttgaagctgtgaaaaacttataccccagttataaaaactacacatctgtgtatgataaaaacaatcttttgacaaataagacagtgatggcacacggctgctacctctctgcagaagaactgaacgtattccatgaacgaggagcatccatcgcacactgtcccaattctaatttatcgctcagcagtggatttctaaatgtgctagaagtcctgaaacatgaagtcaagatagggctgggtacagacgtggctggtggctattcatattccatgcttgatgcaatcagaagagcagtgatggtttccaatatccttttaattaataaggtaaatgagaaaagcctcaccctcaaagaagtcttcagactagctactcttggaggaagccaagccctggggctggatggtgagattggaaactttgaagtgggcaaggaatttgatgccatcctgatcaaccccaaagcatccgactctcccattgacctgttttatggggacttttttggtgatatttctgaggctgttatccagaagttcctctatctaggagatgatcgaaatattgaagaggtttatgtgggcggaaagcaggtggttccgttttccagctcagtgtaagaccctcgggcgtctacaaagttctcctgggattagcgtggttctgcatctcccttgtgcccaggtggagttagaaagtcaaaaaatagtaccttgttcttgggatgactatccctttctgtgtctagttacagtattcacttgacaaatagttcgaaggaagttgcactaattctcaactctggttgagagggttcataaatttcatgaaaatatctccctttggagctgctcagacttactttaagctcaaacagaagggaatgctattactggtggtgttcctacggtaagacttaagcaaagcctttttcatatttgaaaatgtggaaagaaaagatgttcctaaaaggttagatattttgagctaataattgcaaaaattagaagactgaaaatggacccatgagagtatatttttatgagggagcaaaagttagactgagaacaaacgttagaaaatcacttcagattgtgtttgaaaattatatactgagcatactaatttaaaaagagaacttgttgaaatttaaaacgtgtttctaggttgaccttgtgttttagaaatttgcacttaatggaatttgcatttcagagatgtgttagtgttgtgctttgccttctttggcgatgaatgtcagaaattgaatgccacatgctttcataatatagttttgtgcttcaaagtgtttgacagaagttgggtattaaagatttaaagtctcttaggaatattattcatgtaactccatggcataaatagttgtatttttgtgtactttaaaatcaacttataactgtgagatgttattgcttccattttattagaagagaaacaaattccatgctttatggaatttatgtagactggagtcttcgtgaactggggcaaatgctggcatccaggagccgccaatactaacaggacaggttccattgccatggcctattccacccaaacaatatgttgtagtttctggaaattccatactcagatatcagtctgctagaactttaaaatgaaggacaaatcctgttaaagaaatattgttaaaaatctttaaaccctgtgtattgaaagcactctattttctaattttatccagttttctgtttaactccttataatgtttaggatattaaaattttaggataatgaagagtacataatgtcctacttaatatttatgttaataggacttaattcttactagacatctaggaacattacaaagcaaagactatttttatgcttccataacctagaattaaaaccaaattatgaccttatgataaatctttaagtattggtgtgaatgttatttaaattctatatttttcttatttaattacaaatactataaatgagcaaggaaaaggaatagactttcttaatatattataacactcattcctagagcttaggggtgactctttaatattaccttatagtagaaactttatgtaatatagctaactccgtatttacagaacaaaaaaacacagttccccctcctgtagtataaattttattttcacatacttagctaatttagcagtaattggcccagttttttccctaatagaaatacttttagatttgattatgtatacatgacacctaaagagggaacaaaagttagttttatttttttaataaacaacagagtttgttttgtgagataagtatcttagtaaacccaatttccagtcttagtctgtatttccaatatttctaattcctgagccacgtcaaagatgccttgccaaatttctccccatttctctacggggctagcaaaaatcttcagctttatccctcaacccctgccaaaggaacttgattacatggtgtctaaccaaatgagcaggcttaggaatttagatgagatgtgtaagattcacttacaggcagtagctgcttctagcatttgcaagatcctacacttttaccttctttaagggtgtacattttgatgttgaacatcagttttcatgtagacttaggactcatgtgcagtaaatataaataagtgtagcatcagaagcagtaggaatggccgtatacaaccatcctgttaaacatttaaatttagctctgatagtgtgttaagacctgaatatctttcctagtaaaaataggatgtgttgaaatatttatatgtactttgatctctccacatcacttataacttatgtgttttatttctccaagtgcggtgttcctgaatgttatgtatgcttttttttctgtaccacaggcattatctatacctggggccagattttctgcactttgaaatgttgcctttgcctaatgtaggttgactttctgaattgtggagaggcacttttccaagccaatcttatttgtcactttttgttttaatatcttgctctctgacaggaaagaaacaattcacttaccagcctcctcaccccatcctccaccatttccttaatgttccatggtattttcaacggaatacactttgaaaggtaaaaacaattcaaaagtatcgattatcataaattcacaaaatatttttgcaaccagaacacaaaagcaggctagtcagctaaggtaaatttcattttcaaacgagagggaaacatgggaagtaaaagattaggatgtgaaaggttgtcctaaacagaccaaggagactgttccctaatttattctcttggctggttctctcattgaattatcagaccccaagaggagatattggaacaggctcccttcatgccaagggtctttctaagttaatactgtgagcattgagcccccattaaaactcttttttacttcagaaagaattttacaggttaaagggaaagaaatggtgggaaactctccccgtaatgcttagccaactttaaagtgtacccttcaatatccccattggcaactgcagctgagatcttagagaggaaatataaccggtgtgagatctagcaatgcattttgaatcttcactccctaccaggctcttcctatttttaatctcttcacctcagaactagacatatggagagctttaaaggcaagctggaaggcacattgtatcaattctaccttgtgctatacgtaggagagatccaaaatttggatgcttctggagactcttagacatcttttcattgttgtccatttttaaagttgatgattgctggaaacattcacacgcttaaaagcaatggtgtgagttattaatgggtaaactaagaagtgttataggcaatgacttgaaatggtttttaaattgtatggattgttaagaattgttgaaaaaaaattttttttttttggacagcttcaaggagatgttagcaatttcagatatactagccagtttaggtatgactttggaagtgcagaaacagaaggatactgttagaaaatcctaacattggtctccgtgcatgtgttcacacctggtctcactgcctttccttcccacagacctgagtgtgaaagactgagagttgaggagttactttgtggatcttgtccaaatttagtgaaatgtggaagtcaaccagaccaatgatggaattaaatgtaaattccaagagggctttcacagtccacagggttcaaatgacttgggtaacagaagttattcttagcttacctgttatgtgacagtgatttacctgtccatttccaacccaaaagcctgtcagaaagcattctttagagaaaaccactttacatttgttgttaaactcctgatcgctactcttaagaatatacatgtatgtattcataggaacattttttctcaatatttgtatgattcgcttactgttattgtgctgagtgagctcctgtgtgcttcagacaaaaataaatgagactttgtgtttacgttaaaaaaaaaaaaaaaaaaaaaa

SEQ ID NO: 2368 - protein, 454 aa, Homo sapiens
MCAAQMPPLAHIFRGTFVHSTWTCPMEVLRDHLLGVSDSGKIVFLEEASQQEKLAKEWCFKPCEIRELSHHEFFMPGLVDTHIHASQYSFAGSSIDLPLLEWLTKYTFPAEHRFQNIDFAEEVYTRVVRRTLKNGTTTACYFATIHTDSSLLLADITDKFGQRAFVGKVCMDLNDTFPEYKETTEESIKETERFVSEMLQKNYSRVKPIVTPRFSLSCSETLMGELGNIAKTRDLHIQSHISENRDEVEAVKNLYPSYKNYTSVYDKNNLLTNKTVMAHGCYLSAEELNVFHERGASIAHCPNSNLSLSSGFLNVLEVLKHEVKIGLGTDVAGGYSYSMLDAIRRAVMVSNILLINKVNEKSLTLKEVFRLATLGGSQALGLDGEIGNFEVGKEFDAILINPKASDSPIDLFYGDFFGDISEAVIQKFLYLGDDRNIEEVYVGGKQVVPFSSSV

SEQ ID NO: 2369 - DNA, 7111 bp, Homo sapiens
gcgtcagccctcacgtcacttcgccagcagtagcagaggcggcggcggcggctcccggaattgggttggagcaggagcctcgctggctgcttcgctcgcgctctacgcgctcagtccccggcggtagcaggagcctggacccaggcgccgccggcgggcgtgaggcgccggagcccggcctcgaggtgcataccggacccccattcgcatctaacaaggaatctgcgccccagagagtcccgggagcgccgccggtcggtgcccggcgcgccgggccatgcagcgacggccgccgcggagctccgagcagcggtagcgcccccctgtaaagcggttcgctatgccggggccactgtgaaccctgccgcctgccggaacactcttcgctccggaccagctcagcctctgataagctggactcggcacgcccgcaacaagcaccgaggagttaagagagccgcaagcgcagggaaggcctccccgcacgggtgggggaaagcggccggtgcagcgcggggacaggcactcgggctggcactggctgctagggatgtcgtcctggataaggtggcatggacccgccatggcgcggctctggggcttctgctggctggttgtgggcttctggagggccgctttcgcctgtcccacgtcctgcaaatgcagtgcctctcggatctggtgcagcgacccttctcctggcatcgtggcatttccgagattggagcctaacagtgtagatcctgagaacatcaccgaaattttcatcgcaaaccagaaaaggttagaaatcatcaacgaagatgatgttgaagcttatgtgggactgagaaatctgacaattgtggattctggattaaaatttgtggctcataaagcatttctgaaaaacagcaacctgcagcacatcaattttacccgaaacaaactgacgagtttgtctaggaaacatttccgtcaccttgacttgtctgaactgatcctggtgggcaatccatttacatgctcctgtgacattatgtggatcaagactctccaagaggctaaatccagtccagacactcaggatttgtactgcctgaatgaaagcagcaagaatattcccctggcaaacctgcagatacccaattgtggtttgccatctgcaaatctggccgcacctaacctcactgtggaggaaggaaagtctatcacattatcctgtagtgtggcaggtgatccggttcctaatatgtattgggatgttggtaacctggtttccaaacatatgaatgaaacaagccacacacagggctccttaaggataactaacatttcatccgatgacagtgggaagcagatctcttgtgtggcggaaaatcttgtaggagaagatcaagattctgtcaacctcactgtgcattttgcaccaactatcacatttctcgaatctccaacctcagaccaccactggtgcattccattcactgtgaaaggcaaccccaaaccagcgcttcagtggttctataacggggcaatattgaatgagtccaaatacatctgtactaaaatacatgttaccaatcacacggagtaccacggctgcctccagctggataatcccactcacatgaacaatggggactacactctaatagccaagaatgagtatgggaaggatgagaaacagatttctgctcacttcatgggctggcctggaattgacgatggtgcaaacccaaattatcctgatgtaatttatgaagattatggaactgcagcgaatgacatcggggacaccacgaacagaagtaatgaaatcccttccacagacgtcactgataaaaccggtcgggaacatctctcggtctatgctgtggtggtgattgcgtctgtggtgggattttgccttttggtaatgctgtttctgcttaagttggcaagacactccaagtttggcatgaaaggttttgttttgtttcataagatcccactggatgggtagctgaaataaaggaaaagacagagaaaggggctgtggtgcttgttggttgatgctgccatgtaagctggactcctgggactgctgttggcttatcccgggaagtgctgcttatctggggttttctggtagatgtgggcggtgtttggaggctgtactatatgaagcctgcatatactgtgagctgtgattggggaacaccaatgcagaggtaactctcaggcagctaagcagcacctcaagaaaacatgttaaattaatgcttctcttcttacagtagttcaaatacaaaactgaaatgaaatcccattggattgtacttctcttctgaaaagtgtgctttttgaccctactggacatttattgacttaattgcttctgtttattaaaattgacctgcaaagttaaaaaaaaattaaagttgagaacaggtataagtgcacactgaatagtctaatctacatgtaacacatattttagtgtgattttctatactctaatcagcactgaattcagagggtttgactttttcatctataacacagtgactaaaagagttaagggtatatataccatcactttgggacttggtagtattattaaaaggttatttccttcactgtcaataaaagtccaaatgtttagcttaggtctgagagtcaaacaatgttaaggattgtcttaaagttccttagccagcaaaacaaaacaaaacaaaacaaacaaatgaaaaacgtttaaaaagaagaagaagaaaaaaaacaagaacaagcagcaacagctgttttgttggggctatagatttaagttaggcatagtcaatttcagaataactaagagtggaatatatgcatatggtgaaattataaccttgcccttttttatttgccctctgcgatccacctgctttttagaagtctgccgagtgagaaggccacagtatctcatgctgtttgcattacagaactgcagcttttctactctgaaaaggcctgggagcagaatggctggcctgctgtgagcaggagaggagattctaagaaggatagtcccccctacaacatactgtcatactgctgggttttcatgggtaggaaagcttgtcctgaccccagcagcaaagaggtggcaggtcgctaatgaatatatgctttataatgtccttcttcattgctgagagggcagccttagagctgtggatttctgcatcccccctgagtctgacccatggacacctgtttcattcactttagcatcacagtgacctttgtatgctctgttcagtctgtgtcaggcagtatgcttgtcctgaagagaggtttggctatccccaccccaccccaccccaccctgttccttttttatcaggaggacttcagagccaggcctgcagcattttgtttgaaaacacaatcagctctgacagttagacatgcacacagacgccatagctggattggaaacattgatgttttaaaaatttattttttttggaaatagttgcacaaatgctgcaatttagctttaaggttctatagatttttaactagtccaacacagtcagaaacattgttttgaatcctctgtaaaccaaggcattaatcttaataaaccaggatccatttaggtaccacttgatataaaaaggatatccataatgaatattttatactgcatcctttacattagccactaaatacgttattgcttgatgaagacctttcacagaatcctatggattgcagcatttcacttggctacttcatacccatgccttaaagaggggcagtttctcaaaagcagaaacatgccgccagttctcaagttttcctcctaactccatttgaatgtaagggcagctggcccccaatgtggggaggtccgaacattttctgaattcccattttcttgttcgcggctaaatgacagtttctgtcattacttagattccgatctttcccaaaggtgttgatttacaaagaggccagctaatagcagaaatcatgaccctgaaagagagatgaaattcaagctgtgagccaggcaggagctcagtatggcaaaggttcttgagaatcagccatttggtacaaaaaagatttttaaagcttttatgttataccatggagccatagaaaggctatggattgtttaagaactattttaaagtgttccagacccaaaaaggaaaaataaaaaaaaaggaatatttgtacccaacagctagaaggattgcaaggtagatttttgttttaaaatggagagaagtggacagataaggccatttaatatatcaaagatcagttgacatctcctagggaatgatgaaaacagcaggctattagaaaattatttcatatagttctcgtgttcttttcttttttttaatccctgaagggatgatcagtaacatagcttctcttttctgtactctagaccaccccttttcatcattttgctttttatgtctcccataagaaatgtgctttttagagcttcctaatgcatgtgttgcattattgcagcattagaaaaggagaggtagcatttttgctgaaatcgggcctgtcactctccaataaaggttctggcacttcaatgccaggcaggtctcctaaatgaacagaatgatctgtgtgagccgatgcctgcccttccagaggggccactgtccccagccgcagccaactgtgtcccacaggaatgggagcctaggtttccaaatcttgtgattctttaggagaaacatgaaacctggatttcgtgtgaaatgtcccgattgttaaaaagttggctcaattatttttaaaacattttgtaagccaacaaaagtctgtgggctgccagtttattacttttgtcttaaaacatgatcattgttctctcacggtatccttctgtcttcccgttgcaaattcacttttctttcttcctgacattgccattgagggctttgttaccacaagctaagaaactgagtttaacagcccagttatctgcaacatgtcaattacctttgctcctctcctgtgattcccaccatgctgtgaccctcagctgtctccctttgctgggaattctgcaccaatgtctcccctcaacccattccctggttggtcctactcccgtgtggccagagacatcctagcaaatccttcctcctattatatctgacactaatttcttttcaacagcgctcatgtctcttggcccagtcaggtgctgccaggtttagataggaaagtacatgtcccattttcatgggtgcccttaatgtggtccacgtcctatatcttattatatttactcatggctcaatgggggcctccagagaccctctcaggctgctgagctagactaaggaatgcatccaccgtcatcacatgagacactgactctgtgacgacaaaagtacaaacagtctgaggctaagaaaggttcatctcacaacaggaaaaacaaatctcaacacacattagagataattgattcaggggttttctctcccagtctcccagcagggactgatttcatttctgacccactaggttttctttccagaaataggtagcaaggacaagaactaaacaatcccagccccacccagcaacacagaacacaggagtttgcttttggcttctcactctccaagtaaccctgaattaggcccagaatggctgaggcttggagcatctcctcagacagagcagaggcgacacctcttcaggggtgtgtggagtaaatagctcgaagagctgaagacagaaaaccagtttcacgccaggtgcgagagagagcataatggagggaagcccgctttctctctcctcttcttttctctttatttctttagagcacttgacttttttttctctctctctctagtattctaaactgaccccatgaccaactgagaatttatttttgtttcattggttgtttcacagaattagaacacacacgactttttattcctccattgcaaaatggaatcaagatactacacaagacctgtgctttcttcctttgcatgatttacacctccgcctgttttggtgctagctgtctagaacttctctcttggtttgaatctgattccttcacactacactagaagtttatttcatcttgttttgtctagactccagatacagagggacagctggactgaggacaagcaattccatctagcatagggtctctcagggttggtgcatccagccacatgggcagggccagtcacatctagtctatgtccccagagcccttggagttgcgcagcttagctgacttgactccaaggaaattagtacagaagtaaccactctattaagtgtgttctgctatgttcacatgcctgtagtacctgcaaaccatgccaggttcatctaaagacataggggaagattaaggactcttttggacagaccatgaattgaatttgctgccaggtgctgccagactgaatttggctgacagaactcccagcccaggaaagttccatgacaatgactgtcgcagaaggaaatttcccactaaagtcagtccattttcaagttttggtcttcagagacaaaagaacgtcccagccacctgattttgatggtgaggtaactctaagttgaattcaggctagtgttgcagtatagctttggcatgttcatgagtgagcacccagaatgtgttgaaccaacccccacccctaactactgactatgactgcagtgggtttttatggggaaaaaaagtgtgaaaagcaaaaagaaaggaacagagattttttatcacctttattgtaagacagtccatttatgaattgagtataaacacatacaaagtaacaagagattcctaagaaacgcaaatccttgagtttcacgcacttcatgttcaaccatttgctgtaatccagaggcagcctgtgaatcattctcatgccctgttttttttttttttttcctataatgttctgggtttaaaagccatcttttccacattttctgtaaataatggataatcattttaaaaatttttatttttagtgctgttttaacaatgtagatagatcataaatgtacttgctgaattcaatcatttttaacaagccaataaagtttgataattcatctc

SEQ ID NO: 2370 - protein, 477 aa, Homo sapiens
MSSWIRWHGPAMARLWGFCWLVVGFWRAAFACPTSCKCSASRIWCSDPSPGIVAFPRLEPNSVDPENITEIFIANQKRLEIINEDDVEAYVGLRNLTIVDSGLKFVAHKAFLKNSNLQHINFTRNKLTSLSRKHFRHLDLSELILVGNPFTCSCDIMWIKTLQEAKSSPDTQDLYCLNESSKNIPLANLQIPNCGLPSANLAAPNLTVEEGKSITLSCSVAGDPVPNMYWDVGNLVSKHMNETSHTQGSLRITNISSDDSGKQISCVAENLVGEDQDSVNLTVHFAPTITFLESPTSDHHWCIPFTVKGNPKPALQWFYNGAILNESKYICTKIHVTNHTEYHGCLQLDNPTHMNNGDYTLIAKNEYGKDEKQISAHFMGWPGIDDGANPNYPDVIYEDYGTAANDIGDTTNRSNEIPSTDVTDKTGREHLSVYAVVVIASVVGFCLLVMLFLLKLARHSKFGMKGFVLFHKIPLDG

SEQ ID NO: 2371 - DNA, 5560 bp, Homo sapiens
aagacggattctcagacaaggcttgcaaatgccccgcagccatcatttaactgcacccgcagaatagttacggtttgtcacccgaccctcccggatcgcctaatttgtccctagtgagaccccgaggctctgcccgcgcctggcttcttcgtagctggatgcatatcgtgctccgggcagcgcgggcgcagggcacgcgttcgcgcacaccctagcacacatgaacacgcgcaagagctgaaccaagcacggtttccatttcaaaaagggagacagcctctaccgcgattgtagaagagactgtggtgtgaattagggaccgggaggcgtcgaacggaggaacggttcatcttagagactaattttctggagtttctgcccctgctctgcgtcagccctcacgtcacttcgccagcagtagcagaggcggcggcggcggctcccggaattgggttggagcaggagcctcgctggctgcttcgctcgcgctctacgcgctcagtccccggcggtagcaggagcctggacccaggcgccgccggcgggcgtgaggcgccggagcccggcctcgaggtgcataccggacccccattcgcatctaacaaggaatctgcgccccagagagtcccgggagcgccgccggtcggtgcccggcgcgccgggccatgcagcgacggccgccgcggagctccgagcagcggtagcgcccccctgtaaagcggttcgctatgccggggccactgtgaaccctgccgcctgccggaacactcttcgctccggaccagctcagcctctgataagctggactcggcacgcccgcaacaagcaccgaggagttaagagagccgcaagcgcagggaaggcctccccgcacgggtgggggaaagcggccggtgcagcgcggggacaggcactcgggctggcactggctgctagggatgtcgtcctggataaggtggcatggacccgccatggcgcggctctggggcttctgctggctggttgtgggcttctggagggccgctttcgcctgtcccacgtcctgcaaatgcagtgcctctcggatctggtgcagcgacccttctcctggcatcgtggcatttccgagattggagcctaacagtgtagatcctgagaacatcaccgaaattttcatcgcaaaccagaaaaggttagaaatcatcaacgaagatgatgttgaagcttatgtgggactgagaaatctgacaattgtggattctggattaaaatttgtggctcataaagcatttctgaaaaacagcaacctgcagcacatcaattttacccgaaacaaactgacgagtttgtctaggaaacatttccgtcaccttgacttgtctgaactgatcctggtgggcaatccatttacatgctcctgtgacattatgtggatcaagactctccaagaggctaaatccagtccagacactcaggatttgtactgcctgaatgaaagcagcaagaatattcccctggcaaacctgcagatacccaattgtggtttgccatctgcaaatctggccgcacctaacctcactgtggaggaaggaaagtctatcacattatcctgtagtgtggcaggtgatccggttcctaatatgtattgggatgttggtaacctggtttccaaacatatgaatgaaacaagccacacacagggctccttaaggataactaacatttcatccgatgacagtgggaagcagatctcttgtgtggcggaaaatcttgtaggagaagatcaagattctgtcaacctcactgtgcattttgcaccaactatcacatttctcgaatctccaacctcagaccaccactggtgcattccattcactgtgaaaggcaaccccaaaccagcgcttcagtggttctataacggggcaatattgaatgagtccaaatacatctgtactaaaatacatgttaccaatcacacggagtaccacggctgcctccagctggataatcccactcacatgaacaatggggactacactctaatagccaagaatgagtatgggaaggatgagaaacagatttctgctcacttcatgggctggcctggaattgacgatggtgcaaacccaaattatcctgatgtaatttatgaagattatggaactgcagcgaatgacatcggggacaccacgaacagaagtaatgaaatcccttccacagacgtcactgataaaaccggtcgggaacatctctcggtctatgctgtggtggtgattgcgtctgtggtgggattttgccttttggtaatgctgtttctgcttaagttggcaagacactccaagtttggcatgaaaggcccagcctccgttatcagcaatgatgatgactctgccagcccactccatcacatctccaatgggagtaacactccatcttcttcggaaggtggcccagatgctgtcattattggaatgaccaagatccctgtcattgaaaatccccagtactttggcatcaccaacagtcagctcaagccagacacatttgttcagcacatcaagcgacataacattgttctgaaaagggagctaggcgaaggagcctttggaaaagtgttcctagctgaatgctataacctctgtcctgagcaggacaagatcttggtggcagtgaagaccctgaaggatgccagtgacaatgcacgcaaggacttccaccgtgaggccgagctcctgaccaacctccagcatgagcacatcgtcaagttctatggcgtctgcgtggagggcgaccccctcatcatggtctttgagtacatgaagcatggggacctcaacaagttcctcagggcacacggccctgatgccgtgctgatggctgagggcaacccgcccacggaactgacgcagtcgcagatgctgcatatagcccagcagatcgccgcgggcatggtctacctggcgtcccagcacttcgtgcaccgcgatttggccaccaggaactgcctggtcggggagaacttgctggtgaaaatcggggactttgggatgtcccgggacgtgtacagcactgactactacagggtcggtggccacacaatgctgcccattcgctggatgcctccagagagcatcatgtacaggaaattcacgacggaaagcgacgtctggagcctgggggtcgtgttgtgggagattttcacctatggcaaacagccctggtaccagctgtcaaacaatgaggtgatagagtgtatcactcagggccgagtcctgcagcgaccccgcacgtgcccccaggaggtgtatgagctgatgctggggtgctggcagcgagagccccacatgaggaagaacatcaagggcatccataccctccttcagaacttggccaaggcatctccggtctacctggacattctaggctagggcccttttccccagaccgatccttcccaacgtactcctcagacgggctgagaggatgaacatcttttaactgccgctggaggccaccaagctgctctccttcactctgacagtattaacatcaaagactccgagaagctctcgagggaagcagtgtgtacttcttcatccatagacacagtattgacttctttttggcattatctctttctctctttccatctcccttggttgttcctttttctttttttaaattttctttttcttttttttttcgtcttccctgcttcacgattcttaccctttcttttgaatcaatctggcttctgcattactattaactctgcatagacaaaggccttaacaaacgtaatttgttatatcagcagacactccagtttgcccaccacaactaacaatgccttgttgtattcctgcctttgatgtggatgaaaaaaagggaaaacaaatatttcacttaaactttgtcacttctgctgtacagatatcgagagtttctatggattcacttctatttatttattattattactgttcttattgtttttggatggcttaagcctgtgtataaaaaagaaaacttgtgttcaatctgtgaagcctttatctatgggagattaaaaccagagagaaagaagatttattatgaaccgcaatatgggaggaacaaagacaaccactgggatcagctggtgtcagtccctacttaggaaatactcagcaactgttagctgggaagaatgtattcggcaccttcccctgaggacctttctgaggagtaaaaagactactggcctctgtgccatggatgattcttttcccatcaccagaaatgatagcgtgcagtagagagcaaagatggcttccgtgagacacaagatggcgcatagtgtgctcggacacagttttgtcttcgtaggttgtgatgatagcactggtttgtttctcaagcgctatccacagaacctttgtcaacttcagttgaaaagaggtggattcatgtccagagctcatttcggggtcaggtgggaaagccaagaacttggaaaagataagacaagctataaattcggaggcaagtttcttttacaatgaacttttcagatctcacttccctccgacccctaacttccatgcccacccgtccttttaactgtgcaagcaaaattgtgcatggtcttcgtcgattaataccttgtgtgcagacactactgctccagacgtcgtttccctgataggtagagcagatccataaaaaggtatgacttatacaattaggggaagctaatggagtttattagctgagtatcaatgtctctgcgttgtacggtggtgatgggttttaatgaatatggaccctgaagcctggaaatcctcatccacgtcgaacccacaggactgtgggaagggcagaatcaatccctaagggaaaggaaacctcaccctgagggcatcacatgcactcatgttcagtgtacacaggtcaagtcccttgctctgggctctagttgggagagtggtttcattccaagtgtactccattgtcagtatgctgtttttgtttccttcactccattcaaaaagtcaaaatacaaaatttggcacagcatgccaacgggaggctgtgcccagaccaagcactggaagtgtgcttctaggcatagtcattggttttgcaaaaagagggctcaaatttaaatagaaatttacagctatttgaatggtcagatataccaagaaagaaaaatatttctgttcctcaagaaaacttgctaccctctgtgaggggaattttgctaaacttgacatctttataacatgagccagattgaaagggagtgattttcattcatcttaggtcatgttatttcatatttgtttctgaaggtgcgatagctctgttttaggttttgcttgcgcctgttaattactggaacaccttatttttcattaaaggctttgaaagccaattctcaaaaattcaaaagtgcaaattaacagaacaaaaggaaatccagtagcaactgcagtcaagcgagggagttgacaagataaaccttacgtccattcaagttatatgctggcctatgagagatgagagttgggtcgtttgttctctttgttgatgattt

SEQ ID NO: 2372 - protein, 822 aa, Homo sapiens
MSSWIRWHGPAMARLWGFCWLVVGFWRAAFACPTSCKCSASRIWCSDPSPGIVAFPRLEPNSVDPENITEIFIANQKRLEIINEDDVEAYVGLRNLTIVDSGLKFVAHKAFLKNSNLQHINFTRNKLTSLSRKHFRHLDLSELILVGNPFTCSCDIMWIKTLQEAKSSPDTQDLYCLNESSKNIPLANLQIPNCGLPSANLAAPNLTVEEGKSITLSCSVAGDPVPNMYWDVGNLVSKHMNETSHTQGSLRITNISSDDSGKQISCVAENLVGEDQDSVNLTVHFAPTITFLESPTSDHHWCIPFTVKGNPKPALQWFYNGAILNESKYICTKIHVTNHTEYHGCLQLDNPTHMNNGDYTLIAKNEYGKDEKQISAHFMGWPGIDDGANPNYPDVIYEDYGTAANDIGDTTNRSNEIPSTDVTDKTGREHLSVYAVVVIASVVGFCLLVMLFLLKLARHSKFGMKGPASVISNDDDSASPLHHISNGSNTPSSSEGGPDAVIIGMTKIPVIENPQYFGITNSQLKPDTFVQHIKRHNIVLKRELGEGAFGKVFLAECYNLCPEQDKILVAVKTLKDASDNARKDFHREAELLTNLQHEHIVKFYGVCVEGDPLIMVFEYMKHGDLNKFLRAHGPDAVLMAEGNPPTELTQSQMLHIAQQIAAGMVYLASQHFVHRDLATRNCLVGENLLVKIGDFGMSRDVYSTDYYRVGGHTMLPIRWMPPESIMYRKFTTESDVWSLGVVLWEIFTYGKQPWYQLSNNEVIECITQGRVLQRPRTCPQEVYELMLGCWQREPHMRKNIKGIHTLLQNLAKASPVYLDILG

SEQ ID NO: 2373 - DNA, 8192 bp, Homo sapiens
aagacggattctcagacaaggcttgcaaatgccccgcagccatcatttaactgcacccgcagaatagttacggtttgtcacccgaccctcccggatcgcctaatttgtccctagtgagaccccgaggctctgcccgcgcctggcttcttcgtagctggatgcatatcgtgctccgggcagcgcgggcgcagggcacgcgttcgcgcacaccctagcacacatgaacacgcgcaagagctgaaccaagcacggtttccatttcaaaaagggagacagcctctaccgcgattgtagaagagactgtggtgtgaattagggaccgggaggcgtcgaacggaggaacggttcatcttagagactaattttctggagtttctgcccctgctctgcgtcagccctcacgtcacttcgccagcagtagcagaggcggcggcggcggctcccggaattgggttggagcaggagcctcgctggctgcttcgctcgcgctctacgcgctcagtccccggcggtagcaggagcctggacccaggcgccgccggcgggcgtgaggcgccggagcccggcctcgaggtgcataccggacccccattcgcatctaacaaggaatctgcgccccagagagtcccgggagcgccgccggtcggtgcccggcgcgccgggccatgcagcgacggccgccgcggagctccgagcagcggtagcgcccccctgtaaagcggttcgctatgccggggccactgtgaaccctgccgcctgccggaacactcttcgctccggaccagctcagcctctgataagctggactcggcacgcccgcaacaagcaccgaggagttaagagagccgcaagcgcagggaaggcctccccgcacgggtgggggaaagcggccggtgcagcgcggggacaggcactcgggctggcactggctgctagggatgtcgtcctggataaggtggcatggacccgccatggcgcggctctggggcttctgctggctggttgtgggcttctggagggccgctttcgcctgtcccacgtcctgcaaatgcagtgcctctcggatctggtgcagcgacccttctcctggcatcgtggcatttccgagattggagcctaacagtgtagatcctgagaacatcaccgaaattttcatcgcaaaccagaaaaggttagaaatcatcaacgaagatgatgttgaagcttatgtgggactgagaaatctgacaattgtggattctggattaaaatttgtggctcataaagcatttctgaaaaacagcaacctgcagcacatcaattttacccgaaacaaactgacgagtttgtctaggaaacatttccgtcaccttgacttgtctgaactgatcctggtgggcaatccatttacatgctcctgtgacattatgtggatcaagactctccaagaggctaaatccagtccagacactcaggatttgtactgcctgaatgaaagcagcaagaatattcccctggcaaacctgcagatacccaattgtggtttgccatctgcaaatctggccgcacctaacctcactgtggaggaaggaaagtctatcacattatcctgtagtgtggcaggtgatccggttcctaatatgtattgggatgttggtaacctggtttccaaacatatgaatgaaacaagccacacacagggctccttaaggataactaacatttcatccgatgacagtgggaagcagatctcttgtgtggcggaaaatcttgtaggagaagatcaagattctgtcaacctcactgtgcattttgcaccaactatcacatttctcgaatctccaacctcagaccaccactggtgcattccattcactgtgaaaggcaaccccaaaccagcgcttcagtggttctataacggggcaatattgaatgagtccaaatacatctgtactaaaatacatgttaccaatcacacggagtaccacggctgcctccagctggataatcccactcacatgaacaatggggactacactctaatagccaagaatgagtatgggaaggatgagaaacagatttctgctcacttcatgggctggcctggaattgacgatggtgcaaacccaaattatcctgatgtaatttatgaagattatggaactgcagcgaatgacatcggggacaccacgaacagaagtaatgaaatcccttccacagacgtcactgataaaaccggtcgggaacatctctcggtctatgctgtggtggtgattgcgtctgtggtgggattttgccttttggtaatgctgtttctgcttaagttggcaagacactccaagtttggcatgaaagatttctcatggtttggatttgggaaagtaaaatcaagacaaggtgttggcccagcctccgttatcagcaatgatgatgactctgccagcccactccatcacatctccaatgggagtaacactccatcttcttcggaaggtggcccagatgctgtcattattggaatgaccaagatccctgtcattgaaaatccccagtactttggcatcaccaacagtcagctcaagccagacacatggcccagaggttcccccaagaccgcctgataataatttggtatttggaggctcctgtgtcactgcaggaactaaaggaggctaaatccatgcctgatggaggagaagagttctatggttatctgcaaattctggccagacaacatcttgacgtcactccttagcttccataacctagccaagcaagaagttgcctttccaagacaaagcagtgtgctctaatgactaacccctcaaagtactatgccactttaactatagacccatctcctcgatcaatcaggatggcaagatggagctgaggagctcagcaacatcaagtctggagttggtctttaactcaactagctcgtttagacgtgtctgaacaccacatcacctgacagcacggggtggtttcccagtaaaatttacaaactcagctcaagggcagctgtgttgctttcctttccttgactgctgagaaactttttgacagggaacaatggaaacacaccttctgagctgaaacaaacaaacagaaacaaaacatactaaccagcaaaatccccaaatcatcaatcttgggttctcttgaagggcaggagtgtgttttatcttctcccgtcggagcaaacactatagatgtcctccctaaaattctgtcttccctagagcagccttgtaaattagctagggtcctagggttgaggcctaaatcaacttaaaattgtctctaaatatgtacctggatgtgtttgtacttgcagagcatgccctcttcatgtgcctagggctagtaactccctgtggcagaggcatgtaaagtattctgactttttttttttcaacttaattccatttccaatgaaatggatttttaaaaattttctccagagtgtgccatacttctccagctattatagttaatgtgtgtgtatccttgtgtatatgtgtgtttgtgtgtgcatatgtgttttcctagtggttacatgcttactaggcaattatgtaaataagcacagattcataggccagctaggcctgaggaaagaagacattataaagggagggagtattttaacattagctaaagctatcacacaaggcacccattctgctcccctcaacagccacagcccacttcgtccttgtcttaccaataaggggaaaggctggaggtgatatttttcacagaaccgcagaggttttgaacatatttgcaacattactttgagtacacatgagcaaaaattctgaattacatccaggaccccagaagctcattagatcaaagagtgcggggcccctcagagttaccagagattatctgcagacttcagtgcaatcgaatgaccatggtccattttgatggtcagaggtaggactgaaaaacgggtagaaacaattgctttagcgcttccttctgtactttgcctattaatgttttgtctttcaaaaatatattttctcctaattgtttaattggccaaataatggctgctttgggagttgtttgtatgccttggaaggccatggcctgcactttaaaaataagctaagtccattctgcccagcacgagcattaggacagagaatgcacttattttaggatccttaaaaattgcttcttttatggcacactgggttgacgactcatctcgtgggagccttcatggcacattgctgctgttctgcaggtcccaatacaattccttccccctctcagtgccacggcccccccattgctagctacacaatttgatatcatattcccttttcaactccaaaggagatgataagaagctatcaaataatgctttaaaaaagcaacttgagtttcttaaaagaaaggaaatgaatacatgctgcataattacatttaaaatgtaagccatgttattataagccgcactgagatgaagatttgttagcaaaccagtttcaagcacactcacagtgaagtaaaatcatgtttttagcatctgaccattgggtaatattattctttgttatcaaaagagaaatatcacccaagtatagtatacttagacctcctagaggaaacactccagtcctaagcttggtgtctgaaaagaaaaacaaaaataaagattatggatttaggtcagggagacagagtgatattctgaagactgtgtttactccctcatcatcggccaaccaagatggagttctgcatcctgcacatatcagacatttcagtccaatttcaccaaagcatcagtgatgttctagaagcatcccagcagatggaggatcctaatgtatttgttctgggtatttcccaaggcccagcctgactggagtgtgtgtaccaacaggatgaatccaatcaagctacgcccccattttggtttcggattggccactcttgcatgtgctagtagattgtggaccaggaccagctgagcaaacacagttgcagagtagcctcctatgttgctaagaagctcctgctacccaggtgctttgaacaattgagtgctccctctggttaagtagagatggcaccaccggagtttttcttggatgtgaggctcaatcctttacggcagctattataacaaagtgaaggttttctccctgggaaatgcagcttttctctgtctttactaattctgccagcctgtgagagtaaccaccgtagctgggcttcttctcagattaattgtcatgccaggtctccttcctggggagctgtgatgctgctctgaggttgattgctgaggttgtagtgggtttttgtttgtttttgtttagtttttcttgattgttcttctttctcttgaatggcaagagaagaaacactttctctaacccacggccaggaaggaaatggggagagagctacttcttagttcaacctggttgccacataaaggaatctctctccttggactcagcccctaactggaagcaagagccactgccctctgagactgagagagcagcccgaggaggagatgaatccattctgccctttgtttgggtttgcttcctgtcagtgagagaatgctgaggcagttcctgttatgtgaaactttcatttttaaaaccaggacagtcctaaacagactggaatgagttggtcaatcccagttggtataggcccaatgatttttgctagtaagataggattgtcttcctcacccaaaatgccttcaagtgccctaaaatgggtattttaaaataagaataaataatgtagatttagtagaaaacctggaaaacataagaaacaaagatgaaacgaaaagtcccatgtaattccaccagttagagttaaccactgatatcgtttggatatatggctttctagtcttgtggatatccttttaatctcttgtaatataaagtctgaccatatgtgtccttgcatttgtttgtactggactctgttaatatttctatagtaatggctcactttggggagattgtgctgcacagtgtgtaggaagcacattgggtgtattattcccagttttgtattttgtatttccttggagatgtgcaggggttaagagcgggggtctggccatagctggccacgtcagactctcatatggtaagtatcacagagcacatgaggcctgtgttatgcgctggaaagactcaggaaatgagaggctctcttgttctgacaaggcaggctgagagctctcatttagggtcatcactccagataactccaaatgcagtttattgctcaactgaagcagatgatcactttttgcctccaagttcttcaccctagctagctcctttcaaagagccgagtatgctggatcttaaagggccaaactagttacatctcatacatttcctgatgtttagggatgccttcacttccatcaaggataccttggctgtgcaaggacctctgatagctggagtctccttttggtcactcccagctttgcttaaacttgatggagtttgctgtccagtgatccccggatctttcatcatgaaagccttccttcctctcctgatgtctcaggcctctagacctagactggggttctggcaaggaggcctctatcaatagtatgacatccaataatatgttagtgttgatattttgcacagtaatattaagtttaagagattataaaaatgagttcaaatgaataagttcctgtgatgtaagagattagatatgtgtgatttcagaaccaaagccaggggggaatcccagaaagaaaacaataatataatcctagtttctatatattatttttattcattactgtatatgggtagagatcaatattctttcttatgctgttactattaattaacacattttttaaccatgccattgaacttttgggtgcattaaagtggaacccaagctcctcattagataataatggcatttggactgagtgccatattcctaaatttccaataaagtggttgatatagagaggacaggataaagccctatagtgtgcagttatatcaaaacagctagtctccactttagggaatgcctttactagagattacatgaaatgtctgcttataaaataagcagagatggcaccactaagcagccacctgaattgttttcctacaggaatgattacttttcagatccatttatgttttcatgctcaatacttactccccttccctgcaacacccaaagagtttacttttgcaagtcatttggtcttcagtctactactgaggaatagagaggcactaactgctttacccaggatcagaactcatgttcttaccttctattaatagagtacttgagccagatggactaactggtctcacattttctctatcttggttttacttccataaacatcaatatctttacccacatgatttttccatcctcccatttttttccatatgtattagggttcaggaactatgatgctaatgatcacatttcttcctagttcctaatttcattagtgccatttcctgatatctacagaaacaattatcaatacatgtagctgcttgagccttatttagaaggctagcctttcttttccaagtgctgtcagaatgtatacatttagtctgtctttttcccttttaggagtctttgttctgggttgatggcaaaattcctctttttacatgtgagatttttgatttcactgaattctacctagatttttatggacattggattttaaagaggaaaacactcattttcttagtaagatattggtgatacatagctatgccattgatttccatactcctgagctttggggagggagacagtggccaagtagcaggcagaataagatcatcactcatgtcctgaatcaatcacactttccttctcggattgtgtatatgctctgccacttcctacatattacatcctgagtttttaagtaaagtggatcttagccagatttgagtctaatggctgattcatcggcatagttcttggcgttaacatctcagtgtcctctttagttctctttgaggattcatgtcattgagggcctttgtgcctccacttgtctcagtatgaggaagaactttggtgtgagggcggagctatgtgaagggttgctgggttgggggattagttcatatggtccccatgccatctatttacttttggagaga

SEQ ID NO: 2374 - protein, 553 aa, Homo sapiens
MSSWIRWHGPAMARLWGFCWLVVGFWRAAFACPTSCKCSASRIWCSDPSPGIVAFPRLEPNSVDPENITEIFIANQKRLEIINEDDVEAYVGLRNLTIVDSGLKFVAHKAFLKNSNLQHINFTRNKLTSLSRKHFRHLDLSELILVGNPFTCSCDIMWIKTLQEAKSSPDTQDLYCLNESSKNIPLANLQIPNCGLPSANLAAPNLTVEEGKSITLSCSVAGDPVPNMYWDVGNLVSKHMNETSHTQGSLRITNISSDDSGKQISCVAENLVGEDQDSVNLTVHFAPTITFLESPTSDHHWCIPFTVKGNPKPALQWFYNGAILNESKYICTKIHVTNHTEYHGCLQLDNPTHMNNGDYTLIAKNEYGKDEKQISAHFMGWPGIDDGANPNYPDVIYEDYGTAANDIGDTTNRSNEIPSTDVTDKTGREHLSVYAVVVIASVVGFCLLVMLFLLKLARHSKFGMKDFSWFGFGKVKSRQGVGPASVISNDDDSASPLHHISNGSNTPSSSEGGPDAVIIGMTKIPVIENPQYFGITNSQLKPDTWPRGSPKTA

SEQ ID NO: 2375 - DNA, 8192 bp, Homo sapiens
aagacggattctcagacaaggcttgcaaatgccccgcagccatcatttaactgcacccgcagaatagttacggtttgtcacccgaccctcccggatcgcctaatttgtccctagtgagaccccgaggctctgcccgcgcctggcttcttcgtagctggatgcatatcgtgctccgggcagcgcgggcgcagggcacgcgttcgcgcacaccctagcacacatgaacacgcgcaagagctgaaccaagcacggtttccatttcaaaaagggagacagcctctaccgcgattgtagaagagactgtggtgtgaattagggaccgggaggcgtcgaacggaggaacggttcatcttagagactaattttctggagtttctgcccctgctctgcgtcagccctcacgtcacttcgccagcagtagcagaggcggcggcggcggctcccggaattgggttggagcaggagcctcgctggctgcttcgctcgcgctctacgcgctcagtccccggcggtagcaggagcctggacccaggcgccgccggcgggcgtgaggcgccggagcccggcctcgaggtgcataccggacccccattcgcatctaacaaggaatctgcgccccagagagtcccgggagcgccgccggtcggtgcccggcgcgccgggccatgcagcgacggccgccgcggagctccgagcagcggtagcgcccccctgtaaagcggttcgctatgccggggccactgtgaaccctgccgcctgccggaacactcttcgctccggaccagctcagcctctgataagctggactcggcacgcccgcaacaagcaccgaggagttaagagagccgcaagcgcagggaaggcctccccgcacgggtgggggaaagcggccggtgcagcgcggggacaggcactcgggctggcactggctgctagggatgtcgtcctggataaggtggcatggacccgccatggcgcggctctggggcttctgctggctggttgtgggcttctggagggccgctttcgcctgtcccacgtcctgcaaatgcagtgcctctcggatctggtgcagcgacccttctcctggcatcgtggcatttccgagattggagcctaacagtgtagatcctgagaacatcaccgaaattttcatcgcaaaccagaaaaggttagaaatcatcaacgaagatgatgttgaagcttatgtgggactgagaaatctgacaattgtggattctggattaaaatttgtggctcataaagcatttctgaaaaacagcaacctgcagcacatcaattttacccgaaacaaactgacgagtttgtctaggaaacatttccgtcaccttgacttgtctgaactgatcctggtgggcaatccatttacatgctcctgtgacattatgtggatcaagactctccaagaggctaaatccagtccagacactcaggatttgtactgcctgaatgaaagcagcaagaatattcccctggcaaacctgcagatacccaattgtggtttgccatctgcaaatctggccgcacctaacctcactgtggaggaaggaaagtctatcacattatcctgtagtgtggcaggtgatccggttcctaatatgtattgggatgttggtaacctggtttccaaacatatgaatgaaacaagccacacacagggctccttaaggataactaacatttcatccgatgacagtgggaagcagatctcttgtgtggcggaaaatcttgtaggagaagatcaagattctgtcaacctcactgtgcattttgcaccaactatcacatttctcgaatctccaacctcagaccaccactggtgcattccattcactgtgaaaggcaaccccaaaccagcgcttcagtggttctataacggggcaatattgaatgagtccaaatacatctgtactaaaatacatgttaccaatcacacggagtaccacggctgcctccagctggataatcccactcacatgaacaatggggactacactctaatagccaagaatgagtatgggaaggatgagaaacagatttctgctcacttcatgggctggcctggaattgacgatggtgcaaacccaaattatcctgatgtaatttatgaagattatggaactgcagcgaatgacatcggggacaccacgaacagaagtaatgaaatcccttccacagacgtcactgataaaaccggtcgggaacatctctcggtctatgctgtggtggtgattgcgtctgtggtgggattttgccttttggtaatgctgtttctgcttaagttggcaagacactccaagtttggcatgaaaggcccagcctccgttatcagcaatgatgatgactctgccagcccactccatcacatctccaatgggagtaacactccatcttcttcggaaggtggcccagatgctgtcattattggaatgaccaagatccctgtcattgaaaatccccagtactttggcatcaccaacagtcagctcaagccagacacatggcccagaggttcccccaagaccgcctgataataatttggtatttggaggctcctgtgtcactgcaggaactaaaggaggctaaatccatgcctgatggaggagaagagttctatggttatctgcaaattctggccagacaacatcttgacgtcactccttagcttccataacctagccaagcaagaagttgcctttccaagacaaagcagtgtgctctaatgactaacccctcaaagtactatgccactttaactatagacccatctcctcgatcaatcaggatggcaagatggagctgaggagctcagcaacatcaagtctggagttggtctttaactcaactagctcgtttagacgtgtctgaacaccacatcacctgacagcacggggtggtttcccagtaaaatttacaaactcagctcaagggcagctgtgttgctttcctttccttgactgctgagaaactttttgacagggaacaatggaaacacaccttctgagctgaaacaaacaaacagaaacaaaacatactaaccagcaaaatccccaaatcatcaatcttgggttctcttgaagggcaggagtgtgttttatcttctcccgtcggagcaaacactatagatgtcctccctaaaattctgtcttccctagagcagccttgtaaattagctagggtcctagggttgaggcctaaatcaacttaaaattgtctctaaatatgtacctggatgtgtttgtacttgcagagcatgccctcttcatgtgcctagggctagtaactccctgtggcagaggcatgtaaagtattctgactttttttttttcaacttaattccatttccaatgaaatggatttttaaaaattttctccagagtgtgccatacttctccagctattatagttaatgtgtgtgtatccttgtgtatatgtgtgtttgtgtgtgcatatgtgttttcctagtggttacatgcttactaggcaattatgtaaataagcacagattcataggccagctaggcctgaggaaagaagacattataaagggagggagtattttaacattagctaaagctatcacacaaggcacccattctgctcccctcaacagccacagcccacttcgtccttgtcttaccaataaggggaaaggctggaggtgatatttttcacagaaccgcagaggttttgaacatatttgcaacattactttgagtacacatgagcaaaaattctgaattacatccaggaccccagaagctcattagatcaaagagtgcggggcccctcagagttaccagagattatctgcagacttcagtgcaatcgaatgaccatggtccattttgatggtcagaggtaggactgaaaaacgggtagaaacaattgctttagcgcttccttctgtactttgcctattaatgttttgtctttcaaaaatatattttctcctaattgtttaattggccaaataatggctgctttgggagttgtttgtatgccttggaaggccatggcctgcactttaaaaataagctaagtccattctgcccagcacgagcattaggacagagaatgcacttattttaggatccttaaaaattgcttcttttatggcacactgggttgacgactcatctcgtgggagccttcatggcacattgctgctgttctgcaggtcccaatacaattccttccccctctcagtgccacggcccccccattgctagctacacaatttgatatcatattcccttttcaactccaaaggagatgataagaagctatcaaataatgctttaaaaaagcaacttgagtttcttaaaagaaaggaaatgaatacatgctgcataattacatttaaaatgtaagccatgttattataagccgcactgagatgaagatttgttagcaaaccagtttcaagcacactcacagtgaagtaaaatcatgtttttagcatctgaccattgggtaatattattctttgttatcaaaagagaaatatcacccaagtatagtatacttagacctcctagaggaaacactccagtcctaagcttggtgtctgaaaagaaaaacaaaaataaagattatggatttaggtcagggagacagagtgatattctgaagactgtgtttactccctcatcatcggccaaccaagatggagttctgcatcctgcacatatcagacatttcagtccaatttcaccaaagcatcagtgatgttctagaagcatcccagcagatggaggatcctaatgtatttgttctgggtatttcccaaggcccagcctgactggagtgtgtgtaccaacaggatgaatccaatcaagctacgcccccattttggtttcggattggccactcttgcatgtgctagtagattgtggaccaggaccagctgagcaaacacagttgcagagtagcctcctatgttgctaagaagctcctgctacccaggtgctttgaacaattgagtgctccctctggttaagtagagatggcaccaccggagtttttcttggatgtgaggctcaatcctttacggcagctattataacaaagtgaaggttttctccctgggaaatgcagcttttctctgtctttactaattctgccagcctgtgagagtaaccaccgtagctgggcttcttctcagattaattgtcatgccaggtctccttcctggggagctgtgatgctgctctgaggttgattgctgaggttgtagtgggtttttgtttgtttttgtttagtttttcttgattgttcttctttctcttgaatggcaagagaagaaacactttctctaacccacggccaggaaggaaatggggagagagctacttcttagttcaacctggttgccacataaaggaatctctctccttggactcagcccctaactggaagcaagagccactgccctctgagactgagagagcagcccgaggaggagatgaatccattctgccctttgtttgggtttgcttcctgtcagtgagagaatgctgaggcagttcctgttatgtgaaactttcatttttaaaaccaggacagtcctaaacagactggaatgagttggtcaatcccagttggtataggcccaatgatttttgctagtaagataggattgtcttcctcacccaaaatgccttcaagtgccctaaaatgggtattttaaaataagaataaataatgtagatttagtagaaaacctggaaaacataagaaacaaagatgaaacgaaaagtcccatgtaattccaccagttagagttaaccactgatatcgtttggatatatggctttctagtcttgtggatatccttttaatctcttgtaatataaagtctgaccatatgtgtccttgcatttgtttgtactggactctgttaatatttctatagtaatggctcactttggggagattgtgctgcacagtgtgtaggaagcacattgggtgtattattcccagttttgtattttgtatttccttggagatgtgcaggggttaagagcgggggtctggccatagctggccacgtcagactctcatatggtaagtatcacagagcacatgaggcctgtgttatgcgctggaaagactcaggaaatgagaggctctcttgttctgacaaggcaggctgagagctctcatttagggtcatcactccagataactccaaatgcagtttattgctcaactgaagcagatgatcactttttgcctccaagttcttcaccctagctagctcctttcaaagagccgagtatgctggatcttaaagggccaaactagttacatctcatacatttcctgatgtttagggatgccttcacttccatcaaggataccttggctgtgcaaggacctctgatagctggagtctccttttggtcactcccagctttgcttaaacttgatggagtttgctgtccagtgatccccggatctttcatcatgaaagccttccttcctctcctgatgtctcaggcctctagacctagactggggttctggcaaggaggcctctatcaatagtatgacatccaataatatgttagtgttgatattttgcacagtaatattaagtttaagagattataaaaatgagttcaaatgaataagttcctgtgatgtaagagattagatatgtgtgatttcagaaccaaagccaggggggaatcccagaaagaaaacaataatataatcctagtttctatatattatttttattcattactgtatatgggtagagatcaatattctttcttatgctgttactattaattaacacattttttaaccatgccattgaacttttgggtgcattaaagtggaacccaagctcctcattagataataatggcatttggactgagtgccatattcctaaatttccaataaagtggttgatatagagaggacaggataaagccctatagtgtgcagttatatcaaaacagctagtctccactttagggaatgcctttactagagattacatgaaatgtctgcttataaaataagcagagatggcaccactaagcagccacctgaattgttttcctacaggaatgattacttttcagatccatttatgttttcatgctcaatacttactccccttccctgcaacacccaaagagtttacttttgcaagtcatttggtcttcagtctactactgaggaatagagaggcactaactgctttacccaggatcagaactcatgttcttaccttctattaatagagtacttgagccagatggactaactggtctcacattttctctatcttggttttacttccataaacatcaatatctttacccacatgatttttccatcctcccatttttttccatatgtattagggttcaggaactatgatgctaatgatcacatttcttcctagttcctaatttcattagtgccatttcctgatatctacagaaacaattatcaatacatgtagctgcttgagccttatttagaaggctagcctttcttttccaagtgctgtcagaatgtatacatttagtctgtctttttcccttttaggagtctttgttctgggttgatggcaaaattcctctttttacatgtgagatttttgatttcactgaattctacctagatttttatggacattggattttaaagaggaaaacactcattttcttagtaagatattggtgatacatagctatgccattgatttccatactcctgagctttggggagggagacagtggccaagtagcaggcagaataagatcatcactcatgtcctgaatcaatcacactttccttctcggattgtgtatatgctctgccacttcctacatattacatcctgagtttttaagtaaagtggatcttagccagatttgagtctaatggctgattcatcggcatagttcttggcgttaacatctcagtgtcctctttagttctctttgaggattcatgtcattgagggcctttgtgcctccacttgtctcagtatgaggaagaactttggtgtgagggcggagctatgtgaagggttgctgggttgggggattagttcatatggtccccatgccatctatttacttttggagagaggggactttgagtgggtgggtatggatagatgttcctcaaggaaaccc

SEQ ID NO: 2376 - protein, 537 aa, Homo sapiens
MSSWIRWHGPAMARLWGFCWLVVGFWRAAFACPTSCKCSASRIWCSDPSPGIVAFPRLEPNSVDPENITEIFIANQKRLEIINEDDVEAYVGLRNLTIVDSGLKFVAHKAFLKNSNLQHINFTRNKLTSLSRKHFRHLDLSELILVGNPFTCSCDIMWIKTLQEAKSSPDTQDLYCLNESSKNIPLANLQIPNCGLPSANLAAPNLTVEEGKSITLSCSVAGDPVPNMYWDVGNLVSKHMNETSHTQGSLRITNISSDDSGKQISCVAENLVGEDQDSVNLTVHFAPTITFLESPTSDHHWCIPFTVKGNPKPALQWFYNGAILNESKYICTKIHVTNHTEYHGCLQLDNPTHMNNGDYTLIAKNEYGKDEKQISAHFMGWPGIDDGANPNYPDVIYEDYGTAANDIGDTTNRSNEIPSTDVTDKTGREHLSVYAVVVIASVVGFCLLVMLFLLKLARHSKFGMKGPASVISNDDDSASPLHHISNGSNTPSSSEGGPDAVIIGMTKIPVIENPQYFGITNSQLKPDTWPRGSPKTA

SEQ ID NO: 2377 - DNA, 5608 bp, Homo sapiens
aagacggattctcagacaaggcttgcaaatgccccgcagccatcatttaactgcacccgcagaatagttacggtttgtcacccgaccctcccggatcgcctaatttgtccctagtgagaccccgaggctctgcccgcgcctggcttcttcgtagctggatgcatatcgtgctccgggcagcgcgggcgcagggcacgcgttcgcgcacaccctagcacacatgaacacgcgcaagagctgaaccaagcacggtttccatttcaaaaagggagacagcctctaccgcgattgtagaagagactgtggtgtgaattagggaccgggaggcgtcgaacggaggaacggttcatcttagagactaattttctggagtttctgcccctgctctgcgtcagccctcacgtcacttcgccagcagtagcagaggcggcggcggcggctcccggaattgggttggagcaggagcctcgctggctgcttcgctcgcgctctacgcgctcagtccccggcggtagcaggagcctggacccaggcgccgccggcgggcgtgaggcgccggagcccggcctcgaggtgcataccggacccccattcgcatctaacaaggaatctgcgccccagagagtcccgggagcgccgccggtcggtgcccggcgcgccgggccatgcagcgacggccgccgcggagctccgagcagcggtagcgcccccctgtaaagcggttcgctatgccggggccactgtgaaccctgccgcctgccggaacactcttcgctccggaccagctcagcctctgataagctggactcggcacgcccgcaacaagcaccgaggagttaagagagccgcaagcgcagggaaggcctccccgcacgggtgggggaaagcggccggtgcagcgcggggacaggcactcgggctggcactggctgctagggatgtcgtcctggataaggtggcatggacccgccatggcgcggctctggggcttctgctggctggttgtgggcttctggagggccgctttcgcctgtcccacgtcctgcaaatgcagtgcctctcggatctggtgcagcgacccttctcctggcatcgtggcatttccgagattggagcctaacagtgtagatcctgagaacatcaccgaaattttcatcgcaaaccagaaaaggttagaaatcatcaacgaagatgatgttgaagcttatgtgggactgagaaatctgacaattgtggattctggattaaaatttgtggctcataaagcatttctgaaaaacagcaacctgcagcacatcaattttacccgaaacaaactgacgagtttgtctaggaaacatttccgtcaccttgacttgtctgaactgatcctggtgggcaatccatttacatgctcctgtgacattatgtggatcaagactctccaagaggctaaatccagtccagacactcaggatttgtactgcctgaatgaaagcagcaagaatattcccctggcaaacctgcagatacccaattgtggtttgccatctgcaaatctggccgcacctaacctcactgtggaggaaggaaagtctatcacattatcctgtagtgtggcaggtgatccggttcctaatatgtattgggatgttggtaacctggtttccaaacatatgaatgaaacaagccacacacagggctccttaaggataactaacatttcatccgatgacagtgggaagcagatctcttgtgtggcggaaaatcttgtaggagaagatcaagattctgtcaacctcactgtgcattttgcaccaactatcacatttctcgaatctccaacctcagaccaccactggtgcattccattcactgtgaaaggcaaccccaaaccagcgcttcagtggttctataacggggcaatattgaatgagtccaaatacatctgtactaaaatacatgttaccaatcacacggagtaccacggctgcctccagctggataatcccactcacatgaacaatggggactacactctaatagccaagaatgagtatgggaaggatgagaaacagatttctgctcacttcatgggctggcctggaattgacgatggtgcaaacccaaattatcctgatgtaatttatgaagattatggaactgcagcgaatgacatcggggacaccacgaacagaagtaatgaaatcccttccacagacgtcactgataaaaccggtcgggaacatctctcggtctatgctgtggtggtgattgcgtctgtggtgggattttgccttttggtaatgctgtttctgcttaagttggcaagacactccaagtttggcatgaaagatttctcatggtttggatttgggaaagtaaaatcaagacaaggtgttggcccagcctccgttatcagcaatgatgatgactctgccagcccactccatcacatctccaatgggagtaacactccatcttcttcggaaggtggcccagatgctgtcattattggaatgaccaagatccctgtcattgaaaatccccagtactttggcatcaccaacagtcagctcaagccagacacatttgttcagcacatcaagcgacataacattgttctgaaaagggagctaggcgaaggagcctttggaaaagtgttcctagctgaatgctataacctctgtcctgagcaggacaagatcttggtggcagtgaagaccctgaaggatgccagtgacaatgcacgcaaggacttccaccgtgaggccgagctcctgaccaacctccagcatgagcacatcgtcaagttctatggcgtctgcgtggagggcgaccccctcatcatggtctttgagtacatgaagcatggggacctcaacaagttcctcagggcacacggccctgatgccgtgctgatggctgagggcaacccgcccacggaactgacgcagtcgcagatgctgcatatagcccagcagatcgccgcgggcatggtctacctggcgtcccagcacttcgtgcaccgcgatttggccaccaggaactgcctggtcggggagaacttgctggtgaaaatcggggactttgggatgtcccgggacgtgtacagcactgactactacagggtcggtggccacacaatgctgcccattcgctggatgcctccagagagcatcatgtacaggaaattcacgacggaaagcgacgtctggagcctgggggtcgtgttgtgggagattttcacctatggcaaacagccctggtaccagctgtcaaacaatgaggtgatagagtgtatcactcagggccgagtcctgcagcgaccccgcacgtgcccccaggaggtgtatgagctgatgctggggtgctggcagcgagagccccacatgaggaagaacatcaagggcatccataccctccttcagaacttggccaaggcatctccggtctacctggacattctaggctagggcccttttccccagaccgatccttcccaacgtactcctcagacgggctgagaggatgaacatcttttaactgccgctggaggccaccaagctgctctccttcactctgacagtattaacatcaaagactccgagaagctctcgagggaagcagtgtgtacttcttcatccatagacacagtattgacttctttttggcattatctctttctctctttccatctcccttggttgttcctttttctttttttaaattttctttttcttttttttttcgtcttccctgcttcacgattcttaccctttcttttgaatcaatctggcttctgcattactattaactctgcatagacaaaggccttaacaaacgtaatttgttatatcagcagacactccagtttgcccaccacaactaacaatgccttgttgtattcctgcctttgatgtggatgaaaaaaagggaaaacaaatatttcacttaaactttgtcacttctgctgtacagatatcgagagtttctatggattcacttctatttatttattattattactgttcttattgtttttggatggcttaagcctgtgtataaaaaagaaaacttgtgttcaatctgtgaagcctttatctatgggagattaaaaccagagagaaagaagatttattatgaaccgcaatatgggaggaacaaagacaaccactgggatcagctggtgtcagtccctacttaggaaatactcagcaactgttagctgggaagaatgtattcggcaccttcccctgaggacctttctgaggagtaaaaagactactggcctctgtgccatggatgattcttttcccatcaccagaaatgatagcgtgcagtagagagcaaagatggcttccgtgagacacaagatggcgcatagtgtgctcggacacagttttgtcttcgtaggttgtgatgatagcactggtttgtttctcaagcgctatccacagaacctttgtcaacttcagttgaaaagaggtggattcatgtccagagctcatttcggggtcaggtgggaaagccaagaacttggaaaagataagacaagctataaattcggaggcaagtttcttttacaatgaacttttcagatctcacttccctccgacccctaacttccatgcccacccgtccttttaactgtgcaagcaaaattgtgcatggtcttcgtcgattaataccttgtgtgcagacactactgctccagacgtcgtttccctgataggtagagcagatccataaaaaggtatgacttatacaattaggggaagctaatggagtttattagctgagtatcaatgtctctgcgttgtacggtggtgatgggttttaatgaatatggaccctgaagcctggaaatcctcatccacgtcgaacccacaggactgtgggaagggcagaatcaatccctaagggaaaggaaacctcaccctgagggcatcacatgcactcatgttcagtgtacacaggtcaagtcccttgctctgggctctagttgggagagtggtttcattccaagtgtactccattgtcagtatgctgtttttgtttccttcactccattcaaaaagtcaaaatacaaaatttggcacagcatgccaacgggaggctgtgcccagaccaagcactggaagtgtgcttctaggcatagtcattggttttgcaaaaagagggctcaaatttaaatagaaatttacagctatttgaatggtcagatataccaagaaagaaaaatatttctgttcctcaagaaaacttgctaccctctgtgaggggaattttgctaaacttgacatctttataacatgagccagattgaaagggagtgattttcattcatcttaggtcatgttatttcatatttgtttctgaaggtgcgatagctctgttttaggttttgcttgcgcctgttaattactggaacaccttatttttcattaaaggctttgaaagccaattctcaaaaattcaaaagtgcaaattaacagaacaaaaggaaatccagtagcaactgcagtcaagcgagggagttgacaagataaaccttacgtccattcaagttatatgctggcctatgagagatgagagttgggtcgtttgttctctttgttgatgattt

SEQ ID NO: 2378 - protein, 838 aa, Homo sapiens
MSSWIRWHGPAMARLWGFCWLVVGFWRAAFACPTSCKCSASRIWCSDPSPGIVAFPRLEPNSVDPENITEIFIANQKRLEIINEDDVEAYVGLRNLTIVDSGLKFVAHKAFLKNSNLQHINFTRNKLTSLSRKHFRHLDLSELILVGNPFTCSCDIMWIKTLQEAKSSPDTQDLYCLNESSKNIPLANLQIPNCGLPSANLAAPNLTVEEGKSITLSCSVAGDPVPNMYWDVGNLVSKHMNETSHTQGSLRITNISSDDSGKQISCVAENLVGEDQDSVNLTVHFAPTITFLESPTSDHHWCIPFTVKGNPKPALQWFYNGAILNESKYICTKIHVTNHTEYHGCLQLDNPTHMNNGDYTLIAKNEYGKDEKQISAHFMGWPGIDDGANPNYPDVIYEDYGTAANDIGDTTNRSNEIPSTDVTDKTGREHLSVYAVVVIASVVGFCLLVMLFLLKLARHSKFGMKDFSWFGFGKVKSRQGVGPASVISNDDDSASPLHHISNGSNTPSSSEGGPDAVIIGMTKIPVIENPQYFGITNSQLKPDTFVQHIKRHNIVLKRELGEGAFGKVFLAECYNLCPEQDKILVAVKTLKDASDNARKDFHREAELLTNLQHEHIVKFYGVCVEGDPLIMVFEYMKHGDLNKFLRAHGPDAVLMAEGNPPTELTQSQMLHIAQQIAAGMVYLASQHFVHRDLATRNCLVGENLLVKIGDFGMSRDVYSTDYYRVGGHTMLPIRWMPPESIMYRKFTTESDVWSLGVVLWEIFTYGKQPWYQLSNNEVIECITQGRVLQRPRTCPQEVYELMLGCWQREPHMRKNIKGIHTLLQNLAKASPVYLDILG

SEQ ID NO: 2379 - DNA, 5154 bp, Homo sapiens
gttcgcagctcaggaaggagggagccccaggaacaggagtcccaccgaagaactgctctctgacagaacagagacctcctcaccagggcttccaaacagatgcagaagaacccagaaaggagcaggtcttgatttgcccaaccagcggcacttcttcatccccttgcccagagagcaccagacttggtgatgtcgccacatccagaagccatcacagattgtgtgacactgaacactgtgggccaacttgcagaaggtggttatcctttacggttctccacactctttcaggagcagcagaaaatgaacatatctcaggcatcagtgtcattcaaggacgtgactatagaattcacccaggaggagtggcagcaaatggcccctgttcagaagaatctgtacagagatgtgatgctggagaactacagcaacctcgtctcagtggggtactgctgtttcaaaccagaggtgatcttcaagttggagcaaggagaggagccttggttctcagaggaggaattctcaaaccagagtcacccaaaagattacagaggtgatgacctgatcaagcagaacaagaaaatcaaagacaaacacttggagcaagcaatatgtatcaataataaaacattgactacagaggaagagaaagttttggggaaaccatttactctgcatgtagctgctgttgcttcaacaaaaatgtcctgcaaatgcaactcatgggaagtgaatttgcaaagtatttctgaatttatcattaataatagaaactattcaacaaagaaaataggttgcggtaatgtatgtgagaattcacctttcaaaattaactttgagaaaactcagactggagagaaattttatgaacataataaaaacatgaaagctctcaattataatgaaaatcttcccaagcatccaaagtttcaaactttggagcaagcttttgaatgtaataaaattggaaaagcctttaatgataaggctaactgtgttaaacataacagttctcacacaggagaaacatcctctaaagatgatgaatttaggaaaaattgtgataagaaaactctctttgaccacaggagaactggcacagggaagaaacacctgcatcttaatcaatgtgggaaatcctttgagaagtcaactgtggaggaatataataaacttaatatgggtataaaacattatgaattaaatccaagtggaaataatttcaacagaaaggcacacctcactgatcctcaaacagctgtcatagaagagaacccattggtaagtaatgacagaacacagacttgggttaaatcctctgaatatcatgaaaataagaaatcctaccagacgtcggttcacagagttcgccgaagaagtcactcaatgatgaaaccctataaatgtaatgaatgtgggaaatccttctgtcagaaaggacatctcattcaacatcagagaactcacacaggagagaaaccatttgaatgtagtgaatgtggaaaaactttctcccagaagtcacacctcagtactcatcagagaattcatacagcagaaaaaccctataaatgtaatgaatgtggaaaaacatttgtccagaagtcaaccctcaggggacatcaaagaattcacacaggagaaaaaccctatgaatgtagtgaatgtgggaaaacttttgttcagaagtccaccctcagagatcatcacagaattcacacaggggagaaatcctttcaatgcaatcaatgtggaaaaacatttggccagaagtcaaacctcagaatacatcagagaactcacactggggagaaaacttaccagtgtaatgaatgtgaaaaatccttctggcgaaaagatcatctcattcaacatcagaaaactcacacgggagagaaaccattcaaatgtaacgaatgtgggaaaacttttgcccggacatcaaccctcagagtgcatcaaagaattcacactggggagaaaccatttaaatgtaatgaatgtgggaagaaatttgtccggaaagcaatccttagtgatcatcagagaattcacacaggggagaaaccctttcagtgtaataaatgtgggaaaacttttggccagaaatcaaacctcagaatacatcaaaggactcacagtggggagaaatcttatgaatgcaatgaatatgggaaattatgtaagaagtctaccctaagcttataccagaaaattcagggagaggggaatccctattgatgtaataactagaaaatccttttgacaaaaggaataccccatttgatatcagagatacacaaaaaaccaattgagggtagtgaatgtaagaagacagtcccagaagtaaaccctcactgtgaatcagagaattcacataggaaagaaaccagatgaagatgaatgcaggaagaattgtgtccaaaatgcaaccttcagagtgtatcaaagaattcagacaggcttctgttttcagagtactatggataggcctgaatgaagtcataccctattagatagctcccacacatcacacaggctggtaatctcttcaccagcaccaatttcattttactccaggcacatagtccagatttcccaatctccttttcatccaggttggtctttgtgactggctactaagatgtggatgtccatgatgtatatcacatcccagtctgaaacataagagacttccctaataaattaccagggccctgtcacaacaaaatggatatcatttctaggacaagcttggtgccgtgctttaatgtggcatggtacaagataaagaagtctgtgcctgaatgaatacacgcagcaaaattctcctcttctgtgtctttcccagttgaacattatgtgagcaaaatttaagcttatacagtagtccccccttatctgtattttcactttacgcaatttccattaaccatggtcaactgtactttaaagttattaaatggatccagaaataaacaattcctacattttaaactgcacccgattctgagtagtgggatgaagtctcatgccctcctgctctcccatgagggttattgaatcattccttagtctagcatatccacagtgtatacactatctgccagttagtcacttacttgacattttagttatcagatcacctgtcagggtatgacagtgcttgtattcaagtaacccttgttttactaaataatggcctgaaattgcaagagcatttctggcatgttgttgtaattattccattattagtccttaatttataaattaggcacagcaagagattaaactatcataggcatgtgtatatgtaggaaaaaaatatagtatatacagggttcagtatacccgtggtttcaaacatcaacttggaattcttggagagcattccttgtagttaagcagggactactgtattctgttgagctttcacatgtttgagtctatttgtttctacacataatttagttatcttctgctaggaaggcagaaagcttctgtgtaagccaggcttaagtcaatcagagggcacaaaccttattaggaggctagagagtcaaggagaacctcaaatatgatcagagaattgtggaaaagacatcctttcaatgtaatgaaattgatagtaccacctgatacagggctttgcatgaacctaaaagtcttttggctgaatggtgagcagccactgtgcagttcaacgtaagtgtgccttaattgcacagaggtactgcccccacacctcctgacacctccatataccccagctatatctgctttaaggagttttccctggctccaaaggccattggcacccacccaagtattatgggaaacctccagagaggggagggactcagatttatatggctttattgaatccatgcccaaggcaacatcttactagttcctgtgggggtacaggacacctagatttagctaatggggtttggcaatgggaaggcaaacaaatttaataactttatgggtgaggtactttgggccagtagagtatactacagttatgtttacatctgaaagtgtagtagggattaattcccataagttatagagagaattctaattccctgtaattcgcataagtcatagaattctaatcaggaataattgtatgtaaagatacctctgaggtccaacagctctgatcattttgggcttcaagtctctctctgtgactggtgattttgtgggttgaaacttctggcaaaagggggcagcccttgggagctgggggccaggggattgacttggttccctgacaagggtaccaggtccaccccttctgaaaagcagctgttagtttactcttgggctcttttacacattggatatctcttccttgggtagagggttctgacctaaaattccactttaggagtttgtcgtcttggactcaacaactaacaaaatgaaaaggacccagcaagcctcacttgtggaatgaaaatggggcattcaggaaagcacctgtcctggccccacagtatgtcagctgtataggcaatagtagtagctgtctcttagaagggaaataatgtatcacctctttccagaacgaagcaaagttgctggcttagtagagccctcaattcatagaggttactgtaattgggcctggctcactgatgctttcgccaactgaaactactaggatcctgtgtgtgttcaaactcagtgccattaacaaacccaaagtgaagcggtcactcctctcagtggaaagagcacgaggatgttctcagctctggccaatactccatttcataaaccatgttacatttttgttaagccttggctctggatgtggcctagatatttgatattctaattggaaattacagattaaaaagcaccctttctttgtacagtgggggtaaaagtcacagctgcttagtacaaccatctgggttgctcaagtagatgcccataataagagactattttctgataagactgactggaatcaagctgccgacagctttctccatccagattgtgacggttgctacctggatccatcattttactggtatggcaaaaaatcacccatgtgacactgggtgacatggtaaaagtacatggtacttttacagtaccatgtactgtacaaaataaaggtctctttatctg

SEQ ID NO: 2380 - protein, 683 aa, Homo sapiens
MSPHPEAITDCVTLNTVGQLAEGGYPLRFSTLFQEQQKMNISQASVSFKDVTIEFTQEEWQQMAPVQKNLYRDVMLENYSNLVSVGYCCFKPEVIFKLEQGEEPWFSEEEFSNQSHPKDYRGDDLIKQNKKIKDKHLEQAICINNKTLTTEEEKVLGKPFTLHVAAVASTKMSCKCNSWEVNLQSISEFIINNRNYSTKKIGCGNVCENSPFKINFEKTQTGEKFYEHNKNMKALNYNENLPKHPKFQTLEQAFECNKIGKAFNDKANCVKHNSSHTGETSSKDDEFRKNCDKKTLFDHRRTGTGKKHLHLNQCGKSFEKSTVEEYNKLNMGIKHYELNPSGNNFNRKAHLTDPQTAVIEENPLVSNDRTQTWVKSSEYHENKKSYQTSVHRVRRRSHSMMKPYKCNECGKSFCQKGHLIQHQRTHTGEKPFECSECGKTFSQKSHLSTHQRIHTAEKPYKCNECGKTFVQKSTLRGHQRIHTGEKPYECSECGKTFVQKSTLRDHHRIHTGEKSFQCNQCGKTFGQKSNLRIHQRTHTGEKTYQCNECEKSFWRKDHLIQHQKTHTGEKPFKCNECGKTFARTSTLRVHQRIHTGEKPFKCNECGKKFVRKAILSDHQRIHTGEKPFQCNKCGKTFGQKSNLRIHQRTHSGEKSYECNEYGKLCKKSTLSLYQKIQGEGNPY

SEQ ID NO: 2381 - DNA, 3313 bp, Homo sapiens
ctggagctggaaaaacccggatgccatactgctgttaacatatgtgacactggagactttgtccctacctcatagaatcccatgcatgatgatacatgaagggttttccgtggctatctacttctgattcttttgaaagctttaaagacattgggcatgaaaggttcagtgagtttccggggatccctcgtttgtggtagagccaggaggaaaacagttccgttcattctttcacagctgaggctttacagttctctatactctcccaagagccacagaaaatgaacacatttcaggcatcagtgtcattccaggacgtgactgtggaattcagccaggaggagtggcagcacatgggccctgttgagaggaccctgtacagagatgtgatgctggagaactacagccacctcgtctcagtgggctactgctttacaaaaccagaactgatcttcacattggaacaaggagaagatccatggttattagagaaagagaaaggatttctaagcaggaactccccagaagactcccaacctgatgaaatctcagagaagagcccagaaaatcaaggcaaacatttgttgcaagttttattcaccaataaattattgactacagagcaagaaatttcaggaaaaccacataatcgagacataaacatttttcgtgcaagaatgatgccttgtaaatgtgacattgcggggtctgcttgccaggggctcagcctgatggccccacactgtcagtattcaaaagaaaaggctcatgagcgtaatgtttgtgacaaatggctcatcagtattaaggatggcagaactaacactcaagagaaatctttcgcttatagtaaaattgtgaaaaccctccatcataaggaggaagttattcaacatcagacaattcagactctggggcaagattttgaatataatgaaagtagaaaagcttttcttgaaaaggctgcccttgttacatctaacagtacccacccaaaaggaaaatcttacaatttcaataaatttggggaaaacaaatatgataaatcaacctttattattcctcagaacatgaatccagagaagagtcactatgagtttaatgatactggaaattgtttctgtagaatcactcacaaaactctcacaggagggaaatccttcagccaaaagtcacacattagagaacatcatagagttcatataggggtgaaaccctttgaatatggaaaaagtttcaaccgtaattcaaccctcccagtgcatcagagaactcatgcaacagataaatactctgattatcacccatgtacagagacattcagctaccagtcaactttcagtgtacatcagaaggttcacataagggcaaaaccctatgagtataatgaatgtgggaaatcctgctctatgaattcacacttgatttggcctcagaaaagtcacacaggggagaaaccctatgaatgtcctgagtgcgggaaagccttcagtgagaagtcacgcctaagaaaacatcagagaactcacacgggagagaaaccatacaaatgtgatggatgtgataaagctttcagtgcaaagtcaggcctaagaatacaccagagaacccacacaggggagaaaccattcgaatgtcatgaatgtgggaaatcttttaactataagtcaatcctcatagtgcatcagagaactcacacaggggagaaaccttttgaatgtaatgaatgcgggaaatctttcagccatatgtcaggcctaaggaatcaccgaagaactcacacaggggaaagaccatataaatgtgatgaatgtgggaaagctttcaaactgaagtcaggcctgaggaaacatcatagaacacacacaggggagaagccctacaaatgtaatcagtgtggaaaagctttcggtcagaaatcacaactcagaggacatcatagaattcacacaggggaaaaaccctataaatgtaatcattgtggggaagctttcagtcagaaatcaaacctcagagtacatcacagaactcatactggggagaaaccctatcaatgtgaggagtgtggaaaaacattcaggcagaaatcaaatctcagagggcatcagagaactcacactggggagaagccctatgaatgtaatgaatgtggaaaagctttcagtgagaagtcagtcctaagaaaacatcagcgaactcacaccggggagaaaccatataattgtaatcagtgtggggaagctttcagtcagaaatccaatctcagagtacatcagagaactcacacaggggagaaaccctataaatgtgataaatgtgggagaactttcagtcaaaaatcaagccttagagaacatcagaaagcccacccaggggattaaatgtatgcatataaagaatacgaaaaaactctgagctggaaatcaaacctcacaatacataaatgaacacacaggagagaactgttaacatagtgagcactggaatttcctctacaatttcagcctccaccaaatatcaaagaatagaagataaattgttgaaatctattttatatgggcattctttcagccagagcccagtcttctatggatatacagaactcacacagcaaagaaaccctataaacataatgaatatggaaaatactcttgcgaactcactcctcagaaaactcacgctgcagaaaagctctgagaaagtaataaaaatgtgaaaactttgtgccaacaatcaaaactcattcaccatcagagaaatcacacaatgacaaaagctagaatataataagtgtgtgataaactttaatgaaaagtcagtacagcagaaaatacattcaagatagagacctcatagtatattaaaacaaacaagaaatgaagttaatggatgtgggaaattcttctgccatgtcaaccctcattttaacctacacagaggtaatccctatatgtcgtataataactattgaaatgttcactagtaatcattttcacttctccctcatgccacacctggcctaaatttctcaaccactctctcatctaaacggggtcatattgttaccctctagctagtggaatatggggtcagtgacaggtcttaaatacatcagtcaaattctcaatattttcttctatccctcattagaatggaatggaggaaaaccttgggactcaggctctgatgatggaaagtacaagatggtaggaacccgggtcagagaaggatcctgtggcatggagttttctcctccctgtacacagttggacttcttgcagtgaggaaataaatgtgttccctgctgaacttc

SEQ ID NO: 2382 - protein, 699 aa, Homo sapiens
MNTFQASVSFQDVTVEFSQEEWQHMGPVERTLYRDVMLENYSHLVSVGYCFTKPELIFTLEQGEDPWLLEKEKGFLSRNSPEDSQPDEISEKSPENQGKHLLQVLFTNKLLTTEQEISGKPHNRDINIFRARMMPCKCDIAGSACQGLSLMAPHCQYSKEKAHERNVCDKWLISIKDGRTNTQEKSFAYSKIVKTLHHKEEVIQHQTIQTLGQDFEYNESRKAFLEKAALVTSNSTHPKGKSYNFNKFGENKYDKSTFIIPQNMNPEKSHYEFNDTGNCFCRITHKTLTGGKSFSQKSHIREHHRVHIGVKPFEYGKSFNRNSTLPVHQRTHATDKYSDYHPCTETFSYQSTFSVHQKVHIRAKPYEYNECGKSCSMNSHLIWPQKSHTGEKPYECPECGKAFSEKSRLRKHQRTHTGEKPYKCDGCDKAFSAKSGLRIHQRTHTGEKPFECHECGKSFNYKSILIVHQRTHTGEKPFECNECGKSFSHMSGLRNHRRTHTGERPYKCDECGKAFKLKSGLRKHHRTHTGEKPYKCNQCGKAFGQKSQLRGHHRIHTGEKPYKCNHCGEAFSQKSNLRVHHRTHTGEKPYQCEECGKTFRQKSNLRGHQRTHTGEKPYECNECGKAFSEKSVLRKHQRTHTGEKPYNCNQCGEAFSQKSNLRVHQRTHTGEKPYKCDKCGRTFSQKSSLREHQKAHPGD

SEQ ID NO: 2383 - DNA, 1496 bp, Homo sapiens
gctctaagcgcccggggccccgcccagtggccggcacagccaatcgcagcgcgggaaggcggtgggggcggggaaggccgcctggaaacttaaatcccgaggcgggcgaacctgcaccagaccgcggacgtctgtaatctcagaggcttgtttgctgagggtgcctgcgcagctgcgacggctgctggttttgaaacatgaatctttcgctcgtcctggctgccttttgcttgggaatagcctccgctgttccaaaatttgaccaaaatttggatacaaagtggtaccagtggaaggcaacacacagaagattatatggcgcgaatgaagaaggatggaggagagcagtgtgggaaaagaatatgaaaatgattgaactgcacaatggggaatacagccaagggaaacatggcttcacaatggccatgaatgcttttggtgacatgaccaatgaagaattcaggcagatgatgggttgctttcgaaaccagaaattcaggaaggggaaagtgttccgtgagcctctgtttcttgatcttcccaaatctgtggattggagaaagaaaggctacgtgacgccagtgaagaatcagaaacagtgtggttcttgttgggcttttagtgcgactggtgctcttgaaggacagatgttccggaaaactgggaaacttgtctcactgagcgagcagaatctggtggactgttcgcgtcctcaaggcaatcagggctgcaatggtggcttcatggctagggccttccagtatgtcaaggagaacggaggcctggactctgaggaatcctatccatatgtagcagtggatgaaatctgtaagtacagacctgagaattctgttgctaatgacactggcttcacagtggtcgcacctggaaaggagaaggccctgatgaaagcagtcgcaactgtggggcccatctccgttgctatggatgcaggccattcgtccttccagttctacaaatcaggcatttattttgaaccagactgcagcagcaaaaacctggatcatggtgttctggtggttggctacggctttgaaggagcaaattcgaataacagcaagtattggctcgtcaaaaacagctggggtccagaatggggctcgaatggctatgtaaaaatagccaaagacaagaacaaccactgtggaatcgccacagcagccagctaccccaatgtgtgagctgatggatggtgaggaggaaggacttaaggacagcatgtctggggaaattttatcttgaaactgaccaaacgcttattgtgtaagataaaccagttgaatcattgaggatccaagttgagattttaattctgtgacatttttacaagggtaaaatgttaccactactttaattattgttatacacagctttatgatatcaaagactcattgcttaattctaagacttttgaattttcattttttaaaaagatgtacaaaacagtttgaaataaattttaattcgtatataaa

SEQ ID NO: 2384 - protein, 334 aa, Homo sapiens
MNLSLVLAAFCLGIASAVPKFDQNLDTKWYQWKATHRRLYGANEEGWRRAVWEKNMKMIELHNGEYSQGKHGFTMAMNAFGDMTNEEFRQMMGCFRNQKFRKGKVFREPLFLDLPKSVDWRKKGYVTPVKNQKQCGSCWAFSATGALEGQMFRKTGKLVSLSEQNLVDCSRPQGNQGCNGGFMARAFQYVKENGGLDSEESYPYVAVDEICKYRPENSVANDTGFTVVAPGKEKALMKAVATVGPISVAMDAGHSSFQFYKSGIYFEPDCSSKNLDHGVLVVGYGFEGANSNNSKYWLVKNSWGPEWGSNGYVKIAKDKNNHCGIATAASYPNV

SEQ ID NO: 2385 - DNA, 2311 bp, Homo sapiens
tttcaggagaaatgataccagctttttttgtacctctggtagaattcaactgtgactccatctggtcctgggctttttttgattgggaagccatgtgacttcatcctccgtggctctggtggtctcttcgacatctgtgagatactcactaaaagctggttgcgctttgagatctgggcgcctgctggaacctggagccacaagtcttcattcatgctaaagaactcctgtcttggtggagtggctcggctggcccgtgtatgggaacccatgaggctgtccgcgcatcccgaagtgtgaccttccaggcccacagggtggctggcgctgggcttcttcgtggcccgcgacagtccggccaccttcatcggccagtggcgcacggatctgggcgactccgaagtgctccgcgagctggcaagggagacactgggactctgcacccgctcagctccccaagataaaggcctcggaggggaagttccgcgtgggagactccggcctgttggtctctgtgctggtgcgggggagccgcgtgacggcgcgcgtgggtgtggcgacccgctggagcgctacctggaccgtcaggacccgcgctgccgctcctccactacccactgcccgcccccgtcgagggtccgcaccctgtccccgcagagggtgtcgcccacccctagcccctgccctggtagcctggtcccctcgagagagcgccggcgctccgggccctaggtgacccctattcgcttacaaagcataaagcaggtgccgaggctcccaggccctgggatcagctgcccgccgcatccccgctcctactccgaggacagtgactcctcagctttctcagcccagagccgcccccttggtgcccgcagcgaggatgaggcactaggcccggaggaagcgatccagacgggggctgaccaccaccacctggcctctccgagacggccccctgccccgcgcagccagtcccgggaccggctggatccgggtcagccccggggagctccagaagagagaggaggggagcccagctgcgggccctcagccctgccccgtgggcgcaggagcaggttgggcgcaaggatggagatgggcagcactcgtgggagccacagggcaggggcagcggggctcgggcaggagcactcctgggctctccgtgcccaccgccctgaagcaccctggctttcccagtccaaacccagtgtagagtttagcaccacacgcgccagcgtcttccgcacacaccagagcagctgctctgacgcctggacgaggagtttctggccaatgccgggacccataaggctgttgctagcgggacctccactagaccagcccctaaccgggctccagccccagaccctctagctcctgactcggcctacagatcctctagttcctcctcttcatccctcattctcttgtatggcaaacgtggccaacgtggggactctggccttaagaccaatgggctgcccggcccgctgtcaagcccttcccagctcctcctccaatgaaggaaagccctgccctagcatgggaggggctactagatgcacctgggagccccctgactggtccagaacactcgaggacctgagcactgggtaggatggacatacagccagactgcaaaccctcgggcatccccatgcctagggtctcccccgggttcctccagacccacagagttggggggtgcggggggaaggggaagggagcttgcatgcctccagccaggttcctggaccagaccagctgcccccaaaccctgtcccttctccttttcgtttgtggccttaaccctctttgcatcagggggccccctctgcctcttgcgttcctgacttcatgggaccagactcctcaggaatgtcacaatgggacctctattgtacattacagttgggggatgagctttgctatttaattactaatattattgaatgccttagaggaggccagagcagcctggtatcctgaggacacgtggcccagcagagcctctgaacagtaaagttttgctccagccaaaatgagagagagagagaatctattaagttagtttaaccagaacccccgttatccctgatgcttcctgttagtaattttgtatccagtgacccctgtcccttggccataaattcctacttgtgcttgttctatttggaatagagcccagttctgtactgatgtctcttttccccaactgagatagtttctaaataaaatttgcctttgctgctttaaaaaaaaaaaaaaaaaaaaaaaaaaaaaaaaaaaaaaaaaaaaaaaaaaa

SEQ ID NO: 2386 - DNA, 2374 bp, Homo sapiens
atgattgaaaggcctgaaacagatgtatcttccaagttcttatcaagaaaatgactgtgagggcaacgatgggtcaagaagaccagcggaaaactccctaggagagagccatagaaaatgtacacttcagaagagaaatgtaatcagagaactcaaaaaaggaaaatatataatgtatgccctcggaagggtaaaaagatttttattcatatgcatgagattattcagatagatggtcatatataccagtgccttgaatgcaagcaaaacttgtgtgaaaacttagctcttattatgtgtgagagaacccatactggggagaaaccttataaatgtgatatgtgtgagaaaacctttgtccaaagctcagatcttacttcacaccagaggatccacaattacgagaaaccttataaatgtagcaaatgtgagaagagcttttggcatcacttagtgctttcaggacatcagagaacacatgcaggtaaaaaattctatacatgtgacatttgtggcaagaattttggtcagagttctgatctgcttgtccaccagcgaagccatactggcgagaaaccatatctatgtagtgagtgtgacaaatgcttcagtagaagtacaaacctcataaggcatcgaagaactcacacaggtgagaaaccatttaagtgtctcgagtgtgaaaaagcttttagtgggaaatcagatcttattagccaccagagaactcacactggggaaaggccctacaaatgtaataagtgtgagaaaagttaccgacaccgttcagccttcattgtacataaaagagttcatactggggagaagccctataagtgtggtgcctgtgaaaaatgctttggccagaaatcagaccttatcgtgcaccagagagtccacacaggtgagaagccgtataaatgcctggaatgtatgagaagttttactcggagtgccaacctaattaggcaccaggcaactcacactcacacttttaaatgccttgaatatgaaaaaagctttaactgtagctcagatcttattgtacatcagagaattcacatggaagagaaaccacatcagtggtctgcgtgtgagagtggcttcctcctaggaatggactttgttgcccaacagaaaatgagaactcaaacagaggagctacactataaatacactgtatgtgataaaagcttccaccagagttcagcccttcttcaacatcagacagtacgcattggtgaaaaaccgtttgtctgtaatgtgagtgaaaaaggtcttgagcttagccctccccatgcgtcagaagcctcacagatgtcttgaccaggcgagaagctgtaataccaatattaaaaattatttatgtatcagagaactcattaagatgaggacaaatctcagactttgctcagagctcagaattcagtggggaccagagagcctgcaattggaaatatgagaaattctttgcccagagagctgccctaacagaacacttcatcctcactccaacgagaaatctacagatgcccagaggttttgaaaacttaccgtctgagctcaaatttgatcactcacaagaggattcatacaagtgggaaaccttagaaatgcactgagtgtgagagagctttctactaatgctcagcccttctcgttgtaagagaattcacaccggagaacaactttttaaatgccttcagtgtcagttgtgctgcagacagtatgaacatctcattggacctcagaaaacccaccctggggagaagccccagcaagtgtgaaaaaagcttctaacaaaactctgacttacccatcagagaagccatactggtgaaaaattgtatatttgtcttacgtatggcaaaagcattcattggagagccttacttgggtttgcacccaaaaaaaaaaacccaatctgaggaaagactgcaagtgtctgaatgaagagtgcttgtcaatgatcaactcttgtggtacatcagggaactcacataggtgaaaaaacccatacttaccttgagtctgagaaaacctttggtagaagctcctgtcttatcaggccccaaaaaacctgttctgcagtgagagatttaattgtgggtgagaatctatgtacatatgtatgagaagactgttctcatagttagttgactcatatggtagagaggactttacatgaaatcagtatgaaaatagttttttagatacccagaagcttgttctgggagaagctagggcgggtcagagtagacctgatgggtaactcaggtaaagatgcttttcttttatctgaactacttaatgattgctttacttttactttttaaaaaattcagaaatccaataaaggaaaggacggtaacct

SEQ ID NO: 2387 - protein, 402 aa, Homo sapiens [sequence omitted]

SEQ ID NO: 2388 - DNA, 6269 bp, Homo sapiens
cagctctggcagaagcaacggtggcttcgagggatggcggcggctgcaacaggacctgcagcatcccagaggaactgactaagactttggaacagaaaccagatgatgcacaatattatcgtcaaagagcttattgtcacattcttcttgggaattactgtggtgcagatgctaatttcagtgactggattaaaaggtgtcgaagctcagaatggctcggaatctgaggtgtttgtggggaagtatgagaccctcgtgttttactggccctcgctgctgtgccttgccttcctgctgggccgcttcctgcatatgtttgtcaaggctctgagggtgcacctcggctgggagctccaggtggaagaaaaatctgtcctggaagtgcaccagggagagcacgtcaagcagctcctgaggataccccgccctcaagagaaaaaaaagtcttggttccaaaccaggatatatgagtgggatccctgctttcaatttccaagcagaatgattggaaccattgtgttggcattcatctgcctgtatcttttcattgtcatcgagttctgcgtgtttgtgtacgtgagagatgagttggatgtgcttgaaaacaacctggaaagctacatcaccttcacgaaccattcaggggtcctgaccccagtcatcctgcaggtgaaagagctgatcagtgtcaccaaaggagtctgggtggcgaccattttgcccgcgtatctcacgtgtgtgagctatctgttccacattttggtctgttacagaaagcacatgaagaggctatgggcaggagataaacattttcttcctttgaagttccataacccggcctcgtcggagagcatggtggccattgcaaggtactctggctggcaaatagcctatattctgtggggctacctcatcattcacatggtacagagcctatgtggcatggcaatcatgtacagcctggtgctacccatcgtccaaaccagggcctggaaatgctgcaagggctgggcattgggatgaaagcgttccacaacttcaactactttctgttcttctacaacgtgctgctgggcctgggtgcctgcctttccaggctgctcatcagttgcctcctcggcatgtggctgattgcccgcatcgacaggaccatcatgcagagtggctatgagggagcagacatggggttcagtgcatggattgggatgctctacatggaccattatcacatcaaccctgtgcttgtcagcttttgccacatcctgatcacaaatcacagggagaagaagctgcagcagagcaccaaatactggtgcctaaatcaatcggcagagtcccttcggatttgcgccatgcgcggcggggagaaccggcctcctgctcgagttcagagctcatctgaggaattggaattgagacaccaaagcctagacgcgtttcctggacgacggcttcccggcaggggcatccagccagcggccaagatgtcgtcagtggggaaggtgacccaggttccgaatgggaaagcctaccagcagatcttccaggctgaggtgcagctggtccactccctggcggccaccaggaagcgggctgcagagcgttctgtgaccctgaagagtggcaggatacccatgatgaagaaggtggagactcctgaaggggaggtgatgtctccccgacagcagaagtggatgcacagcctccccaacgactggatcatggaaaaccctgttctccacagggaaaaggaaagagccaagagggaaaaagcccgagagagtgagaacaccatcgctgcccgagaagtgcggggtctcatggatactatagttcctgagaagataagcaccagcacctttcaaaggcaagcagaacacaagaggaagagctacgagagcgctctggccagctttcaggaggagattgcgcaggtgggaaaggaaatggaacctctcatcgtggacacagggggactttttttgaagaagctgactgagtctgatgaagaaatgaaccgtctcttcctaaaggtggaaaatgacaccaaccttgaggactacaccatccaagccctgctggagctgtgggataaggtggccgggcggttactgctccggaagcaggagattaaggagctggatgaggccctgcactcgctggagttctcccgaaccgataaactaaaaagcgtgttgaagaaatatgcagaagtcatagagaaaacttcctacctcatgcggcccgaagtgtacaggctgataaatgaagaagccatggtcatgaactatgccctgctgggcaaccggaaggctctcgcccagctgtttgtcaacctgatggagtccaccctgcagcaggagctggacagccgccaccgctggcaaggcttggtggacacctggaaggctctcaagaaggaggccctgctgcagagtttcagtgagttcatggccagtgagagtatccatactcccccggctgtgacgaaggagctagaggtcatgctgaagacccagaacgtcctgcagcaaaggcggctgaagcatctctgcaccatctgtgacctcctgccccccagttacagcaaaactcagctgactgagtggcattcttccctcaactccctgaacaaggagctagacacctaccacgtggactgcatgatgtggatccgcctgctgtatgagaagacatggcaggagtgcctgatgcatgtgcagaattgtaagaagcagctgctggactggaaagccttcactgaggaggaggcagagaccctggtgaaccagttcttcttccagatggtgggagcactccagggcaaagtggaggaggacctggagctcttggacaaatccttcgagactctggcagatcagacagagtggcagagttcacacctcttcaagtatttccaggaggtggtacaactgtgggaggcacaccagagcgagctgttggtgcaggagctggagctggagaagaggatggagcagcaccggcagaagcacagcctggagagccaggtgcaggaggcccacctcgataggctcttggaccaactgaggcagcaaagtgacaaagaaacactggcgtttcacctggaaaaggtcaaagattatctgaagaacatgaaatccaggtatgaatgttttcacaccctcctgacaaaggaagtgatggagtacccagcgatcatgctgaaagaactcaactcctacagctctgccctcagccaatacttctttgtgcgtgaaatctttgaacagaacttggctggagaagtcattttcaaattcaggcaaccagaagcacatgaaaaaccctcccagaagagagtgaaaaaactgaggaagaagcaagggtctaaagaggacatgaccagaagtgaggaaagcataagtagtgggacaagtactgccaggtcagtagaagaggtggaagaagaaaacgatcaagaaatggagtccttcataactgaagaggtgctggggcagcagaaaaaatctccactgcatgctaagatggatgagtccaaagaaggctctattcagggactggaagaaatgcaggttgaaagagagggctccttaaacccatccctgaatgaggagaatgtgaagggtcaaggagaaaagaaggaggagtcagaggaggaagatgagaaggaggaagaggaggaggaggagaagctggaggaagagaaggaggagaaggaggcacaggaagagcaagagagtttatctgtgggtgaggaagaagacaaggaagagggtctagaggagatatactatgaggacatggagtccttcacaatctccagtggaaacacttattttgtctttgtacccctggaagaagagcattgtaggaagtcccattccaccttctcagccatgttcatcaacgacacttccagtgccaagttcatagaacaagtgacaattccatcgagactaattttagaaattaagaaacaattgttttcagagggaggcaacttttctcctaaagaaatcaattcactgtgttcccgactggagaaggaagctgcccggatagagttggttgaaagtgtcatcatgctcaacatggagaagttggagaatgagtacctggaccaggccaatgatgtcatcaacaagtttgaaagcaaattccataacctgtctgtggaccttattttcatagagaaaatccagcggttgctgacgaatctgcaagtgaaaatcaagtgccaggtggcaaaatccaattcgcaaacaaatggattaaatttctctctgcaacagcttcagaacaagataaaaacttgtcaagagtccaggggagagaaaaccacagtgaccacagaagaactcctcagcttcgtccaaacttggaaggaaaaactgagccagaggattcagtaccttaactgcagcctggacagggtgtccatgactgaactggtctttaccaacaccatcctgaaggaccaggaggaagacagtgacatcctgacatcttcagaagcccttgaagaggaggccaagctggacgtggtcacccctgagtccttcacccagctgagccgcgtggggaagcccctgattgaggacccagctgtggatgtgatcaggaagctcctgcaacttcccaacacaaaatggccaacccaccattgtgacaaagatccgtcccagacaggcttcaagcgacatcggtgccagccagaaaactctgggaagaaggctgtacccagtgccagtgctacctctgcaggcagcctccagaccacccacccacctttgtcccacagcttcacaccgcaccccaagcccaacaaaatggagagaaagtaccgggtgcttggggacaagcctccccctgctgccgaggattttaaggggatcatcttgaccctcctctgggagagcagtgagaacctgctgacagtcgcagaggagttctaccgtaaagaaaaacgcccagtcaccaggcctgactgcatgtgtgacacctttgaccagtgcgccgagaacattagcaaaaagatcctggagtatcagagccaggcaaataagtaccacaactcctgcctcatagaattacggatccagatcaggagatttgaggagctgctgccccaagtgtgttggctggtgatggagaatttcaaggaacaccactggaaaaagtttttcacctctgtgaaggagatccgaggacagttcgaggaacagcagaagcggctggagaaaagaaaggacaaaaatgcccagaagctccatctaaatcttggacaccccgtacatttccaagaaatggagtctctacacttaagtgaagaggaaaggcaggaagagctggacagcatgattaggatgaacaaggagaagctggaggaatgtaccagaaggaatggccaggttttcataaccaacttggccaccttcaccgagaagttcctactgcagttggatgaggtggtcaccattgacgatgtccaggttgcaaggatggagccccccaaacagaaattatcaatgctcatacgaaggaaactcgctgggctctccctgaaggaagagagtgagaaacccctgattgaacgtggaagcaggaagtggccagggatcaaacccaccgaagtcaccatccaaaacaagattcttctccagccaacatcatcgatttccaccaccaaaaccaccctgggccacctggcggccgtggaagcccgagatgctgtgtacctgaaatatttagcatcatttgaggaggagctaaagaggatccaggatgactgtacatctcagataaaggaggctcagcgctggaaggacagctggaagcagtccctgcacactatccaaggcctgtatgtgtgaccctccgccccaccatgaataaacactttcttatacagactccttccctgtccatctacctgcctacctactttccgtccatccctccctcccttcatccctccacccctgctctgtgccgggcactgtagctttaccagcgaacaggacacagcatggtccctgcccacgtggagccctcttcccatgaggaaggcaagcatgaaaggggaattccacttggttagcagggagggtgagtaccaggaatcagtcacttcaaataggcaccagagcttcaaaggacatcacctccaaacagcatgctgggcagggcacgtcatcttgaaaaatgaaataaaggtcatgggaaaatgatattttaatttaacagaataaacaagtatgggttat

SEQ ID NO: 2389 - protein, 1646 aa, Homo sapiens
MWHGNHVQPGATHRPNQGLEMLQGLGIGMKAFHNFNYFLFFYNVLLGLGACLSRLLISCLLGMWLIARIDRTIMQSGYEGADMGFSAWIGMLYMDHYHINPVLVSFCHILITNHREKKLQQSTKYWCLNQSAESLRICAMRGGENRPPARVQSSSEELELRHQSLDAFPGRRLPGRGIQPAAKMSSVGKVTQVPNGKAYQQIFQAEVQLVHSLAATRKRAAERSVTLKSGRIPMMKKVETPEGEVMSPRQQKWMHSLPNDWIMENPVLHREKERAKREKARESENTIAAREVRGLMDTIVPEKISTSTFQRQAEHKRKSYESALASFQEEIAQVGKEMEPLIVDTGGLFLKKLTESDEEMNRLFLKVENDTNLEDYTIQALLELWDKVAGRLLLRKQEIKELDEALHSLEFSRTDKLKSVLKKYAEVIEKTSYLMRPEVYRLINEEAMVMNYALLGNRKALAQLFVNLMESTLQQELDSRHRWQGLVDTWKALKKEALLQSFSEFMASESIHTPPAVTKELEVMLKTQNVLQQRRLKHLCTICDLLPPSYSKTQLTEWHSSLNSLNKELDTYHVDCMMWIRLLYEKTWQECLMHVQNCKKQLLDWKAFTEEEAETLVNQFFFQMVGALQGKVEEDLELLDKSFETLADQTEWQSSHLFKYFQEVVQLWEAHQSELLVQELELEKRMEQHRQKHSLESQVQEAHLDRLLDQLRQQSDKETLAFHLEKVKDYLKNMKSRYECFHTLLTKEVMEYPAIMLKELNSYSSALSQYFFVREIFEQNLAGEVIFKFRQPEAHEKPSQKRVKKLRKKQGSKEDMTRSEESISSGTSTARSVEEVEEENDQEMESFITEEVLGQQKKSPLHAKMDESKEGSIQGLEEMQVEREGSLNPSLNEENVKGQGEKKEESEEEDEKEEEEEEEKLEEEKEEKEAQEEQESLSVGEEEDKEEGLEEIYYEDMESFTISSGNTYFVFVPLEEEHCRKSHSTFSAMFINDTSSAKFIEQVTIPSRLILEIKKQLFSEGGNFSPKEINSLCSRLEKEAARIELVESVIMLNMEKLENEYLDQANDVINKFESKFHNLSVDLIFIEKIQRLLTNLQVKIKCQVAKSNSQTNGLNFSLQQLQNKIKTCQESRGEKTTVTTEELLSFVQTWKEKLSQRIQYLNCSLDRVSMTELVFTNTILKDQEEDSDILTSSEALEEEAKLDVVTPESFTQLSRVGKPLIEDPAVDVIRKLLQLPNTKWPTHHCDKDPSQTGFKRHRCQPENSGKKAVPSASATSAGSLQTTHPPLSHSFTPHPKPNKMERKYRVLGDKPPPAAEDFKGIILTLLWESSENLLTVAEEFYRKEKRPVTRPDCMCDTFDQCAENISKKILEYQSQANKYHNSCLIELRIQIRRFEELLPQVCWLVMENFKEHHWKKFFTSVKEIRGQFEEQQKRLEKRKDKNAQKLHLNLGHPVHFQEMESLHLSEEERQEELDSMIRMNKEKLEECTRRNGQVFITNLATFTEKFLLQLDEVVTIDDVQVARMEPPKQKLSMLIRRKLAGLSLKEESEKPLIERGSRKWPGIKPTEVTIQNKILLQPTSSISTTKTTLGHLAAVEARDAVYLKYLASFEEELKRIQDDCTSQIKEAQRWKDSWKQSLHTIQGLYV

SEQ ID NO: 2390 - DNA, 3784 bp, Homo sapiens
agcgggaggccaggctgccctcgaagcggggcggggcgaagcggggcggggccgagcagggcggggcgggggcttgaggtgattcccaagccgcggggcggctccggtggtgcggggaaaccgaaagtgggcggcggccgcggcggggcccctggcggagacggcggcaggagctgggcccagagacgcggggacgggccgtgggcccccggaacgaggcaaagatgctggaaggagatctggtttcaaagatgctacgagctgttctgcagtctcataagaatggagtagcattaccccggctccaaggagagtacagatccttgactggagactggatccccttcaaacagctaggtttccctacactagaagcctatctgagaagtgtgccagcagtggtcaggatagagactagtagatctggagagattacctgctatgccatggcctgcacagaaactgcaagaattgctcagcttgtggctcgtcaaaggagttctaaaaggaaaaccgggcgtcaagttaattgtcagatgagagtgaagaaaaccatgccattttttctagaaggaaaaccaaaagcaaccctcagacaaccaggatttgcttcaaatttttctgttggcaaaaaacctaatccagcaccgttaagagacaaaggaaactctgttggagttaagcctgatgctgaaatgtctccttatatgctacacacaactcttggaaatgaagcattcaaagacattccagtgcaaaggcatgtgaccatgtccaccaacaacaggtttagcccaaaggcgtcccttcaaccacctttgcagatgcatctctcaagaacctctactaaggaaatgagtgataatttaaatcagactgttgaaaaacccaatgtcaagcctcctgcctcttacacttataaaatggatgaggttcaaaatcgcataaaggaaatactaaacaagcataacaatggcatttggatatctaagcttccacatttttacaaagagttatataaagaagaccttaatcaaggaattttacaacagtttgaacactggcctcatatttgcacggtggagaaaccttgcagtggtggccaagatttacttctttatccagctaagagaaagcagcttttgagaagtgaactggatactgagaaagtacctctatccccactacctggtcccaaacaaacaccaccgttgaaagggtgtccaacagttatggcaggagactttaaagaaaaagtggcagacctgctggtgaaatacacaagtggcctttgggccagtgcacttccgaaagcatttgaggaaatgtacaaagtgaaattccctgaggatgccttaaaaaatcttgcctcactttctgatgtatgcagcatagactacatttctggaaatccccagaaggccattctctatgctaaacttccattgcccactgacaaaatccaaaaggatgcagggcaagcacatggtgataatgatatcaaggctatggttgaacaagagtatttgcaggtagaagaaagcattgctgaaagtgctaatacctttatggaggacataacagttcctcttttaatgattccaactgaagcatcaccatctgtattggtggttgaactgagcaacacaaatgaagtggttatcaggtatgtgggcaaagactattctgctgctcaggaattaatggaagatgagatgaaggaatattacagtaagaatcctaagatcacaccagtccaggctgtgaatgttgggcagttgctggccgtaaatgccgaggaggacgcctggttacgggcacaggtcatctcaacagaagagaacaaaataaaggtatgctatgttgactatggttttagtgaaaatgttgaaaaaagcaaagcatacaaattaaacccgaagttttgttcactctcatttcaagctacaaaatgtaagcttgcaggcttggaagtcctaagcgatgaccctgatctagtgaaggtggttgaatctttaacttgtggaaagatctttgcagtggaaatacttgacaaagctgacattccacttgttgttctgtacgatacctcaggagaagatgatatcaatatcaatgccacctgcttgaaggctatatgtgacaagtcactagaggttcacctgcaggttgacgccatgtacacaaatgtcaaagtaactaatatttgctctgatgggacactctactgccaggtgccttgtaagggtctgaacaagctcagtgaccttctacgtaagatagaggactacttccattgcaagcacatgacctctgagtgctttgtttcattacccttctgtgggaaaatctgcctcttccattgcaaaggaaaatggttacgagtagagatcacaaatgttcacagcagccgggctcttgatgttcagttcctggactctggcactgtgacatctgtaaaagtgtcagagctcagggaaattccacctcggtttctacaagaaatgattgcaataccacctcaggccattaagtgctgtttagcagatcttccacaatctattggcatgtggacaccagatgcagtgctgtggttaagagattctgttttgaattgctcggactgtagcattaaggttacaaaagtggatgaaaccagagggatcgcacatgtttatttatttacccctaagaacttccctgaccctcatcgcagtattaatcgccagattacaaatgcagacttgtggaagcatcagaaggatgtgtttttgagtgccatatccagtggagctgactctcccaacagcaaaaatggcaacatgcccatgtcgggcaacactggagagaatttcagaaagaacctcacagatgtcatcaaaaagtccatggtggaccatacgagcgctttctccacagaggaactgccacctcctgtccacttatcaaagccaggggaacacatggatgtgtatgtgcctgtggcctgtcacccaggctacttcgtcatccagccttggcaggagatacataagttggaagttctgatggaagagatgattctatattacagcgtgtctgaagagcgccacatagcagtggagaaagaccaagtgtatgctgcaaaagtggaaaataagtggcacagggtgcttttaaaaggaatcctgaccaatggactggtatctgtgtatgagctggattatggcaaacacgaattagtcaacataagaaaagtacagcccctagtggacatgttccgaaagctgcccttccaagcagtcacagctcaacttgcaggagtgaagtgcaaccagtggtctgaggaggcttctatggtgtttcgaaatcatgtggagaagaaacctctggtggcactggtgcagacagtcattgaaaatgctaacccttgggaccggaaagtagtggtctacttagtggacacatcgttgccagacaccgatacctggattcatgattttatgtcagagtatctgatagagctttcaaaagttaattaatgactgcctctgaaaccttgacaactaattcagattttttagcaataacaaaatgtagtaggcttaaaaaaaatcttaactctgctacatggctctgactgctgtgggggattgaaaagaatatgcttatgtttgatgaaagatatttaacaagttttgttttaacagagttgacttttcaaagaaaattgtacttgaattattactataatattagaataaaaatgtttatcaatataaaaaaaaaaaaaaaaaaaaaaaaa

SEQ ID NO: 2391 - protein, 1098 aa, Homo sapiens
MLEGDLVSKMLRAVLQSHKNGVALPRLQGEYRSLTGDWIPFKQLGFPTLEAYLRSVPAVVRIETSRSGEITCYAMACTETARIAQLVARQRSSKRKTGRQVNCQMRVKKTMPFFLEGKPKATLRQPGFASNFSVGKKPNPAPLRDKGNSVGVKPDAEMSPYMLHTTLGNEAFKDIPVQRHVTMSTNNRFSPKASLQPPLQMHLSRTSTKEMSDNLNQTVEKPNVKPPASYTYKMDEVQNRIKEILNKHNNGIWISKLPHFYKELYKEDLNQGILQQFEHWPHICTVEKPCSGGQDLLLYPAKRKQLLRSELDTEKVPLSPLPGPKQTPPLKGCPTVMAGDFKEKVADLLVKYTSGLWASALPKAFEEMYKVKFPEDALKNLASLSDVCSIDYISGNPQKAILYAKLPLPTDKIQKDAGQAHGDNDIKAMVEQEYLQVEESIAESANTFMEDITVPLLMIPTEASPSVLVVELSNTNEVVIRYVGKDYSAAQELMEDEMKEYYSKNPKITPVQAVNVGQLLAVNAEEDAWLRAQVISTEENKIKVCYVDYGFSENVEKSKAYKLNPKFCSLSFQATKCKLAGLEVLSDDPDLVKVVESLTCGKIFAVEILDKADIPLVVLYDTSGEDDININATCLKAICDKSLEVHLQVDAMYTNVKVTNICSDGTLYCQVPCKGLNKLSDLLRKIEDYFHCKHMTSECFVSLPFCGKICLFHCKGKWLRVEITNVHSSRALDVQFLDSGTVTSVKVSELREIPPRFLQEMIAIPPQAIKCCLADLPQSIGMWTPDAVLWLRDSVLNCSDCSIKVTKVDETRGIAHVYLFTPKNFPDPHRSINRQITNADLWKHQKDVFLSAISSGADSPNSKNGNMPMSGNTGENFRKNLTDVIKKSMVDHTSAFSTEELPPPVHLSKPGEHMDVYVPVACHPGYFVIQPWQEIHKLEVLMEEMILYYSVSEERHIAVEKDQVYAAKVENKWHRVLLKGILTNGLVSVYELDYGKHELVNIRKVQPLVDMFRKLPFQAVTAQLAGVKCNQWSEEASMVFRNHVEKKPLVALVQTVIENANPWDRKVVVYLVDTSLPDTDTWIHDFMSEYLIELSKVN

SEQ ID NO: 2392 - DNA, 2665 bp, Homo sapiens
agaaattcaggagacacagacaagttcttccacgatgtcgtacagacgagaactagagaaataccgtgacctggatgaagatgaaatccttggagccctaacagaggaagagctgaggaccctggaaaatgagctggatgagctggaccctgataatgcactgctgcctgcaggcctgaggcagaaggatcagaccaccaaggcgcccacgggcccctttaaaagagaggagctcttggatcacttggaaaagcaagcaaaggagtttaaggaccgagaagatctggtcccctacacaggggaaaaacgaggaaaggtctgggttcctaagcagaagccactggatcctgtgctggaaagtgtgacgctggaaccggagctggaggaagccttggcaaatgcttcagatgcagaactctgtgacattgcagcgatcctgggcatgcacacgctcatgagtaaccagcagtactaccaggccctgagcagcagctccatcatgaacaaggaggggctcaacagcgtgattaaacccacacaatacaagcctgtgcccgacgaagaaccaaattcaacagacgtagaggaaacgctggaacggataaagaacaacgacccaaaacttgaagaagttaacctcaataatatccggaatatccccatccccaccctcaaggcatatgcagaagccctgaaagaaaactcatatgtgaagaagttcagcatcgtggggacacggagtaatgaccccgtggcgtatgcccttgctgagatgctcaaggagaacaaggtgttgaagacactgaatgtggaatccaacttcatttctggagctgggattctgcgcctggtagaagccctcccatacaacacttctctggtggaaatgaaaattgacaaccagagccagcccctgggcaacaaagtggaaatggagattgtgagcatgttggaaaaaaacgcaacacttctcaaattcggctaccactttacccagcaaggaccccggcttcgggcatccaacgcaatgatgaacaacaatgaccttgtgaggaagaggaggcttgcggacctgactgggcccatcattcccaagtgccggagtggtgtctagtgtgtggcggtggagtccatgcctttgaactggatgtgttctattgatgacctgtgctctgcaggggaaaccagaaggcaaaatgctggcagcatgaaacccttttgtggttcagttctttatgcactaaggttttaggttgactagtggttgtagttgaaaattttataaaataccgttaatgtgaagtttttctttagtcacagaagttgaatctggttattatttaaaaactagaagcccccaaaccagcagatcttactgaagatgatgttccagcagcagcgacttagccccaggagcccagtttcaatggccttgctgtgtggtgtttcaagtgcatttaaaatgtgtgacacagaaacggcacactcttccacatgcttttgaagtattataaaacactttattacaaatttgtcttagctattagcaaataaaactgattatcattctttattaaccctccttggaattttgaaaacctcgattaaagttgccaaattgattactggatccagaacacaattttcccctcagaacagatagacagactgaagccactgaactctgccaggagtcaacatgagattccttttgctggatatgcagaaatgataggaaaaaaaccaatggtgaaatttcaagtttcaaaaaccaacctttcattaccaatcccaggcaacaaacatgtccctgagtgttctttaagaacatttgggatttatgtacaatttaatactggagttagaactttttccttattgaatgccaaccttatgatggatgtgaaaatctacggccaaatacttttgaaaacacctttctatattgcacagtgggcaaatggcttatgtgaggtaagacactagagggataaatttccagatcaacatggctatggtatttagtaatggcccagcttagagacttcagctactgatctcatcacttattagacaaattgctgctgaccttacgcctgtatattaagcctccgcaggatgccggacaatggtgaagaaactccagatatcaaggaattgggaaatcctggccaaaccaccccaagatgattacactgaaatgtagtattagtactgctgccagatctctttttaacatcatgtgcgtctcttgggatccagcaaaagtgttaagccacaatgcccttgtgccttttaatataccacagtgccagttaaactaatatttttgtttgttgcttttgggagttattttcattagtgatttcagcaaatctcatgataaaggacaaggtcaagaactccagagcactgagcagagaggctggtgatgaaaaggtgaaggcctgcgcactgaactgtaaggcagtgggcagtacagggtaactggaggcggggccagggcctcagcgctatggaagagtgtccactgaggctgcacatggcccaggagtggcaccatgttgcagggacaaccatccccatttggcttctccttaaaacacaattgcagctgcattctgcatcgctgaaaactgcaatataatattaaatctgttggtcg

SEQ ID NO: 2393 - protein, 359 aa, Homo sapiens
MSYRRELEKYRDLDEDEILGALTEEELRTLENELDELDPDNALLPAGLRQKDQTTKAPTGPFKREELLDHLEKQAKEFKDREDLVPYTGEKRGKVWVPKQKPLDPVLESVTLEPELEEALANASDAELCDIAAILGMHTLMSNQQYYQALSSSSIMNKEGLNSVIKPTQYKPVPDEEPNSTDVEETLERIKNNDPKLEEVNLNNIRNIPIPTLKAYAEALKENSYVKKFSIVGTRSNDPVAYALAEMLKENKVLKTLNVESNFISGAGILRLVEALPYNTSLVEMKIDNQSQPLGNKVEMEIVSMLEKNATLLKFGYHFTQQGPRLRASNAMMNNNDLVRKRRLADLTGPIIPKCRSGV

SEQ ID NO: 2394 - DNA, 5786 bp, Homo sapiens
gccgcccctgagcagcctcgccttcgcctcccgcgtttcctgccgtccgccctcccccggccgagctccaggggctgccgcctagcagctcccggcgggagagcggttcagagcgcgcacgggggcgggcggaggcggcccggtgcggggcggccgcgctggagagaggcgcgcgcggagacgccggcccccctctccgcgtttgctcgcttgctccccgcctcccgcactccgctcgctcccaccccttcccggcgtgattgatccgtcacgggcgccgccgctgccgccgccgccgcggccgttctgagccgagccggaaccctagcccgagacggagccggggcccgggccggcgccattgcgcgggcgccgcgggaagaccttggcgcggggcggcgggccgggccaggccatgcgggccgagtgagccggcgcccgcagcccgcggcgcggcatggcttccccgcggagctccgggcagcccgggccgccgccgccgccgccaccgccgcccgcgcgcctgctactgctactgctgctgccgctgctgctgcctctggcgcccggggcctggggctgggcgcggggcgccccccggccgccgcccagcagcccgccgctctccatcatgggcctcatgccgctcaccaaggaggtggccaagggcagcatcgggcgcggtgtgctccccgccgtggaactggccatcgagcagatccgcaacgagtcactcctgcgcccctacttcctcgacctgcggctctatgacacggagtgcgacaacgcaaaagggttgaaagccttctacgatgcaataaaatacgggccgaaccacttgatggtgtttggaggcgtctgtccatccgtcacatccatcattgcagagtccctccaaggctggaatctggtgcagctttcttttgctgcaaccacgcctgttctagccgataagaaaaaatacccttatttctttcggaccgtcccatcagacaatgcggtgaatccagccattctgaagttgctcaagcactaccagtggaagcgcgtgggcacgctgacgcaagacgttcagaggttctctgaggtgcggaatgacctgactggagttctgtatggcgaggacattgagatttcagacaccgagagcttctccaacgatccctgtaccagtgtcaaaaagctgaaggggaatgatgtgcggatcatccttggccagtttgaccagaatatggcagcaaaagtgttctgttgtgcatacgaggagaacatgtatggtagtaaatatcagtggatcattccgggctggtacgagccttcttggtgggagcaggtgcacacggaagccaactcatcccgctgcctccggaagaatctgcttgctgccatggagggctacattggcgtggatttcgagcccctgagctccaagcagatcaagaccatctcaggaaagactccacagcagtatgagagagagtacaacaacaagcggtcaggcgtggggcccagcaagttccacgggtacgcctacgatggcatctgggtcatcgccaagacactgcagagggccatggagacactgcatgccagcagccggcaccagcggatccaggacttcaactacacggaccacacgctgggcaggatcatcctcaatgccatgaacgagaccaacttcttcggggtcacgggtcaagttgtattccggaatggggagagaatggggaccattaaatttactcaatttcaagacagcagggaggtgaaggtgggagagtacaacgctgtggccgacacactggagatcatcaatgacaccatcaggttccaaggatccgaaccaccaaaagacaagaccatcatcctggagcagctgcggaagatctccctacctctctacagcatcctctctgccctcaccatcctcgggatgatcatggccagtgcttttctcttcttcaacatcaagaaccggaatcagaagctcataaagatgtcgagtccatacatgaacaaccttatcatccttggagggatgctctcctatgcttccatatttctctttggccttgatggatcctttgtctctgaaaagacctttgaaacactttgcaccgtcaggacctggattctcaccgtgggctacacgaccgcttttggggccatgtttgcaaagacctggagagtccacgccatcttcaaaaatgtgaaaatgaagaagaagatcatcaaggaccagaaactgcttgtgatcgtggggggcatgctgctgatcgacctgtgtatcctgatctgctggcaggctgtggaccccctgcgaaggacagtggagaagtacagcatggagccggacccagcaggacgggatatctccatccgccctctcctggagcactgtgagaacacccatatgaccatctggcttggcatcgtctatgcctacaagggacttctcatgttgttcggttgtttcttagcttgggagacccgcaacgtcagcatccccgcactcaacgacagcaagtacatcgggatgagtgtctacaacgtggggatcatgtgcatcatcggggccgctgtctccttcctgacccgggaccagcccaatgtgcagttctgcatcgtggctctggtcatcatcttctgcagcaccatcaccctctgcctggtattcgtgccgaagctcatcaccctgagaacaaacccagatgcagcaacgcagaacaggcgattccagttcactcagaatcagaagaaagaagattctaaaacgtccacctcggtcaccagtgtgaaccaagccagcacatcccgcctggagggcctacagtcagaaaaccatcgcctgcgaatgaagatcacagagctggataaagacttggaagaggtcaccatgcagctgcaggacacaccagaaaagaccacctacattaaacagaaccactaccaagagctcaatgacatcctcaacctgggaaacttcactgagagcacagatggaggaaaggccattttaaaaaatcacctcgatcaaaatccccagctacagtggaacacaacagagccctctcgaacatgcaaagatcctatagaagatataaactctccagaacacatccagcgtcggctgtccctccagctccccatcctccaccacgcctacctcccatccatcggaggcgtggacgccagctgtgtcagcccctgcgtcagccccaccgccagcccccgccacagacatgtgccaccctccttccgagtcatggtctcgggcctgtaagggtgggaggcctgggcccggggcctcccccgtgacagaaccacactgggcagaggggtctgctgcagaaacactgtcggctctggctgcggagaagctgggcaccatggctggcctctcaggaccactcggatggcactcaggtggacaggacggggcagggggagacttggcacctgacctcgagccttatttgtgaagtccttatttcttcacaaagaagaggaacggaaatgggacgtcttccttaacatctgcaaacaaggaggcgctgggatatcaaacttgcaaaaaaaaaaaaaaaacaaaacaaaaaaaaaaactagacaaggagagaggcactagaactccagctggaagtcacggagtggctcgagcagccttgggaagaggcaaggagcttctgaagaaactgcctctgcacacacatcactggctgtgacccctcaggctagcccttctccactctgggggaggaggtgggaagggccaccaggcccccagctgccaggccagctgaccccagccttcctggaacagggagtctgcaggagcgcagacaggcacagccctggagcaggcaggccgagggctgcggcactggagcaggctgacttacatgctccacatgggacctgtgtcacccaatgagatgtttgttactctggtaaatgccacacgttaacacaataacacccattcctgggaccgtggggatttagggcacgtcactgcagacacgctctgcagcattcaccgacagtctgtcatgcacccaccacgttggccacgtccttgtgttcctatcggatgctcccagtaaccagggggaccacccgagctaatcatggaatgtctgttcccagcaaacacgataaagaaagattgtgcactttaacctctctcatcagggcccaagggctggctgggattttttttttttttttttcccactaactttgtttctgaccaaagtgaattggaggcattctgctaaaagacatccccgtagacataggggagagagttgctggctgagggcttcccttggcttccagaaggcagccttccatccagacaagccagtgagctctccccttgggatcactggggtgatcagtcagcagattgattctcattcataagatcattcctccctttaaattgagcccctaagagcactggcctgggagtcagacagacctgggttcaagtcctcagtcccctgcccactccctacgtgactttgatcaggtcactagtgtctctctgagcctcagtttcccctctgtaacttggggttgaactaaaacacctgtcctgcctacctcacaaggtcactctgaggattgaaacttgatcttgtccaggaaagctttgtaccaaacagtgaagccgccctgatccgtgaggtatgagtatgactctgaccttcagccctccctacagccgggggtgtggcccagagaagcttccagcacagccctctacccagaacatccgggctggagggaggctcccagtgacttttctgacattcctagacaggttcattctttgctcaagaaaggcctgaatgacaatgtccaggatgtctgcacaactgagcagctcgctcactccctaaagaaacctattggcagcttcaacaggcaggcaataatctcttcccagaaccactgcagtcaggaataaactgttttctccaccaggctttgacaaaagggcccacaggaatcttaccaatgccaacatttcaaagcaccctatttcacgtagcatagctttctgctccccttccccaaagagaggttatggaggtactgtagcttttagggaaaaaaaaaatgttaacacatcacaggtcaagttgaagtcattctctgtttaggcactaaaaatcggtgttgtcactcactgtgtattaccagtatttacttgctttcttgatttcaccaaaaccaaatttaatttaaaggaccacattaatttttcaaagggaaagagacaattaattgtacataatgtatacacacacaaaaaaaaaaatacctgtagaaatattattccagcatagcaggaaaacaaacaaaagtattggactgtcggaggtgagcctgtgcgtctgtaaccctttgtgactcctgagcgtgcgctgtcttctaggttaactcacgaagtacattctctgtcttactgatactgtaggttcacccatttttttttaatttcctcgcaaataacaagacccacagaagtgactctagctacttaatggttctgttcttttatatgcagcaaacacaccgtccatttctgaagaggcttcggcctgaaggcattttccaatgatgttagtgcacaaaacgctttaaattagactggaactgccagaatcaaatgtaaatgaggaatttctcgtacccctactgcatggtatcgatttttaataaattgttgcaaatttgtttttatgaataaaaggaaaaaacctgtcgtcttt

SEQ ID NO: 2395 - protein, 941 aa, Homo sapiens
MASPRSSGQPGPPPPPPPPPARLLLLLLLPLLLPLAPGAWGWARGAPRPPPSSPPLSIMGLMPLTKEVAKGSIGRGVLPAVELAIEQIRNESLLRPYFLDLRLYDTECDNAKGLKAFYDAIKYGPNHLMVFGGVCPSVTSIIAESLQGWNLVQLSFAATTPVLADKKKYPYFFRTVPSDNAVNPAILKLLKHYQWKRVGTLTQDVQRFSEVRNDLTGVLYGEDIEISDTESFSNDPCTSVKKLKGNDVRIILGQFDQNMAAKVFCCAYEENMYGSKYQWIIPGWYEPSWWEQVHTEANSSRCLRKNLLAAMEGYIGVDFEPLSSKQIKTISGKTPQQYEREYNNKRSGVGPSKFHGYAYDGIWVIAKTLQRAMETLHASSRHQRIQDFNYTDHTLGRIILNAMNETNFFGVTGQVVFRNGERMGTIKFTQFQDSREVKVGEYNAVADTLEIINDTIRFQGSEPPKDKTIILEQLRKISLPLYSILSALTILGMIMASAFLFFNIKNRNQKLIKMSSPYMNNLIILGGMLSYASIFLFGLDGSFVSEKTFETLCTVRTWILTVGYTTAFGAMFAKTWRVHAIFKNVKMKKKIIKDQKLLVIVGGMLLIDLCILICWQAVDPLRRTVEKYSMEPDPAGRDISIRPLLEHCENTHMTIWLGIVYAYKGLLMLFGCFLAWETRNVSIPALNDSKYIGMSVYNVGIMCIIGAAVSFLTRDQPNVQFCIVALVIIFCSTITLCLVFVPKLITLRTNPDAATQNRRFQFTQNQKKEDSKTSTSVTSVNQASTSRLEGLQSENHRLRMKITELDKDLEEVTMQLQDTPEKTTYIKQNHYQELNDILNLGNFTESTDGGKAILKNHLDQNPQLQWNTTEPSRTCKDPIEDINSPEHIQRRLSLQLPILHHAYLPSIGGVDASCVSPCVSPTASPRHRHVPPSFRVMVSGL

SEQ ID NO: 2396 - DNA, 7147 bp, Homo sapiens
gggccgcgcgtggcggcggcgatgggcgagggcgggctgcccccggccttccagctgctgctgcgcgcgtgtgaccagggcgacacggagacggcgcggcggctgctggagccgggggcggcggagccagccgagcgcggcgcggagccggaggcgggcgcggagccggcgggggccgaggtggccgggcccggggccgcagcggcgggggcagtcggggctccggtgcccgtggattgctcggacgaggcgggcaacaccgcactgcagttcgccgcggccgggggccacgaaccgctggtgcgcttcctgctgcgccgcggtgcctcggtcaacagccgcaaccactacggctggagcgcgctcatgcaggcggccagatttgggcatgtgagtgtggcacacctcctgttggatcacggggctgatgtcaatgcccagaaccggctgggggccagtgtgctcactgtggcttctcggggcggccacctgggtgtggtgaagctgctcctggaagccggtgcctttgtggaccatcaccacccttcaggcgagcaactggggttgggcggcagcagggatgagcccttggacatcacagccctgatggctgccatccagcacgggcacgaggccgtggtgcgtctactgatggagtggggcgcggaccccaaccacgcagcccggaccgtgggctggagcccgctgatgctggccgcactcactgggcggcttggagtggcccagcagctggtggagaagggcgccaaccctgaccacctcagcgtgctggagaagaccgccttcgaggttgcactggactgcaagcacagggaccttgtagactacctggacccgctgaccaccgtcaggcccaaaacagatgaggagaaaaggcgacctgatattttccatgcattgaaaatgggaaacttccagctggtcaaagagattgccgatgaagaccccagccacgtgaacttggtcaatggggacggggcgacgccactgatgctagcagctgttacggggcagctggctctggtgcagctgctggtggagaggcacgcggatgttgacaagcaggacagcgtgcatggctggacggccctcatgcaggcaacctaccatgggaataaggaaattgtgaaatatctgctaaaccaaggggccgatgtcactcttcgtgcaaaaaatggatacacggcctttgacctggtgatgctgctgaatgatcccgacacggaacttgttcgactgctggcatctgtctgcatgcaggtgaataaagacaaaggccggccgagccaccagcctcccctgccccactcgaaggtccgacagccctggagcatcccagtgctgcccgatgacaagggtggactgaagtcctggtggaaccgaatgtccaatcggttccgaaagctcaaactgatgcagacgctgccccgtgggctgtccagcaaccagcctttgcctttctctgacgagcctgagccagctctggactccacaatgagggctgccccccaggacaagacaagccgctctgcactccctgatgcggcccctgtgaccaaagacaatggtcctgggagcacaagaggagaaaaggaagacacgttattgacaaccatgcttcgaaacggagctcccctcaccagactcccgagtgacaagctgaaagcagtcatccccccattcctacccccttccagttttgagctgtggagctctgatcggtcccggacgcgtcacaacgggaaggcagaccccatgaagactgcgctgccccagagagccagcaggggccaccccgtgggcggcgggggcacagacactacacccgtcaggcctgttaaatttccaagcctccccagaagcccagcctcttctgccaattctggaaacttcaaccactcgcctcattcatcgggcggctccagtggggtaggtgtgagccggcacggtggggagctgcttaaccgctcaggtggcagcatagacaatgtcttgtcccaaatcgctgcccagaggaaaaaagcagccggattattggagcagaaacccagccatcggtcaagccctgtggggccagcaccggggtccagcccgtctgagcttccagcctcccctgcaggtggcagcgctcctgttggcaagaaattggagaccagcaaaaggcctccatctggaacttccactacctccaagagcacctctccaaccctcacgccctccccctcacccaaagggcacactgcagagtcctcagtgtcttcctcgtcatcccatcggcagtccaagagcagtgggggctccagcagtggcaccatcacagatgaggatgaactgactggaatccttaagaaattatcacttgagaaatatcagcccatttttgaggaacaagaggtggacatggaagcgttcctcacactgactgacggtgacttgaaggagctgggaattaagacagatgggtccaggcagcagattctggcagcgatttctgaactgaacgcaggcaagggacgcgagagacaaattttacaggaaaccattcacaactttcactcttcctttgagagcagtgccagcaacaccagggcccctggcaacagcccctgtgcgtgatcctccttcccgcagccaccagcgtgagctctctgaatcccgggaccccttcacgtggccacagccccagccctgcccccgtcacactgctgtgccttagtcatgttgttccctttgctcgggatgcccacttcacgtcgacggcattcattggtagtacttcttgctgcaacaaacttcaacacacagagacagattcccatgtaacagtccagtgggggtgcttctgcttggcaggttggttcacacagtgatgcagggactcagctcctttcatcctgtgctctgccctccccgggagcctcagagtttgcttctggctggcggcaagggaaagggacgatggagaaggcacggctgcttcttacctgccttgctcttaactgacacacatcactcctgctcacgtcctcttggccactggtagtcatgtggccccacctggatgcagaggaggccaggatgtgcagtctccacatagtggcttcccagcaacaacttttgacttagatggggggtatgtattatggtgagaggttagccttcctggcacatcttcccttaaaacttctaacttgcccctcctagtccaagtcacctctcagatgaagtcttttttgaccccctttcagccactgggtcccttagtgctgtgtatgtgactgctgtagcattccactgcacctgctgcatacagcttacattggagatgtgtatgtcaaacgcatttttctttattgcaaagagagtctattatagaaggaaagaagtggaggcctgctgtgtggatcccttcttcttcctagctttcagtttccttatctgcaaagtggaaggtcagaccagatgatgctctggtactccacagtgctcacctgtatcactgcagggctttctgcactgaaagtggaagcagaaggctaatgggtcacattgtgtaaaggtctctggtgctcaaagtttctaggcaaagaagtgaaaatttggaattttgtctacatcctattaatgctgtgttcctcaaaagggaattggcttgtgtagtttcctaccatatcatattttattaaattagaggggccctgacttttaaaacccactggctttctgaagtgttttccagtgaatgactcattcagccagtgcttgttgcatttatgttagctaccaggtgccaagtgtgcagacacaatacagagccttcaggctctcgacaggcaagagaacacctgtaaatagatggtcccgacattgagaggcagcatggtagagtgggcagaccttgtgctctggactcaggttcaaagttcagatgaagctcaatggcctcttagttggagcttagaaccagtatgcccaaagtgctgggtctgcaggaagtacccagtcgatggtaggctgcacagaattctgatctctaccttgagccatgctgagccacaagttggtctccttgggaggtgccatctctcatctgtccctcccccagccatgaaagcccattcccctatgctggctttcagaggctgtcgttaacttactgcccagagcctcgtagttttcttcccctgccctgatggttgggtgtttttcctttaaattctctcagccttacactcacagaagccaactttccacaggactgaagacaaagtgtttcatttagctgttactgatagacacctttacaaaggttactaatgtcccagcctttttaaggagacacactcattcatcccctactatgtgctggcagctttacctttgtcatttcatcctcatggccaccctggaggtggcattgtgtaacctcatcttgcacattcgggaaacggatgcttaggagagggaagcagcttgccagttaaacagcccagaaggagcagatctggggtcagaaccggacctggtgggcttgcaagcctgtgccttttccactaactcctatagactcctggagctagaagcacttgtgattcttgttttaatttactgatggcttcaggggttaacagtaggcctagaattgtttgcctctgaaattcatggcccctgacgttatgtgctttgaggttttgtgcctgctttttgctgtggtcctgtttttttcataacaatatactggtatagcttccactcaggtaagtttgattgaacaatgatacacagctgcaccggggggtcaccttttcacaaatgtagacctccatgaactcattggatgaccctggacagagcggggctattcccattttgcagacaggacagcagaggctccagacaatgcctttcctttctttttcactggactcaagtgtccaaggcttttcatcctaggaagtttgtgtgctggttcacaagaggtccctggcaccctttctggggatgtttggatgcggctggtaggcagggaagagaaagggcaccccagcgggggcatgtgtggaggcagcacggaacatgtaggttatagatcgtcagggaggaggggtcagttgggtgcttgtttttctgatttttggtccttgatcacccccttcccttcccacacgtgtccccagcctgcctgtggctgttccccccacaagaagcacctcccttgcttggcaaccttcaccagcatttcccaaaagtatgctcctgggaaccctagttccacaggataataggtttttcataaagaaacgtagggtgtgtatgtgaaagtggggtgaggttccctggttgagtaggtttggcagacactaaagcgagctacacgatcatctttgctacaggcctctcacaaccttcagcatgccagcatgggtcaggcctcttcacagggccaagaaactcatagcatctcccacattactctcatcacttctccaaggtgcttttgcaagactggaattccttggacaccattggagaagccccgctttttctggaacagcggcaaccaagaggccttgcagccctggaagtgggtcagggcccttggtggtcacctttttctccccagcagctctgcagaggtggcctgcttggcagtgggacatcaggggaccggtcctgctttgagatggcagggtccctgttctgagagctctccagcctgagggcattgagctgaggctccaccctgagctctcctgcagggtggagggcattgtttcccagcacccaggcagtgtcttgctggtgtgtcgtgagtgctggatgtccaagtccctgctggccacggagggctcctgcctctcttcttcagcgccacaaaattacatggaggccagctggttttgtgaggagattgtttattttttaattcttttgtttaccgaacgtttactgagcatctaccctgtgccagccctactcgtacgctctgtctccaaagatgaaaaaggacttctctgccctcaagggaaccccacagtatcttagaggagacaatcatgtcggtgagatggtgtggtgatgaagcctgctgggtatacagctcagggaaagtcatcgatgatggctcaggctcagcctgggcacgccccagaggagagagatggagtggggcctcaaagggcaggtttaggcagaaaagaaaaagggcattccagctggggcatgtgcaaaggcagcacgtaatgtgtaagttctagatcgtcagggaggaagggtcagttgggtgcctgtttttctgtttttagtcctttaaaatgagtagaagcaacctgttaccctggaaagagcactggacatagacctagtgctgcgtgatgttgagcacgtttcttcttccctttgagtcccagtttcccttttggttacagggggatagtagcccccagggatcatgtgaaagtgagaaagcccttttcacactgtggagcggtgcagatgtgggaaacctcaaagatggttgcccattttaaatcctttcatctctcatctctctttcttctctcccttctgccctgacgtagccatggttgggtgggtgaggccagaagaaactgcctccggcaagaggtagcagccgctcaggtggctctgctggcatcggagcccacagaagtgaggagtggccgatggacctgccctccaaatgtgcctgactctgggtcttgctgtcactggatttcctggcatggcagacagaaagaaagatagtttgaccaagtcgtagaagctgatccagcgggtaaaaagggggcagggaactcgtcccttttattcttgcctcagagctgcctgaagacatgggccaggccggaggctggacaactttggataacgctgacctgtacttccaagtaaatgcctcctgaagagcccgggacccttcctgggagaattctgcagccagaatgaaggtgccatcagcaggaggcactgtgaagcaccatcctgtcgctgtccttgtccattcctagcaagttaatcgtgtcttgttaaccagcagttcctgttcaacgtgtaaagagacctgatgttttccctaataaagctgataacagattttgcagga

SEQ ID NO: 2397 - protein, 871 aa, Homo sapiens
MGEGGLPPAFQLLLRACDQGDTETARRLLEPGAAEPAERGAEPEAGAEPAGAEVAGPGAAAAGAVGAPVPVDCSDEAGNTALQFAAAGGHEPLVRFLLRRGASVNSRNHYGWSALMQAARFGHVSVAHLLLDHGADVNAQNRLGASVLTVASRGGHLGVVKLLLEAGAFVDHHHPSGEQLGLGGSRDEPLDITALMAAIQHGHEAVVRLLMEWGADPNHAARTVGWSPLMLAALTGRLGVAQQLVEKGANPDHLSVLEKTAFEVALDCKHRDLVDYLDPLTTVRPKTDEEKRRPDIFHALKMGNFQLVKEIADEDPSHVNLVNGDGATPLMLAAVTGQLALVQLLVERHADVDKQDSVHGWTALMQATYHGNKEIVKYLLNQGADVTLRAKNGYTAFDLVMLLNDPDTELVRLLASVCMQVNKDKGRPSHQPPLPHSKVRQPWSIPVLPDDKGGLKSWWNRMSNRFRKLKLMQTLPRGLSSNQPLPFSDEPEPALDSTMRAAPQDKTSRSALPDAAPVTKDNGPGSTRGEKEDTLLTTMLRNGAPLTRLPSDKLKAVIPPFLPPSSFELWSSDRSRTRHNGKADPMKTALPQRASRGHPVGGGGTDTTPVRPVKFPSLPRSPASSANSGNFNHSPHSSGGSSGVGVSRHGGELLNRSGGSIDNVLSQIAAQRKKAAGLLEQKPSHRSSPVGPAPGSSPSELPASPAGGSAPVGKKLETSKRPPSGTSTTSKSTSPTLTPSPSPKGHTAESSVSSSSSHRQSKSSGGSSSGTITDEDELTGILKKLSLEKYQPIFEEQEVDMEAFLTLTDGDLKELGIKTDGSRQQILAAISELNAGKGRERQILQETIHNFHSSFESSASNTRAPGNSPCA

SEQ ID NO: 2398 - DNA, 1746 bp, Homo sapiens
atgtgggggcgcacggcgcggcggcgctgcccgcgggaactgcggcgcggccgggaggcgctgttggtgctcctggcgctactggcgttggccgggctgggctcggtgctgcgggcgcagcgtggggccggggccggggctgccgagccgggacccccgcgcaccccgcgccccgggcggcgcgagccggtcatgccgcggccgccggtgccggcgaacgcgctgggcgcgcggggcgaggcggtgcggctgcagctgcagggcgaggagctgcggctgcaggaggagagcgtgcggctgcaccagattaacatctacctcagcgaccgcatctcactgcaccgccgcctgcccgtgcgctggaacccgctgtgcaaagagaagaaatatgattatgataatttgcccaggacatctgttatcatagcattttataatgaagcctggtcaactctccttcggacagtttacagtgtccttgagacatccccggatatcctgctagaagaagtgatccttgtagatgactacagtgatagagagcacctgaaggagcgcttggccaatgagctttcgggactgcccaaggtgcgcctgatccgcgccaacaagagagagggcctggtgcgagcccggctgctgggggcgtctgcggcgaggggcgatgttctgaccttcctggactgtcactgtgagtgccacgaagggtggctggagccgctgctgcagaggatccatgaagaggagtcggcagtggtgtgcccggtgattgatgtgatcgactggaacaccttcgaatacctggggaactccggggagccccagatcggcggtttcgactggaggctggtgttcacgtggcacacagttcctgagagggagaggatacggatgcaatcccccgtcgatgtcatcaggtctccaacaatggctggtgggctgtttgctgtgagtaagaaatattttgaatatctggggtcttatgatacaggaatggaagtttggggaggagaaaacctcgaattttcctttaggatctggcagtgtggtggggttctggaaacacacccatgttcccatgttggccatgttttccccaagcaagctccctactcccgcaacaaggctctggccaacagtgttcgtgcagctgaagtatggatggatgaatttaaagagctctactaccatcgcaacccccgtgcccgcttggaaccttttggggatgtgacagagaggaagcagctccgggacaagctccagtgtaaagacttcaagtggttcttggagactgtgtatccagaactgcatgtgcctgaggacaggcctggcttcttcgggatgctccagaacaaaggactaacagactactgctttgactataaccctcccgatgaaaaccagattgtgggacaccaggtcattctgtacctctgtcatgggatgggccagaatcagtttttcgagtacacgtcccagaaagaaatacgctataacacccaccagcctgagggctgcattgctgtggaagcaggaatggatacccttatcatgcatctctgcgaagaaactgccccagagaatcagaagttcatcttgcaggaggatggatctttatttcacgaacagtccaagaaatgtgtccaggctgcgaggaaggagtcgagtgacagtttcgttccactcttacgagactgcaccaactcggatcatcagaaatggttcttcaaagagcgcatgttatga

SEQ ID NO: 2399 - protein, 581 aa, Homo sapiens
MWGRTARRRCPRELRRGREALLVLLALLALAGLGSVLRAQRGAGAGAAEPGPPRTPRPGRREPVMPRPPVPANALGARGEAVRLQLQGEELRLQEESVRLHQINIYLSDRISLHRRLPVRWNPLCKEKKYDYDNLPRTSVIIAFYNEAWSTLLRTVYSVLETSPDILLEEVILVDDYSDREHLKERLANELSGLPKVRLIRANKREGLVRARLLGASAARGDVLTFLDCHCECHEGWLEPLLQRIHEEESAVVCPVIDVIDWNTFEYLGNSGEPQIGGFDWRLVFTWHTVPERERIRMQSPVDVIRSPTMAGGLFAVSKKYFEYLGSYDTGMEVWGGENLEFSFRIWQCGGVLETHPCSHVGHVFPKQAPYSRNKALANSVRAAEVWMDEFKELYYHRNPRARLEPFGDVTERKQLRDKLQCKDFKWFLETVYPELHVPEDRPGFFGMLQNKGLTDYCFDYNPPDENQIVGHQVILYLCHGMGQNQFFEYTSQKEIRYNTHQPEGCIAVEAGMDTLIMHLCEETAPENQKFILQEDGSLFHEQSKKCVQAARKESSDSFVPLLRDCTNSDHQKWFFKERML

SEQ ID NO: 2400 - DNA, 2328 bp, Homo sapiens
aattctctaggttgcaaattgggaggattaggaacaagtaagagagttccatgcaggatggacaagaaaaaaaagttttataccaaaaattgtatttcatggcattagggcagtctactggggtaaggcactatgcagtactaggcaattagaattctattcactagctatgtgcacaagcggctcctgacctggtcattttggctgtaaaactattcatgcctggacagtttttgacggtgcagtcttgctatatggtgtgagaaatggctgtaggaaacaacactcaacgaagttattccatcatcccgtgttttatatttgttgagcttgtcatcatggctgggacagtgctgcttgcctactacttcgaatgcactgacacttttcaggtgcatatccaaggattcttctgtcaggacggagacttaatgaagccttacccagggacagaggaagaaagcttcatcacccctctggtgctctattgtgtgctggctgccaccccaactgctattatttttattggtgagatatccatgtatttcataaaatcaacaagagaatccctgattgctcaggagaaaacaattctgaccggagaatgctgttacctgaaccccttacttcgaaggatcataagattcacaggggtgtttgcatttggactttttgctactgacatttttgtaaacgccggacaagtggtcactgggcacttaacgccatacttcctgactgtgtgcaagccaaactacaccagtgcagactgccaagcgcaccaccagtttataaacaatgggaacatttgtactggggacctggaagtgatagaaaaggctcggagatcctttccctccaaacacgctgctctgagcatttactccgccttatatgccacgatgtatattacaagcacaatcaagacgaagagcagtcgactggccaagccggtgctgtgcctcggaactctctgcacagccttcctgacaggcctcaaccgggtctctgagtatcggaaccactgctcggacgtgattgctggtttcatcctgggcactgcagtggccctgtttctgggaatgtgtgtggttcataactttaaaggaacgcaaggatctccttccaaacccaagcctgaggatccccgtggagtacccctaatggctttcccaaggatagaaagccctctggaaaccttaagtgcacagaatcactctgcgtccatgaccgaagttacctgagacgactgatgtgtcacaagctgttttttaaaatcatcttccaattctatacttcaaaacacacagttgctcaatgtcaaactgtgatgacaaatattacgtttatctagttagaagctaatgttttgtacattttttgtatgaggaagtgatgtagcttgccctgattttttttttttttttttggtcagctttaatatatttatgccagaattttaaaaccaacaaaattttcttgttcaagcgtgcattgaagaaccacatttattcaatggttgacgttgttttgtgatatttgtacacaaattttcttttctcagttttataaacacagaatataacaattcactttaaacttttattaccacagttgctgcctcctccagaatttttgaattttaataaaaggcaaacttttgagctgcaggaaggacaatgttggttaataataaatctcaaagtcaattgtagaaaaaaaattgtcttcaaaaagaatgttgcactctgatctcttaacaaattgttacgttcaaagtttaaagtgatatattaacaaagtcacctagttatacaaacaattgtcagagaattctggatttggagggtattggggttatatgattctttcttagataatggcctctactaaataactcaagatctttctggaatgtcttctggcaggcaggtgccactgtcagcttttctccaaaaagcagccaacatcagcctcccctgtcaactcaacagttttgtatctcatattatatggactttatatgaaaatgaatattttacagtttgcacagtattattttacagaaaaggaatcagagaatctacaacatagggccccagaacaacagtttcactttgtggcttttaattattctagaattttaactgcatctcatttttctagcatggtgagaactaatatgtaactcctttgattgaaggagctcttttgtccgtacctatcagaatgttttcttgacacttccatgttggctcttctcagctttttttgtacatattttttttttctaaagagaagaaaaagttatcacaaaatgtaaaaaaa

SEQ ID NO: 2401 - protein, 325 aa, Homo sapiens
MAVGNNTQRSYSIIPCFIFVELVIMAGTVLLAYYFECTDTFQVHIQGFFCQDGDLMKPYPGTEEESFITPLVLYCVLAATPTAIIFIGEISMYFIKSTRESLIAQEKTILTGECCYLNPLLRRIIRFTGVFAFGLFATDIFVNAGQVVTGHLTPYFLTVCKPNYTSADCQAHHQFINNGNICTGDLEVIEKARRSFPSKHAALSIYSALYATMYITSTIKTKSSRLAKPVLCLGTLCTAFLTGLNRVSEYRNHCSDVIAGFILGTAVALFLGMCVVHNFKGTQGSPSKPKPEDPRGVPLMAFPRIESPLETLSAQNHSASMTEVT

SEQ ID NO: 2402 - DNA, 2461 bp, Homo sapiens
ttaaacaaacaggagatcctgaaacctggaccctgtgcaagctgcagcgccaggaggaggcagcggaggaagcagagcgcgggatgggcgcccagcggcatctgtgatcccgcgcacctccgccccacgggcgcgcgcacaaacacggacacacacatacacacactcgcgcacacactcgcacaaacacacactcgtacacgcccgcgccgctcgctcgccggcttgctctcccacgcaagcggaatgcagcagcgcctggagagcgtgtctcggaccgccgcctgaatgtacctcgctcccgggagccggacggcccagtagggcgcactggaggacgctccgctgcgggagcctggacagtttttgacggtgcagtcttgctatatggtgtgagaaatggctgtaggaaacaacactcaacgaagttattccatcatcccgtgttttatatttgttgagcttgtcatcatggctgggacagtgctgcttgcctactacttcgaatgcactgacacttttcaggtgcatatccaaggattcttctgtcaggacggagacttaatgaagccttacccagggacagaggaagaaagcttcatcacccctctggtgctctattgtgtgctggctgccaccccaactgctattatttttattggtgagatatccatgtatttcataaaatcaacaagagaatccctgattgctcaggagaaaacaattctgaccggagaatgctgttacctgaaccccttacttcgaaggatcataagattcacaggggtgtttgcatttggactttttgctactgacatttttgtaaacgccggacaagtggtcactgggcacttaacgccatacttcctgactgtgtgcaagccaaactacaccagtgcagactgccaagcgcaccaccagtttataaacaatgggaacatttgtactggggacctggaagtgatagaaaaggctcggagatcctttccctccaaacacgctgctctgagcatttactccgccttatatgccacgatgtatattacaagcacaatcaagacgaagagcagtcgactggccaagccggtgctgtgcctcggaactctctgcacagccttcctgacaggcctcaaccgggtctctgagtatcggaaccactgctcggacgtgattgctggtttcatcctgggcactgcagtggccctgtttctgggaatgtgtgtggttcataactttaaaggaacgcaaggatctccttccaaacccaagcctgaggatccccgtggagtacccctaatggctttcccaaggatagaaagccctctggaaaccttaagtgcacagaatcactctgcgtccatgaccgaagttacctgagacgactgatgtgtcacaagctgttttttaaaatcatcttccaattctatacttcaaaacacacagttgctcaatgtcaaactgtgatgacaaatattacgtttatctagttagaagctaatgttttgtacattttttgtatgaggaagtgatgtagcttgccctgattttttttttttttttttggtcagctttaatatatttatgccagaattttaaaaccaacaaaattttcttgttcaagcgtgcattgaagaaccacatttattcaatggttgacgttgttttgtgatatttgtacacaaattttcttttctcagttttataaacacagaatataacaattcactttaaacttttattaccacagttgctgcctcctccagaatttttgaattttaataaaaggcaaacttttgagctgcaggaaggacaatgttggttaataataaatctcaaagtcaattgtagaaaaaaaattgtcttcaaaaagaatgttgcactctgatctcttaacaaattgttacgttcaaagtttaaagtgatatattaacaaagtcacctagttatacaaacaattgtcagagaattctggatttggagggtattggggttatatgattctttcttagataatggcctctactaaataactcaagatctttctggaatgtcttctggcaggcaggtgccactgtcagcttttctccaaaaagcagccaacatcagcctcccctgtcaactcaacagttttgtatctcatattatatggactttatatgaaaatgaatattttacagtttgcacagtattattttacagaaaaggaatcagagaatctacaacatagggccccagaacaacagtttcactttgtggcttttaattattctagaattttaactgcatctcatttttctagcatggtgagaactaatatgtaactcctttgattgaaggagctcttttgtccgtacctatcagaatgttttcttgacacttccatgttggctcttctcagctttttttgtacatattttttttttctaaagagaagaaaaagttatcacaaaatgtaaaaaaa

SEQ ID NO: 2403 - protein, 325 aa, Homo sapiens; identical to SEQ ID NO: 2401

SEQ ID NO: 2404 - DNA, 2119 bp, Homo sapiens
gggatgtctctcccaagattccaaagagtaaactttgggccatatgataattacattccagtcagtgaattaagcaaaaaatcatggaatcagcaacactttgccctgttatttcccaaaccacaacggccaggaaccaaaaggagatcaaaaccttctcaaatacgggacaacacggtttctataattgatgaagaacaattaagaggagatcgtagacaaccattatggatgtaccgttctttaatgagaatttctgagagaccatctgtttatttagctgccaggaggcagcctctcaaaccaactcgtactgtcgaggtggattctaaagcagcagaaattggtaagaaaggtgaagacaagacaacacagaaggacacaacagattcggaatcagaattaaaacaaggaaaaaaagattcaaagaaaggcaaggatatagagaaaggaaaagaagaaaagctagatgcaaagaaagatagcaaaaaaggtaaaaaggatgcagagaagggcaaagactcagcaacagaatctgaagatgaaaaaggaggtgcaaagaaagataacaaaaaagataaaaaggattcaaacaaaggcaaagactcggcaacagaatctgaaggtgaaaaaggaggtacagagaaagatagcaaaaaaggtaaaaaggattcaaagaagggcaaggattcagccatagaattacaagctgtaaaagcagatgaaaagaaggatgaggatggaaaaaaagatgcaaacaaaggtgatgaatcgaaggatgccaagaaagatgcaaaggagattaaaaaaggtaagaaagataagaagaagcccagtagtacagacagtgactcaaaggatgatgtcaagaaagagtctaagaaggacgccacgaaagatgccaagaaagttgccaagaaagatactgagaaagaatctgctgattcaaagaaggatgcaaagaaaaatgctaagaaggatgcaaagaaggatgcaaagaagaatgcaaagaaggatgaaaagaaggatgcaaagaagaagggcaagtaggccttggataagaatttgaaccgaaagaataattcaaaagcatatttgatgaaacaatagtggtagtctgcagctgaatttgtgagaaaacaagaggcctcaaagaattaaataatttttaaaaggtggtaaagaaggatacaaaggagaactcagcagagatttataaaaatatataagaaagatgttaagaaaaattaaggggggatccattgaaagacttgaagaatacatatacttatattcggggatatgaaggattcaatgaatgatctctagaaagatttaaagaagaatattcagataaggatgttgaagataatgacactaaatctatggacacacacacacacacacacacacacacacacacacacacacacacacacacacagtttaatgaaggcttaaagaatccaaggagacagatgttgtatctatagatttaaaataatctcaagctgcatccacagatacaaaaaaatataggagccatgaaatgaagttaaacaccttgtagaaagcctactttcaagtaaatatagcattcctttggcaaaaagaaaaaaaaagtaaaagaaaagaaaaaaaatgtattaccacccgatgagcctacatctttctttctgaagtttaaacaaccacagtcatgtttatggttgttggatgtgccacttccaatccaaaagaagcacacttgtctcgctctgttgccctggctggagttcagtgacatgatctcaggcttactacagcctccaccttcaggttcaagtgattctcctgcctcagcctctctggtagctgggattacagggaaggaaaatagctggcatttcttgctggagaaagttatcacaagtggaaaggttaccctagaaacaaaagatgactaccgtgaggatggattggacattacaccacactggaaaagtgaaacatctcattcagttggtgatcttcctgtcatgaaagttgcttgacagctctaattacgaattgaacacattaaacacctggtgaaattatcaattaaaaacatctagtcaccataaaaaaaaaaaaaaaa

SEQ ID NO: 2405 - protein, 348 aa, Homo sapiens
MSLPRFQRVNFGPYDNYIPVSELSKKSWNQQHFALLFPKPQRPGTKRRSKPSQIRDNTVSIIDEEQLRGDRRQPLWMYRSLMRISERPSVYLAARRQPLKPTRTVEVDSKAAEIGKKGEDKTTQKDTTDSESELKQGKKDSKKGKDIEKGKEEKLDAKKDSKKGKKDAEKGKDSATESEDEKGGAKKDNKKDKKDSNKGKDSATESEGEKGGTEKDSKKGKKDSKKGKDSAIELQAVKADEKKDEDGKKDANKGDESKDAKKDAKEIKKGKKDKKKPSSTDSDSKDDVKKESKKDATKDAKKVAKKDTEKESADSKKDAKKNAKKDAKKDAKKNAKKDEKKDAKKKGK

SEQ ID NO: 2406 - DNA, 378 bp, Homo sapiens
gtttatgtgcatgagttagctgagggacaactgatttgcattatgctcagctgggattggcttcaatctgcaagtcgcatccagatccattcctcatgtctcccacggtcctgaaaccaacaagctctcaggagaagttgatggtgactgaaattctgaaaatatgcagtcagcacttttgtcttcatggaaagtgaacacatttggaaatattggctcagcattgcagctataccctttagacaggaaacacactttccagttctccttgacagagaggctgaagatagagtgggaagaaaaatgttgatatttaaaactaaagtaaaaaagctacagaagcttctactatttcagataagtaaaataattcatgca

SEQ ID NO: 2407 - protein, 48 aa, Homo sapiens
MQSALLSSWKVNTFGNIGSALQLYPLDRKHTFQFSLTERLKIEWEEKC

SEQ ID NO: 2408 - DNA, 1044 bp, Homo sapiens
atgattgttcagttaatttgtactgtttgtttcttggcagtaaatacatttcatgttagatcttcttttgatttcctgaaagcagatgacatgggtgagattaaccagacacttgtgtcagaatttcttcttctgggtctttctggatacccaaagattgagattgtttactttgctctcattctagttatgtacctagtgattctaattggcaatggtgttctaatcatagccagcatctttgattctcattttcacacaccaatgtacttcttcctgggcaacctctctttcctggatatctgctatacatcctcctctgttccctcaacattggtgagcttaatctcaaagaaaagaaacatttccttctctggatgtgcagtgcagatgttctttgggtttgcaatggggtcaacagaatgtctgcttcttggcatgatggcatttgatcgttatgtggccatctgcaacccactgagataccccatcatcctgagcaaggtggcgtatgtattgatggcttctgtgtcctggctgtccggtggaataaattcagctgtgcaaacattacttgccatgagactgcctttctgtgggaataatattatcaatcatttcgcatgtgaaatattagctgtcctcaagctggcctgtgctgatatatccctcaatattatcaccatggtgatatcaaatatggccttcctggttcttccactgatggtcatttttttctcctatatgttcatcctctacaccatcttgcaaatgaattcagccacaggaagacgcaaggcattttccacgtgctcagctcacctgactgtggtgatcatattttacggtaccatcttctttatgtatgcgaaaccgaagtctcaagacctgattggggaagaaaaattgcaagcattagacaagctcatttctctgttttatggggtagtgacacccatgctgaatcctatactctatagcttgagaaataaggatgtaaaagctgctgtaaaatatttgctgaacaaaaaaccaattcactaa

SEQ ID NO: 2409 - protein, 347 aa, Homo sapiens
MIVQLICTVCFLAVNTFHVRSSFDFLKADDMGEINQTLVSEFLLLGLSGYPKIEIVYFALILVMYLVILIGNGVLIIASIFDSHFHTPMYFFLGNLSFLDICYTSSSVPSTLVSLISKKRNISFSGCAVQMFFGFAMGSTECLLLGMMAFDRYVAICNPLRYPIILSKVAYVLMASVSWLSGGINSAVQTLLAMRLPFCGNNIINHFACEILAVLKLACADISLNIITMVISNMAFLVLPLMVIFFSYMFILYTILQMNSATGRRKAFSTCSAHLTVVIIFYGTIFFMYAKPKSQDLIGEEKLQALDKLISLFYGVVTPMLNPILYSLRNKDVKAAVKYLLNKKPIH

SEQ ID NO: 2410 - DNA, 963 bp, Homo sapiens
atggaaaggaccaacgattccacgtcgacagaatttttcctggtagggctttctgcccacccaaagctccagacagttttcttcgttctaattttgtggatgtacctgatgatcctgcttggaaatggagtccttatctcagttatcatctttgattctcacctgcacacccccatgtatttcttcctctgtaatctttccttcctcgacgtttgctacacaagttcctctgtcccactaattcttgccagctttctggcagtaaagaaaaaggtttccttctctgggtgtatggtgcaaatgtttatttcttttgccatgggggccacggagtgcatgatcttaggcacgatggcactggaccgctatgtggccatctgctacccactgagataccctgtcatcatgagcaagggtgcctatgtggccatggcagctgggtcctgggtcactgggcttgtggactcagtagtgcagacagcttttgcaatgcagttaccattctgtgctaataatgtcattaaacattttgtctgtgaaattctggctatcttgaaactggcctgtgctgatatttcaatcaatgtgattagtatgacagggtcgaatctgattgttctggttattccattgttagtaatttccatctcttacatatttattgttgccactattctgaggattccttccactgaaggaaaacataaggccttctccacctgctcagcccacctgacagtggtgattatattctatggaaccatcttcttcatgtacgcaaagcctgagtctaaagcctctgttgattcaggtaatgaagacatcattgaggccctcatctcccttttctatggagtgatgactcccatgcttaatcctctcatctatagtctgcgaaacaaggatgtaaaggctgctgtcaaaaacatactgtgtaggaaaaacttttctgatggaaaatga

SEQ ID NO: 2411 - protein, 320 aa, Homo sapiens
MERTNDSTSTEFFLVGLSAHPKLQTVFFVLILWMYLMILLGNGVLISVIIFDSHLHTPMYFFLCNLSFLDVCYTSSSVPLILASFLAVKKKVSFSGCMVQMFISFAMGATECMILGTMALDRYVAICYPLRYPVIMSKGAYVAMAAGSWVTGLVDSVVQTAFAMQLPFCANNVIKHFVCEILAILKLACADISINVISMTGSNLIVLVIPLLVISISYIFIVATILRIPSTEGKHKAFSTCSAHLTVVIIFYGTIFFMYAKPESKASVDSGNEDIIEALISLFYGVMTPMLNPLIYSLRNKDVKAAVKNILCRKNFSDGK

SEQ ID NO: 2412 - DNA, 957 bp, Homo sapiens
atggaatgggaaaaccacaccattctggtggaattttttctgaagggactttctggtcacccaagacttgagttactcttttttgtgctcatcttcataatgtatgtggtcatccttctggggaatggtactctcattttaatcagcatcttggaccctcaccttcacacccctatgtacttctttctggggaacctctccttcttggacatctgctacaccaccacctctattccctccacgctagtgagcttcctttcagaaagaaagaccatttccctttctggctgtgcagtgcagatgttcctcagcttggccatggggacaacagagtgtgtgcttctgggcgtgatggcctttgaccgctatgtggctatctgcaaccctctgagatatcccatcatcatgagtaaggatgcctatgtacccatggcagctgggtcctggatcataggagctgtcaattctgcagtacaaacagtgtttgtggtacaattgcctttctgcaggaataacatcatcaatcatttcacctgtgaaattctagctgtcatgaaactggcctgtgctgacatctcaggcaatgagttcatcctgcttgtgaccacaacattgttcctattgacacctttgttattaattattgtctcttacacgttaatcattttgagcatcttcaaaattagctcttcggaggggagaagcaaaccttcctctacctgctcagctcgtctgactgtggtgataacattctgtgggaccatcttcctcatgtacatgaagcccaagtctcaagagacacttaattcagatgacttggatgccactgacaaacttatattcatattctacagggtgatgactcccatgatgaatcctttaatctacagtcttagaaacaaggatgtgaaggaggcagtaaaacacctactgagaagaaaaaattttaacaagtaa

SEQ ID NO: 2413 - protein, 318 aa, Homo sapiens
MEWENHTILVEFFLKGLSGHPRLELLFFVLIFIMYVVILLGNGTLILISILDPHLHTPMYFFLGNLSFLDICYTTTSIPSTLVSFLSERKTISLSGCAVQMFLSLAMGTTECVLLGVMAFDRYVAICNPLRYPIIMSKDAYVPMAAGSWIIGAVNSAVQTVFVVQLPFCRNNIINHFTCEILAVMKLACADISGNEFILLVTTTLFLLTPLLLIIVSYTLIILSIFKISSSEGRSKPSSTCSARLTVVITFCGTIFLMYMKPKSQETLNSDDLDATDKLIFIFYRVMTPMMNPLIYSLRNKDVKEAVKHLLRRKNFNK

SEQ ID NO: 2414 - DNA, 957 bp, Homo sapiens
atggaatgggaaaaccacaccattctggtggaattttttctgaagggactttctggtcacccaagacttgagttactcttttttgtgctcatcttcataatgtatgtggtcatccttctggggaatggtactctcattttaatcagcatcttggaccctcaccttcacacccctatgtacttctttctggggaacctctccttcttggacatctgctacaccaccacctctattccctccacgctagtgagcttcctttcagaaagaaagaccatttccctttctggctgtgcagtgcagatgttcctcggcttggccatggggacaacagagtgtgtgcttctgggcatgatggcctttgaccgctatgtggctatctgcaaccctctgagatatcccatcatcatgagtaaggatgcctatgtacccatggcagctgggtcctggatcataggagctgtcaattctgcagtacaatcagtgtttgtggtacaattgcctttctgcaggaataacatcatcaatcatttcacctgtgaaattctggctgtcatgaaactggcctgtgctgacatctcagacaatgagttcatcatgcttgtggccacaacattgttcatattgacacctttgttattaatcattgtctcttacacgttaatcattgtgagcatcttcaaaattagctcttccgaggggagaagcaaagcttcctctacctgttcagcccatctgactgtggtcataatattctatgggaccatcctcttcatgtacatgaagcccaagtctaaagagacacttaattcggatgacttggatgctaccgacaaaattatatccatgttctatggggtgatgactcccatgatgaatcctttaatctacagtcttagaaacaaggatgtgaaagaggcagtaaaacacctactgaacagaaggttctttagcaagtga

SEQ ID NO: 2415 - protein, 318 aa, Homo sapiens
MEWENHTILVEFFLKGLSGHPRLELLFFVLIFIMYVVILLGNGTLILISILDPHLHTPMYFFLGNLSFLDICYTTTSIPSTLVSFLSERKTISLSGCAVQMFLGLAMGTTECVLLGMMAFDRYVAICNPLRYPIIMSKDAYVPMAAGSWIIGAVNSAVQSVFVVQLPFCRNNIINHFTCEILAVMKLACADISDNEFIMLVATTLFILTPLLLIIVSYTLIIVSIFKISSSEGRSKASSTCSAHLTVVIIFYGTILFMYMKPKSKETLNSDDLDATDKIISMFYGVMTPMMNPLIYSLRNKDVKEAVKHLLNRRFFSK

SEQ ID NO: 2416 - DNA, 957 bp, Homo sapiens
atggaatgggaaaaccaaaccattctggtggaattttttctgaagggacattctgttcacccaaggcttgagttactcttttttgtgctaatcttcataatgtatgtggtcatccttctggggaatggtactctcattttaatcagcatcttggaccctcaccttcacacccctatgtacttctttctggggaacctctccttcttggacatctgctacaccaccacctctattccctccacactagtgagcttcctttcagaaagaaagaccatttccttttctggctgtgcagtgcagatgttccttggcttggccatggggacaacagagtgtgtgcttctgggcatgatggcctttgaccgctatgtggctatctgcaaccctctgagatatcccatcatcatgagcaagaatgcctatgtacccatggctgttgggtcctggtttgcagggattgtcaactctgcagtacaaactacatttgtagtacaattgcctttctgcaggaagaatgtcatcaatcatttctcatgtgaaattctagctgtcatgaagttggcctgtgctgacatctcaggcaatgagttcctcatgcttgtggccacaatattgttcacattgatgccactgctcttgatagttatctcttactcattaatcatttccagcatcctcaagattcactcctctgaggggagaagcaaagctttctctacctgctcagcccatctgactgtggtcataatattctatgggaccatcctcttcatgtatatgaagcccaagtctaaagagacacttaattcagatgacttggatgctaccgacaaaattatatccatgttctatggggtgatgactcccatgatgaatcctttaatctacagtcttagaaacaaggatgtgaaagaggcagtaaaacacctaccgaacagaaggttctttagcaagtga

SEQ ID NO: 2417 - protein, 318 aa, Homo sapiens
MEWENQTILVEFFLKGHSVHPRLELLFFVLIFIMYVVILLGNGTLILISILDPHLHTPMYFFLGNLSFLDICYTTTSIPSTLVSFLSERKTISFSGCAVQMFLGLAMGTTECVLLGMMAFDRYVAICNPLRYPIIMSKNAYVPMAVGSWFAGIVNSAVQTTFVVQLPFCRKNVINHFSCEILAVMKLACADISGNEFLMLVATILFTLMPLLLIVISYSLIISSILKIHSSEGRSKAFSTCSAHLTVVIIFYGTILFMYMKPKSKETLNSDDLDATDKIISMFYGVMTPMMNPLIYSLRNKDVKEAVKHLPNRRFFSK

SEQ ID NO: 2418 - DNA, 1041 bp, Homo sapiens
atgtacagatttacagattttgatgtatcaaacatttcaatttacctgaatcatgtccttttctatactacccagcaggcaggtgacctagaacacatggagacaagaaattactctgccatgactgaattctttctggtggggctttcccaatatccagagctccagctttttctgttcctgctctgcctcatcatgtacatgataatcctcctgggaaatagcctcctcattatcatcaccatcttggattctcgcctccatactcccatgtatttctttcttggaaacctctcattcttggacatctgttacacatcctcatccattcctccaatgcttattatatttatgtctgagagaaaatccatctccttcattggctgtgctctgcagatggttgtgtcccttggcttgggctccactgagtgtgtcctcctggctgtgatggcctatgaccactatgtggccatctgcaacccactgaggtactccatcatcatgaacggagtgctgtatgtgcaaatggctgcatggtcctggatcataggctgtctgacctccctattgcaaacagttctgacaatgatgttgcctttctgtgggaataatgtcattgatcatattacctgtgaaattttggcccttctaaaacttgtttgttcagatatcaccatcaatgtgcttatcatgacagtgacaaatattgtttcactggtgattcttctactgttaattttcatctcctatgtgtttattctctcttccatcctgagaattaattgtgctgagggaagaaagaaagccttctctacctgttcagcgcactcgattgtggtcatcttattctacggttcagccctttttatgtacatgaaacccaagtcaaagaacactaatacatctgatgagattattgggctgtcttatggagtggtaagcccaatgttaaatcccatcatctatagcctcaggaataaagaggtcaaagaggctgtaaagaaagtcctgagcagacatctgcatttattgaaaatgtga

SEQ ID NO: 2419 - protein, 346 aa, Homo sapiens
MYRFTDFDVSNISIYLNHVLFYTTQQAGDLEHMETRNYSAMTEFFLVGLSQYPELQLFLFLLCLIMYMIILLGNSLLIIITILDSRLHTPMYFFLGNLSFLDICYTSSSIPPMLIIFMSERKSISFIGCALQMVVSLGLGSTECVLLAVMAYDHYVAICNPLRYSIIMNGVLYVQMAAWSWIIGCLTSLLQTVLTMMLPFCGNNVIDHITCEILALLKLVCSDITINVLIMTVTNIVSLVILLLLIFISYVFILSSILRINCAEGRKKAFSTCSAHSIVVILFYGSALFMYMKPKSKNTNTSDEIIGLSYGVVSPMLNPIIYSLRNKEVKEAVKKVLSRHLHLLKM

SEQ ID NO: 2420 - DNA, 1664 bp, Homo sapiens
gcgtctgccaatgatccaggagccgctcctttccactcgggaaaccttcagaggagtctcagaaaggacacggctggctgcttttctcagcgccgaagccgcgccatgctcgtcctcagaagcgccctgactcgggcgctggcctcacggacgctggcgcctcagatgtgctcatcttttgctacgggacccagacaatacgatggaatattctatgaatttcgttcttattaccttaagccctcaaagatgaatgagttcctggaaaattttgagaaaaacgctcatcttcggacagctcactctgaattggttggatactggagtgtagaatttggaggcagaatgaatacagtgtttcatatttggaagtatgataattttgctcatcgaactgaagttcggaaagccttggccaaagataaggaatggcaagaacaattcctcattccaaatttggctctcattgataaacaagagagtgagattacttatctggtaccatggtgcaaattagaaaaacctccaaaagaaggagtctatgaactggccacttttcagatgaaacctggtgggccagctctgtggggtgatgcatttaaaagggcagttcatgctcatgtcaatctaggctacacaaaactagttggagtgttccacacagagtacggagcactcaacagagttcatgttctttggtggaatgagagtgcagatagtcgtgcagctgggagacataagtcccatgaggatcccagagttgtggcagctgttcgggaaagtgtcaactacctagtatctcagcagaatatgcttctgattcctacatcgttttcaccactgaaatagttttctactgaaatacaaaacatttcattaactgctataggatctgtctgctaatggtgcttaaattctcccaagaggttctcacttttatttgaaggaggtgttaagttaatttgctatgtttcttgcattatgaaggctacatctgtgctttgtaagtaccacttcaaaaaatagttctgtttactttctgcatggtatttcagtgtctgtcatacattaaaaatacttgtcactgttttaagatcttgactcttcatttgtttcagaatagctcttctactgtattctgacaactctttgctttatagcattttgttgtattcaaatgataatggtagcatttccatgcttgtgacagcatttttaagttattaatatattttatcaacctttccatcatgtctgttttcctggttttttttggttgttttttgaccagtaaaatttattttgtaataccaaataggatttaagaaaattaacgtatttctttactatggaaaaccacattgtcatttgtgacatcatctatattaaatatggttttcacattagttatttgtcacttacttggaaaatgatgctgttaggtcctggtattaaaaatctagaaaagacttgttggtttatgtgctgaaatgtctttatttataattaattttaactactatttacttcatttcggatcctgtttaacaaagatacttgagacatccatttgttttaatgaaatctgtatggatatggaaatgcttgccctaataaaagcctacatatacctccaaaaaaaaaaaaaaaaaaaaaaaaaaaaa

SEQ ID NO: 2421 - protein, 247 aa, Homo sapiens
MLVLRSALTRALASRTLAPQMCSSFATGPRQYDGIFYEFRSYYLKPSKMNEFLENFEKNAHLRTAHSELVGYWSVEFGGRMNTVFHIWKYDNFAHRTEVRKALAKDKEWQEQFLIPNLALIDKQESEITYLVPWCKLEKPPKEGVYELATFQMKPGGPALWGDAFKRAVHAHVNLGYTKLVGVFHTEYGALNRVHVLWWNESADSRAAGRHKSHEDPRVVAAVRESVNYLVSQQNMLLIPTSFSPLK

SEQ ID NO: 2422 - DNA, 1781 bp, Homo sapiens
actcgggaagacttcagagaagtctcacaaaggactcggctggctgcttttctcagtgccgaagccgcgccatgctcgttctcagaagcggcctgaccaaggcgcttgcctcacggacgctcgcgcctcaggtgtgttcatcttttgctacgggccctagacaatacgatggaacgttctatgaatttcgtacttattaccttaaaccttcaaatatgaatgcgttcatggaaaatcttaagaaaaacattcatcttcggacctcttactctgaattggttggattctggagtgtagaatttggaggcagaacgaataaagtgtttcatatttggaagtatgataattttgctcatcgagctgaagttcggaaagccttagccaactgtaaggaatggcaagaacaatctatcattccaaatttggctcgcattgataaacaagagacggaaattacttacctgataccatggtccaaattagaaaagcctccaaaagaaggagtctatgaactagctgtttttcagatgaaacctggtgggccagctctgtggggtgatgcatttgaaagagcaattaatgcccatgtcaatttaggctacacaaaagtagttggtgttttccacacagaatatggagaactcaacagagttcatgttctttggtggaatgagagtgcagatagtcgtgcagctgggagacataagtcccatgaggatcccagagttgtggcggctgttcgggaaagtgtcaactacctagtttctcagcagaatatgcttctgattcctgcatcattttcaccattgaaatagttttctactgaaatacaaaacatttcattaactgctctaagatgtgtctgctaatggtgcttaaattctcccaagaggttctcgcttttatttgaaggaggtggtaagttaattagttaatttgctgtgcttcttgcatttttgaaagttacatattctccactgctttaagaaataattcagttcactttcaccttggcatttcagtatctgttacacattagaagtagttgtcactatttcatcatcttggtttttcatttgttttagaatacctcttctgtattttgataactcattgctttatagcattttcttttactcaaataaggattttacatttccttgcctgacagtatttttgaattatttatataaaatatctatcttttcatcatgtctatagttcctgagattttaaaaaaatttgcttagtaaaggttattttgtgatataaaatgggatttataaaaatattagattgtttatttctttactgtggaaaagtagaatgtcatctgtattaattattgcttttacattcattgattattagtcattctaacttggaaaataatgcaattgggtcacagtgttaaaaatctagaaaagacttgttggtttatatgctgaaattgttcatttataattaattttactaatttctccttagtttggatcactaacagagatcttgggacatttatttgttttaaagaaatatttatggttatggaaacgcttgccctaataaaaatcctgcatattcattgtttttttaaattcacattttatacttatatgatctctaaagctcttgctatgttgctataagacagtaatatagtgataatttaccaactttattgaaaatgttgttacatcaataaaatagcatgctgggaacctgagaaggaaggtttctttagtactgccaaaaaaaaaaaaaaaaaaaaaaaaaaaaaa

SEQ ID NO: 2423 - protein, 247 aa, Homo sapiens
MLVLRSGLTKALASRTLAPQVCSSFATGPRQYDGTFYEFRTYYLKPSNMNAFMENLKKNIHLRTSYSELVGFWSVEFGGRTNKVFHIWKYDNFAHRAEVRKALANCKEWQEQSIIPNLARIDKQETEITYLIPWSKLEKPPKEGVYELAVFQMKPGGPALWGDAFERAINAHVNLGYTKVVGVFHTEYGELNRVHVLWWNESADSRAAGRHKSHEDPRVVAAVRESVNYLVSQQNMLLIPASFSPLK

SEQ ID NO: 2424 - DNA, 8192 bp, Homo sapiens
gtaattgcgagcgagagtgagtggggccgggacccgcagagccgagccgacccttctctcccgggctgcggcagggcagggcggggagctccgcgcaccaacagagccggttctcagggcgctttgctccttgttttttccccggttctgttttctccccttctccggaaggcttgtcaaggggtaggagaaagagacgcaaacacaaaagtggaaaacagttaatgaccagccacggcgtccctgctgtgagctctggccgctgccttccagggctcccgagccacacgctgggggtgctggctgagggaacatggcttgttggcctcagctgaggttgctgctgtggaagaacctcactttcagaagaagacaaacatgtcagctgctgctggaagtggcctggcctctatttatcttcctgatcctgatctctgttcggctgagctacccaccctatgaacaacatgaatgccattttccaaataaagccatgccctctgcaggaacacttccttgggttcaggggattatctgtaatgccaacaacccctgtttccgttacccgactcctggggaggctcccggagttgttggaaactttaacaaatccattgtggctcgcctgttctcagatgctcggaggcttcttttatacagccagaaagacaccagcatgaaggacatgcgcaaagttctgagaacattacagcagatcaagaaatccagctcaaacttgaagcttcaagatttcctggtggacaatgaaaccttctctgggttcctgtatcacaacctctctctcccaaagtctactgtggacaagatgctgagggctgatgtcattctccacaaggtatttttgcaaggctaccagttacatttgacaagtctgtgcaatggatcaaaatcagaagagatgattcaacttggtgaccaagaagtttctgagctttgtggcctaccaagggagaaactggctgcagcagagcgagtacttcgttccaacatggacatcctgaagccaatcctgagaacactaaactctacatctcccttcccgagcaaggagctggctgaagccacaaaaacattgctgcatagtcttgggactctggcccaggagctgttcagcatgagaagctggagtgacatgcgacaggaggtgatgtttctgaccaatgtgaacagctccagctcctccacccaaatctaccaggctgtgtctcgtattgtctgcgggcatcccgagggaggggggctgaagatcaagtctctcaactggtatgaggacaacaactacaaagccctctttggaggcaatggcactgaggaagatgctgaaaccttctatgacaactctacaactccttactgcaatgatttgatgaagaatttggagtctagtcctctttcccgcattatctggaaagctctgaagccgctgctcgttgggaagatcctgtatacacctgacactccagccacaaggcaggtcatggctgaggtgaacaagaccttccaggaactggctgtgttccatgatctggaaggcatgtgggaggaactcagccccaagatctggaccttcatggagaacagccaagaaatggaccttgtccggatgctgttggacagcagggacaatgaccacttttgggaacagcagttggatggcttagattggacagcccaagacatcgtggcgtttttggccaagcacccagaggatgtccagtccagtaatggttctgtgtacacctggagagaagctttcaacgagactaaccaggcaatccggaccatatctcgcttcatggagtgtgtcaacctgaacaagctagaacccatagcaacagaagtctggctcatcaacaagtccatggagctgctggatgagaggaagttctgggctggtattgtgttcactggaattactccaggcagcattgagctgccccatcatgtcaagtacaagatccgaatggacattgacaatgtggagaggacaaataaaatcaaggatgggtactgggaccctggtcctcgagctgacccctttgaggacatgcggtacgtctgggggggcttcgcctacttgcaggatgtggtggagcaggcaatcatcagggtgctgacgggcaccgagaagaaaactggtgtctatatgcaacagatgccctatccctgttacgttgatgacatctttctgcgggtgatgagccggtcaatgcccctcttcatgacgctggcctggatttactcagtggctgtgatcatcaagggcatcgtgtatgagaaggaggcacggctgaaagagaccatgcggatcatgggcctggacaacagcatcctctggtttagctggttcattagtagcctcattcctcttcttgtgagcgctggcctgctagtggtcatcctgaagttaggaaacctgctgccctacagtgatcccagcgtggtgtttgtcttcctgtccgtgtttgctgtggtgacaatcctgcagtgcttcctgattagcacactcttctccagagccaacctggcagcagcctgtgggggcatcatctacttcacgctgtacctgccctacgtcctgtgtgtggcatggcaggactacgtgggcttcacactcaagatcttcgctagcctgctgtctcctgtggcttttgggtttggctgtgagtactttgccctttttgaggagcagggcattggagtgcagtgggacaacctgtttgagagtcctgtggaggaagatggcttcaatctcaccacttcggtctccatgatgctgtttgacaccttcctctatggggtgatgacctggtacattgaggctgtctttccaggccagtacggaattcccaggccctggtattttccttgcaccaagtcctactggtttggcgaggaaagtgatgagaagagccaccctggttccaaccagaagagaatatcagaaatctgcatggaggaggaacccacccacttgaagctgggcgtgtccattcagaacctggtaaaagtctaccgagatgggatgaaggtggctgtcgatggcctggcactgaatttttatgagggccagatcacctccttcctgggccacaatggagcggggaagacgaccaccatgtcaatcctgaccgggttgttccccccgacctcgggcaccgcctacatcctgggaaaagacattcgctctgagatgagcaccatccggcagaacctgggggtctgtccccagcataacgtgctgtttgacatgctgactgtcgaagaacacatctggttctatgcccgcttgaaagggctctctgagaagcacgtgaaggcggagatggagcagatggccctggatgttggtttgccatcaagcaagctgaaaagcaaaacaagccagctgtcaggtggaatgcagagaaagctatctgtggccttggcctttgtcgggggatctaaggttgtcattctggatgaacccacagctggtgtggacccttactcccgcaggggaatatgggagctgctgctgaaataccgacaaggccgcaccattattctctctacacaccacatggatgaagcggacgtcctgggggacaggattgccatcatctcccatgggaagctgtgctgtgtgggctcctccctgtttctgaagaaccagctgggaacaggctactacctgaccttggtcaagaaagatgtggaatcctccctcagttcctgcagaaacagtagtagcactgtgtcatacctgaaaaaggaggacagtgtttctcagagcagttctgatgctggcctgggcagcgaccatgagagtgacacgctgaccatcgatgtctctgctatctccaacctcatcaggaagcatgtgtctgaagcccggctggtggaagacatagggcatgagctgacctatgtgctgccatatgaagctgctaaggagggagcctttgtggaactctttcatgagattgatgaccggctctcagacctgggcatttctagttatggcatctcagagacgaccctggaagaaatattcctcaaggtggccgaagagagtggggtggatgctgagacctcagatggtaccttgccagcaagacgaaacaggcgggccttcggggacaagcagagctgtcttcgcccgttcactgaagatgatgctgctgatccaaatgattctgacatagacccagaatccagagagacagacttgctcagtgggatggatggcaaagggtcctaccaggtgaaaggctggaaacttacacagcaacagtttgtggcccttttgtggaagagactgctaattgccagacggagtcggaaaggattttttgctcagattgtcttgccagctgtgtttgtctgcattgcccttgtgttcagcctgatcgtgccaccctttggcaagtaccccagcctggaacttcagccctggatgtacaacgaacagtacacatttgtcagcaatgatgctcctgaggacacgggaaccctggaactcttaaacgccctcaccaaagaccctggcttcgggacccgctgtatggaaggaaacccaatcccagacacgccctgccaggcaggggaggaagagtggaccactgccccagttccccagaccatcatggacctcttccagaatgggaactggacaatgcagaacccttcacctgcatgccagtgtagcagcgacaaaatcaagaagatgctgcctgtgtgtcccccaggggcaggggggctgcctcctccacaaagaaaacaaaacactgcagatatccttcaggacctgacaggaagaaacatttcggattatctggtgaagacgtatgtgcagatcatagccaaaagcttaaagaacaagatctgggtgaatgagtttaggtatggcggcttttccctgggtgtcagtaatactcaagcacttcctccgagtcaagaagttaatgatgccatcaaacaaatgaagaaacacctaaagctggccaaggacagttctgcagatcgatttctcaacagcttgggaagatttatgacaggactggacaccaaaaataatgtcaaggtgtggttcaataacaagggctggcatgcaatcagctctttcctgaatgtcatcaacaatgccattctccgggccaacctgcaaaagggagagaaccctagccattatggaattactgctttcaatcatcccctgaatctcaccaagcagcagctctcagaggtggctctgatgaccacatcagtggatgtccttgtgtccatctgtgtcatctttgcaatgtccttcgtcccagccagctttgtcgtattcctgatccaggagcgggtcagcaaagcaaaacacctgcagttcatcagtggagtgaagcctgtcatctactggctctctaattttgtctgggatatgtgcaattacgttgtccctgccacactggtcattatcatcttcatctgcttccagcagaagtcctatgtgtcctccaccaatctgcctgtgctagcccttctacttttgctgtatgggtggtcaatcacacctctcatgtacccagcctcctttgtgttcaagatccccagcacagcctatgtggtgctcaccagcgtgaacctcttcattggcattaatggcagcgtggccacctttgtgctggagctgttcaccgacaataagctgaataatatcaatgatatcctgaagtccgtgttcttgatcttcccacatttttgcctgggacgagggctcatcgacatggtgaaaaaccaggcaatggctgatgccctggaaaggtttggggagaatcgctttgtgtcaccattatcttgggacttggtgggacgaaacctcttcgccatggccgtggaaggggtggtgttcttcctcattactgttctgatccagtacagattcttcatcaggcccagacctgtaaatgcaaagctatctcctctgaatgatgaagatgaagatgtgaggcgggaaagacagagaattcttgatggtggaggccagaatgacatcttagaaatcaaggagttgacgaagatatatagaaggaagcggaagcctgctgttgacaggatttgcgtgggcattcctcctggtgagtgctttgggctcctgggagttaatggggctggaaaatcatcaactttcaagatgttaacaggagataccactgttaccagaggagatgctttccttaacaaaaatagtatcttatcaaacatccatgaagtacatcagaacatgggctactgccctcagtttgatgccatcacagagctgttgactgggagagaacacgtggagttctttgcccttttgagaggagtcccagagaaagaagttggcaaggttggtgagtgggcgattcggaaactgggcctcgtgaagtatggagaaaaatatgctggtaactatagtggaggcaacaaacgcaagctctctacagccatggctttgatcggcgggcctcctgtggtgtttctggatgaacccaccacaggcatggatcccaaagcccggcggttcttgtggaattgtgccctaagtgttgtcaaggaggggagatcagtagtgcttacatctcatagtatggaagaatgtgaagctctttgcactaggatggcaatcatggtcaatggaaggttcaggtgccttggcagtgtccagcatctaaaaaataggtttggagatggttatacaatagttgtacgaatagcagggtccaacccggacctgaagcctgtccaggatttctttggacttgcatttcctggaagtgttctaaaagagaaacaccggaacatgctacaataccagcttccatcttcattatcttctctggccaggatattcagcatcctctcccagagcaaaaagcgactccacatagaagactactctgtttctcagacaacacttgaccaagtatttgtgaactttgccaaggaccaaagtgatgatgaccacttaaaagacctctcattacacaaaaaccagacagtagtggacgttgcagttctcacatcttttctacaggatgagaaagtgaaagaaagctatgtatgaagaatcctgttcatacggggtggctgaaagtaaagaggaactagactttcctttgcaccatgtgaagtgttgtggagaaaagagccagaagttgatgtgggaagaagtaaactggatactgtactgatactattcaatgcaatgcaattcaatgcaatgaaaacaaaattccattacaggggcagtgcctttgtagcctatgtcttgtatggctctcaagtgaaagacttgaatttagttttttacctatacctatgtgaaactctattatggaacccaatggacatatgggtttgaactcacacttttttttttttttttgttcctgtgtattctcattggggttgcaacaataattcatcaagtaatcatggccagcgattattgatcaaaatcaaaaggtaatgcacatcctcattcactaagccatgccatgcccaggagactggtttcccggtgacacatccattgctggcaatgagtgtgccagagttattagtgccaagtttttcagaaagtttgaagcaccatggtgtgtcatgctcacttttgtgaaagctgctctgctcagagtctatcaacattgaatatcagttgacagaatggtgccatgcgtggctaacatcctgctttgattccctctgataagctgttctggtggcagtaacatgcaacaaaaatgtgggtgtctccaggcacgggaaacttggttccattgttatattgtcctatgcttcgagccatgggtctacagggtcatccttatgagactcttaaatatacttagatcctggtaagaggcaaagaatcaacagccaaactgctggggctgcaagctgctgaagccagggcatgggattaaagagattgtgcgttcaaacctagggaagcctgtgcccatttgtcctgactgtctgctaacatggtacactgcatctcaagatgtttatctgacacaagtgtattatttctggctttttgaattaatctagaaaatgaaaagatggagttgtattttgacaaaaatgtttgtactttttaatgttatttggaattttaagttctatcagtgacttctgaatccttagaatgg

SEQ ID NO: 2425 - protein, 2261 aa, Homo sapiens
MACWPQLRLLLWKNLTFRRRQTCQLLLEVAWPLFIFLILISVRLSYPPYEQHECHFPNKAMPSAGTLPWVQGIICNANNPCFRYPTPGEAPGVVGNFNKSIVARLFSDARRLLLYSQKDTSMKDMRKVLRTLQQIKKSSSNLKLQDFLVDNETFSGFLYHNLSLPKSTVDKMLRADVILHKVFLQGYQLHLTSLCNGSKSEEMIQLGDQEVSELCGLPREKLAAAERVLRSNMDILKPILRTLNSTSPFPSKELAEATKTLLHSLGTLAQELFSMRSWSDMRQEVMFLTNVNSSSSSTQIYQAVSRIVCGHPEGGGLKIKSLNWYEDNNYKALFGGNGTEEDAETFYDNSTTPYCNDLMKNLESSPLSRIIWKALKPLLVGKILYTPDTPATRQVMAEVNKTFQELAVFHDLEGMWEELSPKIWTFMENSQEMDLVRMLLDSRDNDHFWEQQLDGLDWTAQDIVAFLAKHPEDVQSSNGSVYTWREAFNETNQAIRTISRFMECVNLNKLEPIATEVWLINKSMELLDERKFWAGIVFTGITPGSIELPHHVKYKIRMDIDNVERTNKIKDGYWDPGPRADPFEDMRYVWGGFAYLQDVVEQAIIRVLTGTEKKTGVYMQQMPYPCYVDDIFLRVMSRSMPLFMTLAWIYSVAVIIKGIVYEKEARLKETMRIMGLDNSILWFSWFISSLIPLLVSAGLLVVILKLGNLLPYSDPSVVFVFLSVFAVVTILQCFLISTLFSRANLAAACGGIIYFTLYLPYVLCVAWQDYVGFTLKIFASLLSPVAFGFGCEYFALFEEQGIGVQWDNLFESPVEEDGFNLTTSVSMMLFDTFLYGVMTWYIEAVFPGQYGIPRPWYFPCTKSYWFGEESDEKSHPGSNQKRISEICMEEEPTHLKLGVSIQNLVKVYRDGMKVAVDGLALNFYEGQITSFLGHNGAGKTTTMSILTGLFPPTSGTAYILGKDIRSEMSTIRQNLGVCPQHNVLFDMLTVEEHIWFYARLKGLSEKHVKAEMEQMALDVGLPSSKLKSKTSQLSGGMQRKLSVALAFVGGSKVVILDEPTAGVDPYSRRGIWELLLKYRQGRTIILSTHHMDEADVLGDRIAIISHGKLCCVGSSLFLKNQLGTGYYLTLVKKDVESSLSSCRNSSSTVSYLKKEDSVSQSSSDAGLGSDHESDTLTIDVSAISNLIRKHVSEARLVEDIGHELTYVLPYEAAKEGAFVELFHEIDDRLSDLGISSYGISETTLEEIFLKVAEESGVDAETSDGTLPARRNRRAFGDKQSCLRPFTEDDAADPNDSDIDPESRETDLLSGMDGKGSYQVKGWKLTQQQFVALLWKRLLIARRSRKGFFAQIVLPAVFVCIALVFSLIVPPFGKYPSLELQPWMYNEQYTFVSNDAPEDTGTLELLNALTKDPGFGTRCMEGNPIPDTPCQAGEEEWTTAPVPQTIMDLFQNGNWTMQNPSPACQCSSDKIKKMLPVCPPGAGGLPPPQRKQNTADILQDLTGRNISDYLVKTYVQIIAKSLKNKIWVNEFRYGGFSLGVSNTQALPPSQEVNDAIKQMKKHLKLAKDSSADRFLNSLGRFMTGLDTKNNVKVWFNNKGWHAISSFLNVINNAILRANLQKGENPSHYGITAFNHPLNLTKQQLSEVALMTTSVDVLVSICVIFAMSFVPASFVVFLIQERVSKAKHLQFISGVKPVIYWLSNFVWDMCNYVVPATLVIIIFICFQQKSYVSSTNLPVLALLLLLYGWSITPLMYPASFVFKIPSTAYVVLTSVNLFIGINGSVATFVLELFTDNKLNNINDILKSVFLIFPHFCLGRGLIDMVKNQAMADALERFGENRFVSPLSWDLVGRNLFAMAVEGVVFFLITVLIQYRFFIRPRPVNAKLSPLNDEDEDVRRERQRILDGGGQNDILEIKELTKIYRRKRKPAVDRICVGIPPGECFGLLGVNGAGKSSTFKMLTGDTTVTRGDAFLNKNSILSNIHEVHQNMGYCPQFDAITELLTGREHVEFFALLRGVPEKEVGKVGEWAIRKLGLVKYGEKYAGNYSGGNKRKLSTAMALIGGPPVVFLDEPTTGMDPKARRFLWNCALSVVKEGRSVVLTSHSMEECEALCTRMAIMVNGRFRCLGSVQHLKNRFGDGYTIVVRIAGSNPDLKPVQDFFGLAFPGSVLKEKHRNMLQYQLPSSLSSLARIFSILSQSKKRLHIEDYSVSQTTLDQVFVNFAKDQSDDDHLKDLSLHKNQTVVDVAVLTSFLQDEKVKESYV

SEQ ID NO: 2426 - DNA, 1965 bp, Homo sapiens
atgggctgctgcagctccgcttcctccgccgcgcagagctccaaacgagaatggaagccgctggaggaccgtagctgcacagacataccatggctgctgctcttcatcctcttctgcattgggatgggatttatttgtggcttttcaatagcaacaggtgcagcagcaagactagtgtcaggatacgacagctatggaaatatctgtgggcagaaaaatacaaagttggaagcaataccaaacagtggcatggaccacacccagcggaagtatgtattctttttggatccatgcaacctggacttgataaaccggaagattaagtctgtagcactgtgtgtagcagcgtgtccaaggcaagaactgaaaactctgagtgatgttcagaagtttgcagagataaatggttcagccctatgtagctacaacctaaagccttctgaatacactacatctccaaaatcttctgttctctgccccaaactaccagttccagcgagtgcacctattccattcttccatcgctgtgctcctgtgaacatttcctgctatgccaagtttgcagaggccctgatcacctttgtcagtgacaatagtgtcttacacaggctgattagtggagtaatgaccagcaaagaaattatattgggactttgcttgttatcactagttctatccatgattttgatggtgataatcaggtatatatcaagagtacttgtgtggatcttaacgattctggtcatactcggttcacttggaggcacaggtgtactatggtggctgtatgcaaagcaaagaaggtctcccaaagaaactgttactcctgagcagcttcagatagctgaagacaatcttcgggccctcctcatttatgccatttcagctacagtgttcacagtgatcttattcctgataatgttggttatgcgcaaacgtgttgctcttaccatcgccttgttccacgtagctggcaaggtcttcattcacttgccactgctagtcttccaacccttctggactttctttgctcttgtcttgttttgggtgtactggatcatgacacttctttttcttggcactaccggcagtcctgttcagaatgagcaaggctttgtggagttcaaaatttctgggcctctgcagtacatgtggtggtaccatgtggtgggcctgatttggatcagtgaatttattctagcatgtcagcagatgacagtggcaggagctgtggtaacatactattttactagggataaaaggaatttgccatttacacctattttggcatcagtaaatcgccttattcgttaccacctaggtacggtggcaaaaggatctttcattatcacattagtcaaaattccgcgaatgatccttatgtatattcacagtcagctcaaaggaaaggaaaatgcttgtgcacgatgtgtgctgaaatcttgcatttgttgcctttggtgtcttgaaaagtgcctaaattatttaaatcagaatgcatacacagccacagctatcaacagcaccaacttctgcacctcagcaaaggatgcctttgtcattctggtggagaatgctttgcgagtggctaccatcaacacagtaggagattttatgttattccttggcaaggtgctgatagtctgcagcacaggtttagctgggattatgctgctcaactaccagcaggactacacagtatgggtgctgcctctgatcatcgtctgcctctttgctttcctagtcgctcattgcttcctgtctatttatgaaatggtagtggatgtattattcttgtgttttgccattgatacaaaatacaatgatgggagccctggcagagaattctatatggataaagtgctgatggagtttgtggaaaacagtaggaaagcaatgaaagaagctggtaagggaggcgtcgctgattccagagagctaaagccgatgctgaagaaaaggtga

SEQ ID NO: 2427 - protein, 654 aa, Homo sapiens
MGCCSSASSAAQSSKREWKPLEDRSCTDIPWLLLFILFCIGMGFICGFSIATGAAARLVSGYDSYGNICGQKNTKLEAIPNSGMDHTQRKYVFFLDPCNLDLINRKIKSVALCVAACPRQELKTLSDVQKFAEINGSALCSYNLKPSEYTTSPKSSVLCPKLPVPASAPIPFFHRCAPVNISCYAKFAEALITFVSDNSVLHRLISGVMTSKEIILGLCLLSLVLSMILMVIIRYISRVLVWILTILVILGSLGGTGVLWWLYAKQRRSPKETVTPEQLQIAEDNLRALLIYAISATVFTVILFLIMLVMRKRVALTIALFHVAGKVFIHLPLLVFQPFWTFFALVLFWVYWIMTLLFLGTTGSPVQNEQGFVEFKISGPLQYMWWYHVVGLIWISEFILACQQMTVAGAVVTYYFTRDKRNLPFTPILASVNRLIRYHLGTVAKGSFIITLVKIPRMILMYIHSQLKGKENACARCVLKSCICCLWCLEKCLNYLNQNAYTATAINSTNFCTSAKDAFVILVENALRVATINTVGDFMLFLGKVLIVCSTGLAGIMLLNYQQDYTVWVLPLIIVCLFAFLVAHCFLSIYEMVVDVLFLCFAIDTKYNDGSPGREFYMDKVLMEFVENSRKAMKEAGKGGVADSRELKPMLKKR

SEQ ID NO: 2428 - DNA, 4301 bp, Homo sapiens
gctgcgcgcacgcgaccgcatccgggctccttcggccccgccatgggctgctgcagctccgcttcctccgccgcgcagagctccaaacgagaatggaagccgctggaggaccgtagctgcacagacataccatggctgctgctcttcatcctcttctgcattgggatgggatttatttgtggcttttcaatagcaacaggtgcagcagcaagactagtgtcaggatacgacagctatggaaatatctgtgggcagaaaaatacaaagttggaagcaataccaaacagtggcatggaccacacccagcggaagtatgtattctttttggatccatgcaacctggacttgataaaccggaagattaagtctgtagcactgtgtgtagcagcgtgtccaaggcaagaactgaaaactctgagtgatgttcagaagtttgcagagataaatggttcagccctatgtagctacaacctaaagccttctgaatacactacatctccaaaatcttctgttctctgccccaaactaccagttccagcgagtgcacctattccattcttccatcgctgtgctcctgtgaacatttcctgctatgccaagtttgcagaggccctgatcacctttgtcagtgacaatagtgtcttacacaggctgattagtggagtaatgaccagcaaagaaattatattgggactttgcttgttatcactagttctatccatgattttgatggtgataatcaggtatatatcaagagtacttgtgtggatcttaacgattctggtcatactcggttcacttggaggcacaggtgtactatggtggctgtatgcaaagcaaagaaggtctcccaaagaaactgttactcctgagcagcttcagatagctgaagacaatcttcgggccctcctcatttatgccatttcagctacagtgttcacagtgatcttattcctgataatgttggttatgcgcaaacgtgttgctcttaccatcgccttgttccacgtagctggcaaggtcttcattcacttgccactgctagtcttccaacccttctggactttctttgctcttgtcttgttttgggtgtactggatcatgacacttctttttcttggcactaccggcagtcctgttcagaatgagcaaggctttgtggagttcaaaatttctgggcctctgcagtacatgtggtggtaccatgtggtgggcctgatttggatcagtgaatttattctagcatgtcagcagatgacagtggcaggagctgtggtaacatactattttactagggataaaaggaatttgccatttacacctattttggcatcagtaaatcgccttattcgttaccacctaggtacggtggcaaaaggatctttcattatcacattagtcaaaattccgcgaatgatccttatgtatattcacagtcagctcaaaggaaaggaaaatgcttgtgcacgatgtgtgctgaaatcttgcatttgttgcctttggtgtcttgaaaagtgcctaaattatttaaatcagaatgcatacacagccacagctatcaacagcaccaacttctgcacctcagcaaaggatgcctttgtcattctggtggagaatgctttgcgagtggctaccatcaacacagtaggagattttatgttattccttggcaaggtgctgatagtctgcagcacaggtttagctgggattatgctgctcaactaccagcaggactacacagtatgggtgctgcctctgatcatcgtctgcctctttgctttcctagtcgctcattgcttcctgtctatttatgaaatggtagtggatgtattattcttgtgttttgccattgatacaaaatacaatgatgggagccctggcagagaattctatatggataaagtgctgatggagtttgtggaaaacagtaggaaagcaatgaaagaagctggtaagggaggcgtcgctgattccagagagctaaagccgatggcttcgggagcaagttctgcttgaacctagccgacggttatggaaacccattgacattccaaaacaatatatacacacacacataaatcagccaaaatcagagaaaaggaacagggatttaataccttttttatgcttatttttgtcaaacatgtactcctttcatacgggtggcttttacaaggcaacttccgtcatttaatgttttcaactgtaattgtcttaatggaaatgttaaaattcatatctgattaacatttttaataacttagaggagattttaactttatttaaaaataggtaaaattattgtacctaattatgtctaaagtttattcaggggtaatttccctgatgtctgtataaaatcaagatcttattttactgatgcataagtcctagtgggtcaagactaggcatatgctttcagataaataaggaattactccaatcagttttccccaatcaaagaagccatgtcattttacttttagaaacatacaattgggcccaatatgggaattttcataatagttcatacatttgtcagccaacattaaaaggtaaccaactcctcaggtatttgtagtttaccctaacgcttctttaaaagaaagtaggtaaaaaaagaaaagggtagataatctttcgtatgcaaacttttcccttatattttgtctttctttcctttttgactttagtagcatcctccacacatttgtgtgcctgatttgaaaggaagctggggcacccagcgagtttagcctttaagtttctgtgtattgatttgcagattaagtaatgctgagaggaataaagaagggacagaaacatggaacataaagcattgaaaattccggtgcttgggcttcggcttcagagtaacgtcagtggcttagggttaaacggccattttattcaaatgcttgctatacaatctgaaaacacactggcaggtgctcctctccttggcaattcattgagtatccagagttctacgatgtttaactgaagaattggctaatgttttgatcctccagtgtgactgttgtttttgtttgggggtgggtttggggttttttgcttttttattcctgaagcttaccagatatgaatggctaatactccattgttctgcttgttgtaatggtgaatgctttaagaaaaaaaagtgtaatttgctaagaataattcatgatctgtttatgcgataactcctttttgttacaatttttttaaaaaaagctatttttgttaatgtaaagtaaatatttcagagcaaattttttaaacttattgcactaaatacaggctctgtacaaaaaaaaaaaaaaaaaagcctcagcattttatcattccatggaaggagaatcttttgaaagaaagcattgcctcctaccagaactagacagtgaattagatcggtattatggaaatgcatacaagtaatgtcactagggcttaataagcagccgtttgctaatgtgcttcctttcaaagggttggacctttaaattgctgcaaaaggtaaattgtatttttttttaagtattggtgttctttactctagctaggctaaaatttgctaaatgccttggtttcttttaaaagttcatgtaatatttctgatttttcagaatatttgcaataagagtctggattttaaaaaacacatgcatacacacaattaagagctcatgtcttagcaagatctgggaaaccaacattgcgagagtagctattttgaaagaataattctccagaagttaacatctaatatctagtatcaccaaacagtatcgctgttctcttttattcatttgaaatgaatataattatataactaacaattgtccaaatagatgagagagcaaatcatgtgagaaaattcagaataccatctgtttcatagccgcacagattttggactttcacaaacattgggaactaaatttagaattggcaaaagtctagaagatgggtatcaaaacagaagacattccaggagctagcaattttaagaggtgtccctccaaagtgacctgatggaagtcctgaacttggaaattaggttctactcacttggacatccctgcatcatggactgttgctgctccctgttccatatgctcgcaatctcagctatttggaagctaccaggaatgctttctaattatcatttgcaactagaactgtaatcagaaagaaattttgtatttttgtataacttgattgtgtgccattttatataacaggtcctgttttacaaataaattttgttttactaaaaaaaaaaaaaaaaaaaaaaa

SEQ ID NO: 2429 - protein, 657 aa, Homo sapiens
MGCCSSASSAAQSSKREWKPLEDRSCTDIPWLLLFILFCIGMGFICGFSIATGAAARLVSGYDSYGNICGQKNTKLEAIPNSGMDHTQRKYVFFLDPCNLDLINRKIKSVALCVAACPRQELKTLSDVQKFAEINGSALCSYNLKPSEYTTSPKSSVLCPKLPVPASAPIPFFHRCAPVNISCYAKFAEALITFVSDNSVLHRLISGVMTSKEIILGLCLLSLVLSMILMVIIRYISRVLVWILTILVILGSLGGTGVLWWLYAKQRRSPKETVTPEQLQIAEDNLRALLIYAISATVFTVILFLIMLVMRKRVALTIALFHVAGKVFIHLPLLVFQPFWTFFALVLFWVYWIMTLLFLGTTGSPVQNEQGFVEFKISGPLQYMWWYHVVGLIWISEFILACQQMTVAGAVVTYYFTRDKRNLPFTPILASVNRLIRYHLGTVAKGSFIITLVKIPRMILMYIHSQLKGKENACARCVLKSCICCLWCLEKCLNYLNQNAYTATAINSTNFCTSAKDAFVILVENALRVATINTVGDFMLFLGKVLIVCSTGLAGIMLLNYQQDYTVWVLPLIIVCLFAFLVAHCFLSIYEMVVDVLFLCFAIDTKYNDGSPGREFYMDKVLMEFVENSRKAMKEAGKGGVADSRELKPMASGASSA

SEQ ID NO: 2430 - DNA, 657 bp, Homo sapiens
ggcaaccgcggcgtgactacggcgcgcgcggtctgggcgcggacgggtggggccgggcggtgccggtgcgggctggggcagtgcagtgagtagcggtcttggggtgtgcgatctcgctgagcctcctcacacggttcgtcgtctcgggttcgagcccagtgggcttagccactcgccatggactcccagaaagaagctctacagaggatcatttcaactctggcaaataaaaatgatgaaattcagaactttattgatacactacatcatacactaaaaggagttcaggaaaattcgtccaacatactctcagagttagatgaagaatttgatagtttatactctatactggatgaagtaaaagaaagtatgattaactgtatcaagcaggaacaagctcgtaaatcccaagagttacagagtcagattagtcaatgtaataatgccctggagaactctgaagaactattagaatttgcaacaaggtcattagatataaaggaacctgaagaattttcaaaggtacacaaaaactgcattaatacacttaacaagggaagttgtatttttaaaaaggcgtttttgtttttctttagttttggatttctttactgatttctaatactaataaagccttggggtttcttgataagtaaa

SEQ ID NO: 2431 - protein, 145 aa, Homo sapiens
MDSQKEALQRIISTLANKNDEIQNFIDTLHHTLKGVQENSSNILSELDEEFDSLYSILDEVKESMINCIKQEQARKSQELQSQISQCNNALENSEELLEFATRSLDIKEPEEFSKVHKNCINTLNKGSCIFKKAFLFFFSFGFLY

SEQ ID NO: 2432 - DNA, 4310 bp, Homo sapiens
ggcaaccgcggcgtgactacggcgcgcgcggtctgggcgcggacgggtggggccgggcggtgccggtgcgggctggggcagtgcagtgagtagcggtcttggggtgtgcgatctcgctgagcctcctcacacggttcgtcgtctcgggttcgagcccagtgggcttagccactcgccatggactcccagaaagaagctctacagaggatcatttcaactctggcaaataaaaatgatgaaattcagaactttattgatacactacatcatacactaaaaggagttcaggaaaattcgtccaacatactctcagagttagatgaagaatttgatagtttatactctatactggatgaagtaaaagaaagtatgattaactgtatcaagcaggaacaagctcgtaaatcccaagagttacagagtcagattagtcaatgtaataatgccctggagaactctgaagaactattagaatttgcaacaaggtcattagatataaaggaacctgaagaattttcaaaggctgccagacagatcaaggatagagtcacaatggcttcagcctttcgcctttctttgaaaccaaaggtcagtgacaacatgactcatttaatggtggatttctcacaggaaagacagatgctgcaaactttgaagtttttgccagtccccaaagctccagagatagatccagtagagtgtttggtggcagataactctgtaacagtggcttggagaatgccagaagaagataataagattgaccattttatactggaacataggaagactaattttgatggacttccacgtgtaaaggatgagcgatgctgggagataattgataatattaagggtactgaatatacactatcaggcttaaaatttgattcaaagtatatgaatttcagagtgcgagcttgtaacaaggctgtggctggagagtattctgatccagtgactctagagaccaaagcacttaacttcaatttggataactcctcatcccatttgaacctgaaagttgaagatacatgtgtagagtgggatcctactggaggaaaaggtcaagaaagtaaaattaaaggaaaagagaacaagggcagaagtggtacaccatccccaaaacgaacatctgtaggctccaggccaccagcagtaagaggcagtagagatcgttttactggagaatcatacacagtgctgggagacactgctattgaaagtggacaacattattgggaggtcaaggcccagaaggattgtaaatcctacagtgtgggagtagcatacaaaacgttggggaaatttgaccaattgggaaagacaaacactagttggtgtatccatgtcaacaactggctacaaaacacatttgcagcaaagcataataataaagtcaaagctttggatgttactgttcctgaaaaaataggtgtattttgtgattttgatgggggtcaactttcattctatgatgcaaattctaaacagttgctatattcctttaagacaaaatttactcagccagtactacctggtttcatggtatggtgtggtggactttctttgagtactgggatgcaggttccaagtgctgtgagaacacttcagaaaagtgaaaatggaatgactggttcagctagcagcctgaacaatgttgttactcaatagtgtctactcagaatacgtttaccctccgtcttgattaggtggccttttctgtgcagttactaatcacaggaatttggtagtagtgaaaatcaggtttgctgtgttctgctttgaggcctggaatcttttatcattaaacacctagtacgaagcatttgcaggaacctactgtgcagtatcatagaagcaagcagataccaagcaaaaaactgatgattgaagagtaaatgggggaaaaggcagtgtttaattaacataaaaactcatttttgtatttcttggattactttgactattctaatgtttaattacatatggtaaccctaaggcctggggagaaaagcttttaaatcttgccttctttcttctgtactttgtctttttaaaatctcattactatctattatttagttctaacacagaagctttaaaaatacatagtcatccaaggttttctaaaaattgaaatcatatgttgggaatggtaaaaaggttttcaaatggtttatttttcctcttttataaataagttttacaaaattttcctcttttgtttattgactagattgtatataattttcttttttccaaaatattgtgataagaaatttctagacacaacagcttaaaatcacccaaatttcagttctttacctactgcactaacaatggcaaggggggtattctttatatgttgccttgtttaactacagttcttttcattccatcactttaggtgatgggtaagatttttgaaagccttatattttttgattttgttgtctagtttaatcctacctttaatagttgtgtttggtaaaattcccacttgaatgtgacactgataataattatgctgatttttagcatctcttataggaatcaaagtttattaaagttacatagaggattgaaaaatgtatatcactcaatttttatctaagaaggataggttataaagggaggtacctaaatactcaaataatgtatatattctttttcataacatatggaatgctttaagcaattgttttgaaaaaaatctgcgtatctttgacttaattggcacatgactttttcaagcagccattcattcagaggtttgttttctctcagtccttttgctacattcactttcttttcaaagaaatgttaattattacaaaaattgacatagatatctttcccaaacttggggtaaaacccatggttatgtggaacataactgttcttaaaaagtcaattataatttgtaactcacatcctttgagctaaactaaattaaaattacagtatttaataattctttgggcatttttaagaggtctgaatttgtatttttcttcatttttgaaactttacatttgttgactttttttcattctcatttaaaatatattgtgctatgataaccaaccttcttccaaggagtgaccattactgcctacatttgcgttgctttctacatagagacttgtataatagtattaatagtagctcattctctctaaaaatttactgcccactgataggatgttttgtttccttgataaaacaaatgtaaatgaggaattttatttgaattggaatattgtttttctagaggacattcatatctgcactattatctgatgacatgttggtaattttaaagactgcaaggcagtttagagaatgaagtaaaccaatagatactcttttgattctccaaagaaatataattttggtttttgttcctcagagagagtttgaaagaaattttcagatgttctgttccctatagagggcctattccaggatctaaatgaatgggaatttataattcctttcatagactcaaacctgaaagcagaaatttttagtagttgagttgctttaagtgaattttaacaaatatgacacagaaaaggtcagatgctgttgtataaaattttttactagtgtgtcttatataattctttcttctcattaattcagtgcctttttcctctaagcatactcttggtccatgccccatgcagtgtcaactgatgtttaagctacagagcattgttgtagtggtgagggccctctgttgcaggggcatggggaaatgcatatattaatcaggggctggaggagtatacatgattcttgtgttcatgttgtcatttgaaactcttcacataaaattttctaatattcatttggaaaacctctccactggagaggtttcatctctgagaggttttgtaataatagtgtaagttcagtaaatccagtccaaattctcatcacatgtattatttgatactaaattttcaattattacttcaaaataagagtctgaggatttcttcttactggcgttcttaaaggtctctaaaattaaagaacaagatgtggttttttgtttaagacgtttttagtttatttgttgttaagttaaactggagaaagtttgtcatcctcattttcaaactgaaaactaatcaaatatagtgcctatttagtctcaaaataaggtaactattaacttgattatactatataatattctcaattacatttgaatttaaaaatattgagctcttgattacaatttaatacattgtaaaaagtattaaatcctttgaaacatcaaaaaaaaaaaaaaa

SEQ ID NO: 2433 - protein, 498 aa, Homo sapiens
MDSQKEALQRIISTLANKNDEIQNFIDTLHHTLKGVQENSSNILSELDEEFDSLYSILDEVKESMINCIKQEQARKSQELQSQISQCNNALENSEELLEFATRSLDIKEPEEFSKAARQIKDRVTMASAFRLSLKPKVSDNMTHLMVDFSQERQMLQTLKFLPVPKAPEIDPVECLVADNSVTVAWRMPEEDNKIDHFILEHRKTNFDGLPRVKDERCWEIIDNIKGTEYTLSGLKFDSKYMNFRVRACNKAVAGEYSDPVTLETKALNFNLDNSSSHLNLKVEDTCVEWDPTGGKGQESKIKGKENKGRSGTPSPKRTSVGSRPPAVRGSRDRFTGESYTVLGDTAIESGQHYWEVKAQKDCKSYSVGVAYKTLGKFDQLGKTNTSWCIHVNNWLQNTFAAKHNNKVKALDVTVPEKIGVFCDFDGGQLSFYDANSKQLLYSFKTKFTQPVLPGFMVWCGGLSLSTGMQVPSAVRTLQKSENGMTGSASSLNNVVTQ

SEQ ID NO: 2434 - DNA, 7349 bp, Homo sapiens
gctgcagcctgctgttgagtgagaaaacaaaattatcttcctttccaaatccaaaaagatgaaaacgactgagatactttcaaaagacaaccaagtgagcagcacagactaatgagtagaatcaataagaacgtggttttggcccttttaacgctgacaagttctgcatttctgctgtttcagttgtactactacaagcactatttatcaacaaagaatggagctggtttgtcaaaatccaaaggaagccgaattggatttgatagcacacagtggcgtgcagttaaaaaatttattatgttaacatccaaccaaaatgtaccagtgtttcttattgatcctttgatactggaattgattaataagaactttgaacaagtcaaaaatacttctcatggctctacttcacaatgcaagtttttctgtgttccaagagactttactgcatttgcactgcagtatcacctatggaagaatgaggaaggctggtttcggatagctgagaatatgggatttcagtgcctaaagattgagagtaaagatccccggctagacgggatagactcactctctggaactgaaatccccctgcactatatctgcaaactggccactcatgcgatccacttggtagtctttcatgagaggagtggcaactacctctggcacggccacttgagacttaaagaacacattgacaggaaatttgttcccttccaaaagttacagtttggtcgttatccaggagcttttgacaggccagagttacagcaagttactgttgatggactggaagttctcattccaaaggatccaatgcactttgtagaagaagtaccacactctaggtttattgagtgtaggtataaagaagctcgagcattctttcagcagtaccttgatgataacactgtggaagctgtggcctttcggaagagtgcaaaggaattactgcaactagcagcgaaaacattaaacaaattgggagtaccattctggctgagcagtggaacttgtctaggatggtatcgacaatgcaacattattccttatagcaaagatgttgacctaggaatttttatacaagattacaaatctgatattattttagcatttcaggatgcaggacttccgctcaaacacaaatttgggaaggtagaagacagcttggaactatccttccagggaaaagatgatgtaaaacttgatgtttttttcttctatgaagaaactgatcacatgtggaatggaggcactcaggccaaaacaggaaaaaaattcaaatacctgtttccgaagtttacactgtgctggactgagtttgtagacatgaaggtccatgtaccctgtgaaaccctcgaatacattgaagccaactatggtaagacctggaagattcctgtaaagacgtgggactggaagcgctctcctcccaatgtgcaacccaatggaatctggcctatttctgagtgggatgaggttatccagttatattgagatagtaggttgaaatgggagaatttctcttttggaaaaaaaggtagataactgtttaaaaaatacatgtctatttgtcaaacataagtgggaaccaaagaaaaaatgtgacaagtttgaagacacagaaagagtcatctgatgtaattctctcacttagtactgaggaattttcatgtgccacatacaatgctaggttacagtggagaagccaagatgaatgagacaaatacctacttcttttattcctccttttggtaaacaactcaattttcctttgagggaaccctcccccaccctttgaagagttcaagttctgtacaggtttttaaaacgtgaagtaatgtttgaactggaagatgagctcaccaggcaaagctaaggaaggatatactagttgaaaagaataacccactcctcttctgggcatttaagctggtatgttagtgctacttttaagattgtggagtctgagttaatattcaagtgatcagactttgagtgacatcaagaaaagatgatatcaggttcatttttcaactaatcttatgtggaattgaattagagaacaaggcattattcttttagggaaggtgagagcttatttgtatcagagcttattacttgtcaggataagtaaatttctgtacatgtactgttttcatatgtgaagtgagaagaaactttatgcttgtttaatgcttaaatttccatccattgtgagaatattttcactgacctctgatggcacttgttgacaaatcattcaagtgagaccatgttactagacatgatcttgaaagaggccatgatttcacaaaactcatttttattttattctcagacagtctgttaggtaaaaatatgagaaattcatgtacattttatattttctgaatttataatctgtgcactcccaattttaatgacactaaaatattaatagaattttttaaatatactctaatttttaaaacatactctttattatcttcatttatcaattacagcttcgtatctctaatttatggtctatataccaatttaaatggcatgtaaacctgcctgtttcttctcctcttctaatatatcagatctccaaaatggaagctaaatggtggacttgacaactattcaccctacctcagatcatagagtttgtaaagtttgtgtccctccccagtttttcagtctgttgaatgtcgatggggcaagaactcagacttctactttaccaagtaccacacactctggaatgctttagtttccttttcccctcaagatgtctgagtcagctaggatgctgtttaccccatctctctcttatatcacttgaatgatatattgtaagtgagaggtaaaggaaaatgtaggcacaataagcactgctatttttctctttgtctaggaaaggaagctgaatcttatatcttatctatgctatttaggactactttctggagcttggcagattttcctctgacaccagagaacaatagtagtctcaagaatggaaacctgaatgtctgagggaatgggctggtagactttttcgaaaacaaattagagaaagtaacttacaaccacccattccggatttgtaaagcaacatgaaaacctttgataaatgataaccaacagtcttctgtcctaatttgcattctcaatgcagaattattgggtctttcataaacaacatgagtggtttctggagacatttaagattgtcagcaaacttgtcccaaaatggcacatcatcataatccattttctctttgctagaaaatcagcccatagagtgcattcccaaattctaaatagctgaccctaaattcatttttcatgcttaaaaataatagaacaaataataatactatttttgggcaaaatccaccctacttgatgaggaccatttgcttgtgctcagtatttagaaatgcatacactccacatttctccccatttccaattgggactcccattctttgccaggagatcttacccatcccttttcagattaatcttttatcctttcctgaagtacaaagtcttaagagtgtctgaaatccaagacatcttggcccaattgacacaggttctatattcttccctacatagaccactggctgctgaaatacttttcttgtcttctggtttcacaggcttcagctcatgggttccaccctaacttggggaaacaaaagccttctctagaatctgaaggccaggcttacctctgattctgattcatccatacttcatcttatgtattttaacagttgggttctgtggagtgtccagagaccttgggttaggtatatccatcttcagtacctcattggatcacttttctttcatcacttgagtattctagcagtcattctcctaatctgaccactttcaggtttagtttacctggcttaccaggggaagttgacaacttgttggtagttaggcacccatgaatgtctccagagacatcctgagaggcaagattcctcttaattgataaccaggacaaccaggtagtcacccagtcctctctaagcagggagcacttgtccttctctcctctgctgcagctactgatatctggcccctggaataaaaccatagttcctaaaattgagcatccctaagagtagctgcttggtgggacagctgatttctttgattccctagctgcaaaacctgaaattgaccactaggtgacagaatgtttgccagtatccccacaaaacaagttaaaacttaagtgaaaatcattctgcttttgaatcttaaaagctagaaaaaccataatgtaatattctttttaaaccctcttattttataactaaataaataatcacagaaaagaatgatctgaacaagaacagctgaggctaaaacccaagactgccgtgactcctagtccaatgtctgtttcgcatcacaacacagtatctttaacagtgcttgagatgcttaacagagaaggcatccagtgcttcattgaggctaagtctcagggtgtttctgccgcttagtatctttttgttcagattgagaacctaaggcgacagagaggtcaaggggaagtattttctagttcagaattcagaattcttaggcaaccttcatacctttatctggaaaatgccttctctccagacaataagacagttcacatctggagacatcagcctttggtacctaattctctaagctcaagatgcatcccattgccactttaccattctatttcccaagggaaccatcagcaccaacctgctaaatgcctgtatttgaagtctctccccttcctgaagtgaccttttatgaggctctttccttcctaagggacctttccctggtagtagtggtctcattcacaaaaaagaataatagatgtaactggagtcactttgcagttttcaagattttttttttatctgcttggctggaaaggagactagagtatctagtttttagtatttaaactacttttaattatttatattgatactctctgataaatgcaggtagttaagaatagattgtactcattcctttttgagtttgtgacctcaaaccattgtttttattcttacacgactacagtacttcaaatggcacatagataggcaggatattacataggtaagcaggaatttatacattgggtaccagagctaaatctggaaaacacatttggaatgagcttccacacttcagtctaaaatctcacccaaacttatggctacatatttttctaagtttcccccctagtttcactttctggaaagtgaacagttttttaaatcctaaatgttataaatccttaggagaaatattccctcaaaacctagtcaagaaagtgccacattcccaccttctaacaggtaattattagttgtaatagctttaatgcatggaaaaacttcagttactgaccagtcaagagaatttctcaagaaaaatcccagcaacgttccctctttcctccttgtcttccactatcattaagacctgggctagatcacctctaacatctcactcagggaaggcaatgtgttgccataaaaagaccacaagcttttgagttaggcctgaatttgaatttcagcttaatcatgtgggatttatggtgggggccctttcagtctcaatttccacattagtgaactggggaaatgatacatacttctaagggtttttagggggattaaatgaagtatacagttcttagcctcaggcctaggattaagtaagtactcaagaaatgtgcaattttctagttccatgtttcttttctaatcttcaaatggaattatagaaaccatgggtcagaacatattcctttactcaaaagattgcatgactgaatttgcttaagaaaaaaaaaattgtatcaagtcattaatacaattatacattaattatattacattaatacaatatatggtttgtgaattcagagacattaccagtttgcctccttctctcaatagaacttgtattttcattttcttggttaagcagttgtctcctaatattatcccatatgctacctagtttgctggtcccaagcagtttactgtacttcactagatttggtacctgctctcccctggacttctttttcaatattctagcctttcctagatgtaaatctttacctccttgttagtgaaattagatataagccatgatttggagagggaagaaatctggaatacttaatttcatttaattatctatgctgatgaatgcctgtatcattgttaataaaggagaattgaaaatactcatttctactttctgccctcaaatttctgtttctatctcaactaggcaagaatcagcagggtgcatgatgccattttaagctgcttcacatcagactgaaatcctaattacagttcataagtgaaacagactaattcaatggcaataccttttgtataggtcctgtgcttaaaggaggcaagtataaattttctaataagaaatccctgcttcttttgggtgcagtggctcacacctgtaataccagcagtttgagaagctaaggcaggtggatcacttgaggccaggagttcgagaccagcctggccaacatagtgaaaccccgtctcttctaaaaatacaaaaaaattagctgggcatggtggtgcacgcctatagtcccagctacacaggaggctgaggcaggagaatcacttgaacccgggaagcagagtctgcagtgagccaagatcgcggcattgcacttcagcctgggcgatagagcaagactctgtctcagaaaaaaaaaaaaggaaagaaagaaatctctgcttccgtactatcaaaacttctaccctagaataccccctggcaccttctaacccaacctaatacagagattttgtagggacccattaacaagctcctatataattataagcagctctcacagtagggttgaaagagaatataaggaaaattagaagtactgtatttttgctattggaaatgaaatattgtttcatgcacctttgaaaaaaataacaggattttacagccttctgatgattcattcaaagcatggggaatagttcatatgtttgttaaatgaaaatcttatgtagcaatttgtgtgtccctcccacttcataactacaaaaacatatatatgaatttctaaacaaagtgatattttaaagatgaattgattcaatgtgtacttaccagtttactgtgtggttttatcttcaggtacagatagtttgtggtactacttgaaaatacctttaatattattttcatcagaatttgtaatatataatccagtttgggatgatgaataaaatttttctaatctcttg

SEQ ID NO: 2435 - protein, 461 aa, Homo sapiens
MSRINKNVVLALLTLTSSAFLLFQLYYYKHYLSTKNGAGLSKSKGSRIGFDSTQWRAVKKFIMLTSNQNVPVFLIDPLILELINKNFEQVKNTSHGSTSQCKFFCVPRDFTAFALQYHLWKNEEGWFRIAENMGFQCLKIESKDPRLDGIDSLSGTEIPLHYICKLATHAIHLVVFHERSGNYLWHGHLRLKEHIDRKFVPFQKLQFGRYPGAFDRPELQQVTVDGLEVLIPKDPMHFVEEVPHSRFIECRYKEARAFFQQYLDDNTVEAVAFRKSAKELLQLAAKTLNKLGVPFWLSSGTCLGWYRQCNIIPYSKDVDLGIFIQDYKSDIILAFQDAGLPLKHKFGKVEDSLELSFQGKDDVKLDVFFFYEETDHMWNGGTQAKTGKKFKYLFPKFTLCWTEFVDMKVHVPCETLEYIEANYGKTWKIPVKTWDWKRSPPNVQPNGIWPISEWDEVIQLY

SEQ ID NO: 2436 - DNA, 327 bp, Homo sapiens
atgaccaggaagatcttcacaaataccagggagcggtggaggcagcagaatgtcaacagcgcctttgccaagctgaggaagctcatccccactcaccctccagacaaaaagctgagcaaaaatgaaacgcttcgcctggcaatgaggtatatcaacttcttggtcaaggtcttgggggagcaaagcctgcaacaaacgggagtggctgctcaggggaacattctggggctcttccctcaaggaccccacctgccaggcctggaggacagaactctgcttgagaactaccaggttccttcacctggtccaagccaccacattccttag

SEQ ID NO: 2437 - protein, 108 aa, Homo sapiens
MTRKIFTNTRERWRQQNVNSAFAKLRKLIPTHPPDKKLSKNETLRLAMRYINFLVKVLGEQSLQQTGVAAQGNILGLFPQGPHLPGLEDRTLLENYQVPSPGPSHHIP

SEQ ID NO: 2438 - DNA, 2076 bp, Homo sapiens
gctggagccggcgcggaggagcgggcggccgcggctgtgccctctcctactcctcaccgcgcgcgcgcggggaaccagtagccgcggctgcttcggttgccgcggtcggtggtcgttatggattctccatgggacgagttggctctggccttctcccgcacgtccatgtttcccttttttgacatcgcgcactatctagtgtcagtgatggcggtgaaacgtcagccgggagcagctgcattggcatggaagaatcctatttcaagctggtttactgctatgctccactgttttggtggaggaattttatcctgtctactgcttgcagagcctccattgaagtttcttgcaaaccacactaacatattactggcatcttcaatctggtatattacatttttttgcccgcatgacctagtttcccagggctattcatatctacctgttcaactactggcttcgggaatgaaggaagtgaccagaacttggaaaatagtaggtggagtcacacatgctaatagctattacaaaaatggctggatagtcatgatagctattggatgggcccgaggtgcaggtggtaccattataacgaattttgagaggttggtaaaaggagattggaaaccagaaggtgatgaatggctgaagatgtcataccctgccaaggtaaccctgctggggtcagttatcttcacattccagcacacccagcatctggcaatatcaaagcataatcttatgttcctttataccatctttattgtggccacaaagataaccatgatgactacacagacttctactatgacatttgctccttttgaggatacattgagttggatgctatttggctggcagcagccgttttcatcatgtgagaagaaaagtgaagcaaagtcaccttccaatggcgttgggtcattggcctcaaagccggtagatgttgcctcagataatgttaaaaagaaacatactaagaagaatgaataaatttacgtgatgagctctacaaggccaaaaattttttttcttatctacctgttatattgtgctaatttttctatgtatgtgatgtgaaatgaagactatatatatggaatggaggtgacagaaagaaagaaattctttgtttgagggagacttcccctttctggattgtatttgtagagtgttacgagtgtatcatgtgattatgctttaccggtataagagattctgttgtgattatttgaatagttttatattaataaaagaagacaaaattttttaaatgttagaaaaagcagatctgtcattgcaaagtaacaaaaattttaagcttttaaaaatgtagatttttcatatttttaaaatttgaatctatttgagctttagttcagcagaattaaatttttacttgacattatcattaaaattgctaggtatggagaacaattcctattttattttgaacactgagaagagtaaacttttcctaaaacactttatattataaatgaaaataaattgctagtttatattttagatataaacatcatattttttattaatacctacatcaaatggaaaatatctgaaattttttttccatagcaggtattttctactagaagtagttttactacttttcatttagaacagagtatgagtcttaatctgaagtctttttcatgcccttgttttaaaaaaactactttttttggcctcaaaaaaatcaagggtgtaatttttaataaattgttaatcctatgttttgtaattttcattttaggagcttgacttatttttttctctctcataaaaacacatttgttttaattgtaggagaaattttctcagcattttgcatgttctttctaatctttgttggtctgaatatattggtagtaattactgtaattattcaacaaaaagcatatccgttcaaaaatttttccactatgtcttttttctagtggctactgttttagttttctagttgaatatctctgacaagctttcgtatggttttgttatatcttcatctacatgtaatgtgttattaattttattaaatgaaaactaatcaccttc

SEQ ID NO: 2439 - protein, 291 aa, Homo sapiens
MDSPWDELALAFSRTSMFPFFDIAHYLVSVMAVKRQPGAAALAWKNPISSWFTAMLHCFGGGILSCLLLAEPPLKFLANHTNILLASSIWYITFFCPHDLVSQGYSYLPVQLLASGMKEVTRTWKIVGGVTHANSYYKNGWIVMIAIGWARGAGGTIITNFERLVKGDWKPEGDEWLKMSYPAKVTLLGSVIFTFQHTQHLAISKHNLMFLYTIFIVATKITMMTTQTSTMTFAPFEDTLSWMLFGWQQPFSSCEKKSEAKSPSNGVGSLASKPVDVASDNVKKKHTKKNE

SEQ ID NO: 2440 - DNA, 4104 bp, Homo sapiens
ctgcaggttattcagcgatagttatgacctcccggttacgtgcgttgggtggaagaattaataatatacgcacctcggagttacccaaagagaaaactcgatcagaagtcatttgcagcatccactttttagatggcgtggtacagacctttaaagttactaaacaagacactggccaggttcttctggatatggtgcacaaccacctgggtgtgactgaaaaggaatattttggtttacagcatgatgacgactccgtggactctcctagatggctggaagcaagcaaagccatcaggaagcagttaaaaggaggtttcccctgtaccctgcattttcgagtaagattttttatacctgatcccaacacactgcagcaagaacaaaccaggcacttgtatttcttacaactgaagatggatatttgcgaaggaaggttaacctgccctcttaactcagcagtggttctagcgtcctatgccgtacaatctcattttggagactataattcttccatacatcatccaggctatctttccgatagtcactttatacccgatcaaaatgaggactttttaacaaaagtcgaatctctgcatgagcagcacagtgggctaaaacaatcagaagcagaatcctgctatatcaacatagcgcggaccctcgacttctatggagtagaactgcacagtggtagggatctgcacaatttagacctaatgattggaattgcttccgcgggtgttgctgtgtaccgaaaatacatttgcacaagtttctatccttgggtgaacattctcaaaatttctttcaaaaggaaaaagttcttcatacatcagcgacagaaacaggctgaatccagggaacatattgtggccttcaacatgctgaattaccgatcttgcaaaaacttgtggaaatcctgtgttgagcaccatacgttctttcaggcaaagaagctactacctcaggaaaagaatgttctgtctcagtactggactatgggctctcggaacaccaaaaagtcggtaaataaccaatattgcaaaaaggtgattggcgggatggtgtggaacccagccatgcggagatccttatcagtggagcacttagaaaccaagagtctgccttctcgttcccctcccattactcccaactggcgaagtcctcggctccggcacgaaatccgaaagccacgccactcttctgcagataaccttgcaaatgaaatgacctacatcacggaaacggaagatgtattttacacgtacaagggctctctggcccctcaagacagcgattctgaagtttctcagaaccgaagcccgcaccaagagagtttatccgagaacaatccggcacaaagctacctgacccagaagtcatccagttctgtgtctccatcttcaaatgctccaggctcctgctcacctgacggcgttgatcagcagctcttagatgacttccacagggtgaccaaagggggctccaccgaggacgccagccagtactactgtgacaagaatgataatggtgacagctacttagtcttgatccgtatcacaccagatgaagatggaaaatttggatttaatcttaagggaggagtggatcaaaagatgcctcttgtggtatcaaggataaacccagagtcacctgcggacacctgcattcctaagctgaacgaaggggatcaaatcgtgttaatcaatggccgggacatctcagaacacacgcatgaccaagtggtgatgttcatcaaagccagccgggagtcccactcacgggagctggccctggtgatcaggaggagagctgtccgctcatttgctgacttcaagtctgaagatgaactgaaccagcttttccccgaagccattttccccatgtgtccggagggtggggacactttggagggatccatggcacagctaaagaagggcctcgaaagcgggacggtgctgatccagtttgagcaactctacagaaaaaagccaggtttggccatcacgtttgcaaagctgcctcaaaatttggacaaaaaccgatataaagatgtgctgccttatgacaccacccgggtattattgcagggaaatgaagattatattaatgcaagttacgtgaacatggaaattcctgctgctaaccttgtgaacaagtacatcgccactcaggggcccctgccgcatacctgtgcacagttttggcaggttgtctgggatcagaagttgtcactcattgtcatgttgacgactctcacagaacgagggcggaccaaatgtcaccagtactggccagatccccccgacgtcatgaaccacggcggctttcacatccagtgtcagtcagaggactgcaccatcgcctatgtgtcccgagaaatgctggtcacaaacacccagaccggggaagaacacacagtgacacatctccagtacgtcgcatggcctgaccacggtgtgcccgatgactcctccgactttctggaatttgtaaactatgtgaggtctctgagagtggacagcgagcctctcctagttcactgcagtgctggaataggtcgaaccggtgtgttggtcactatggaaacagccatgtgcctaactgagaggaacctgcccatttacccactggatattgtccgaaaaatgcgagaccagcgcgccatgatggtgcagacatcaagccagtacaagtttgtgtgtgaagcgattcttcgtgtgtatgaagaaggtttagtccaaatgctggatcctagttaagacaactgtgaaaaagttcattcctctttcccaagggcatcctccttgaaagaggaggacagacctctctggaagcagcaagaggaaccagtagctgtgggaaaggaatgggcacctctgaacccaggcactttaaacttctatagaaaagatatcgtgtacataggaactggtgtagataagcatgcaattatggcatcatttaggcctgtatttctatggaaagatacaaaaaggatctcagtttggggcctgtcctaatgccttcttccctaacatcaccacacacacccctgtcggcatcctggagcaattgagaccggacacccacagagctgttgtcctcccagcaacaagatggtgtggttatcttgggtcatttggatgttttgtttgtttctgtgtgtcagactgtaagggctgagctttctgtgcttctaggtggagctggaacaattcagattcacccgccctgatgctaaggaaaccctgacgtatgtactagatggcagggcactgggggtcaggctgaaggctgagcaacacctctctgccctccctccctttgtcccatctcccagcgacttccaatattcatgtttctgagaattgtgtccctcttcaggttccctcttggtgcctaacctggattagtaatgtgcattcaggtgaattttcagctgaggctctgagaactggtactctcagtgtgttctggtcatcttgtggcttagttgtagaagcaggtgtgtctcttgcctctgcttgcctcctactgcacactcagcacccaggactggaatcaccgactactgaatctcctacatgtattgctgctacttcaagctcctccacttgaaaccttatgattttcccaaggggagatgggacagtgtcatctaaatattccgaatgtttggccttctgagaaaagagcttctagtaattgaaccatgggaaacccagcttctggagggttggccgtggggctgtgtacatgtgtgtgcccaggggtgagtgtttctcaggattcctaacgattcaaattaccgttgagtatatataaagaatgagtctctgtatggaagaacaaatgtgtgcattcacccccagtcacaatggtctccattgcatttcaaaggagaggatcagactatctgaatataaacacaatctgatgttaatttattctaagaacaccatcattttgattgtcctaaagaattctgcctttgtgaataccgtgttaaatttttttaaatttgtgacaggattgtagcaaattattatttaaggaaaataaattgtgtaaacatttaaaaaaaaaaaaaaaaaaaaa

SEQ ID NO: 2441 - protein, 913 aa, Homo sapiens
MTSRLRALGGRINNIRTSELPKEKTRSEVICSIHFLDGVVQTFKVTKQDTGQVLLDMVHNHLGVTEKEYFGLQHDDDSVDSPRWLEASKAIRKQLKGGFPCTLHFRVRFFIPDPNTLQQEQTRHLYFLQLKMDICEGRLTCPLNSAVVLASYAVQSHFGDYNSSIHHPGYLSDSHFIPDQNEDFLTKVESLHEQHSGLKQSEAESCYINIARTLDFYGVELHSGRDLHNLDLMIGIASAGVAVYRKYICTSFYPWVNILKISFKRKKFFIHQRQKQAESREHIVAFNMLNYRSCKNLWKSCVEHHTFFQAKKLLPQEKNVLSQYWTMGSRNTKKSVNNQYCKKVIGGMVWNPAMRRSLSVEHLETKSLPSRSPPITPNWRSPRLRHEIRKPRHSSADNLANEMTYITETEDVFYTYKGSLAPQDSDSEVSQNRSPHQESLSENNPAQSYLTQKSSSSVSPSSNAPGSCSPDGVDQQLLDDFHRVTKGGSTEDASQYYCDKNDNGDSYLVLIRITPDEDGKFGFNLKGGVDQKMPLVVSRINPESPADTCIPKLNEGDQIVLINGRDISEHTHDQVVMFIKASRESHSRELALVIRRRAVRSFADFKSEDELNQLFPEAIFPMCPEGGDTLEGSMAQLKKGLESGTVLIQFEQLYRKKPGLAITFAKLPQNLDKNRYKDVLPYDTTRVLLQGNEDYINASYVNMEIPAANLVNKYIATQGPLPHTCAQFWQVVWDQKLSLIVMLTTLTERGRTKCHQYWPDPPDVMNHGGFHIQCQSEDCTIAYVSREMLVTNTQTGEEHTVTHLQYVAWPDHGVPDDSSDFLEFVNYVRSLRVDSEPLLVHCSAGIGRTGVLVTMETAMCLTERNLPIYPLDIVRKMRDQRAMMVQTSSQYKFVCEAILRVYEEGLVQMLDPS

SEQ ID NO: 2442 - DNA, 6866 bp, Homo sapiens
gcagatgcgctggccccagcccggggctgccgctcgccttcccccggagtctcctggacccccggagtctcctggacccccggagcgggaggcagcggccgcgcggcgctggactggagcagaaccccaggactgcgcccccgggagcgggcgcccagagaagcctccccagctttctgaggatgatatctggctaaaaagcgagggagacaactatagtgccaccctcctggagcctgctgccagctctctttccccagatcacaaaaacatggaaattgaggtgtctgttgcagaatgtaaaagtgttcctggaatcacctctaccccacatcccatggaccatccctccgctttctattcacccccgcataatggcctccttactgatcaccacgaatccctggataatgatgttgccagagagatccgctatctagatgaggtgctagaggccaactgctgtgattctgctgtggatggaacgtacaatggaacatcctccccagagcctggtgcagtggttctggtgggcggcctaagcccccctgtccacgaggcgacccagccagaacccactgaaagaacagctagccggcaggcacctcctcacatcgagctcagtaatagcagccctgaccccatggcagaggcagaaagaacaaatggccattcccccagccagcctagagatgcgctgggggacagcctgcaggtgcctgtcagccccagctccacaaccagctcacggtgttcttcccgagatggagagttcactctcaccacactgaaaaaggaggccaagtttgagctgcgtgccttccatgaggacaagaagccctccaagctctttgaggatgacgagcatgagaaagaacaatactgcattagaaaagtgaggccttcagaggagatgctggagctggaaaaggagaggagagagctcatccgcagccaggccgtcaagaagaatcctggcattgcagcaaaatggtggaatcccccgcaggaaaaaaccatcgaggagcagctggacgaggaacatctggagtcgcacaaaaagtacaaggagcgcaaagagagaagggcacagcaggaacagttgctgctgcagaagcagttacagcagcagcagcagcagcccccatcgcagctctgcacagcccctgcctcttctcatgaacgcgcaagcatgattgacaaagcaaaggaggacattgtcacagagcagatagatttctctgctgctcgcaaacaatttcagctgatggagaattccaggcaagcggtggccaagggccagagtacacccaggctgttctccatcaagcctttctacaggcctctggggtcagtcaactcagacaagccactgactaatccgagaccaccttctgtcgggggacctccagaagacagtggtgcctcagccgccaagggacagaaatcccccggtgccctggagaccccatcggcagcaggaagccagggcaacacagcctctcaggggaaggaagggccctacagcgagccttctaaacgtgggcccttatctaaactgtgggctgaggatggagaatttacgagcgcccgggctgtcctcactgtggtcaaggatgatgaccatgggattttggatcagttctcaagatctgtcaatgtctccttgacccaagaggagcttgactctggtctggacgaattgtcggtgaggtctcaggataccacagtcctggagaccctatccaatgatttcagcatggacaacatcagtgacagcggggcatccaatgagacaaccaatgccctccaggaaaattcactggctgatttttctctgccccagacaccacaaactgacaacccctcagagggccgaggagaaggcgtctccaagtcatttagtgatcatggtttctattccccttcctccacgctgggggactctccgttggttgatgaccccttggagtatcaggctggcctcctggtgcagaatgccattcaacaagccatagccgagcaggtggataaagctgtgtccaaaaccagcagggatggagcagagcaacagggacctgaagcgactgtagaggaagctgaagctgcggctttcggctcagaaaagcctcagagcatgtttgagccacctcaggtgtcttctcctgttcaagagaaaagggatgtattaccaaagattctgcctgctgaagacagggcgctcagggaaagggggcccccccagccactgccagctgtgcagcccagtggcccgattaacatggaggagaccaggcccgaaggaagctatttcagcaagtactcggaggcagctgagctgagaagcacagcctccctcctggccactcaagaatctgacgtgatggttgggcctttcaagctgaggtccaggaaacagcggactttgtccatgattgaggaagagatccgagcagctcaggaaagggaagaggagctgaagaggcagagacaagtcttgcagagtacgcagagccccaggacaaagaatgccccatcactgccctccagaacatgctacaaaactgctccagggaaaatagagaaagtcaaacctcctccatcccccaccactgaaggccccagcttgcagcctgacttagcccctgaagaggctgccggaacccagcggcccaagaatctgatgcagaccctcatggaagactatgagacacacaaatctaaaaggcgcgagagaatggatgatagtagtgtcctcgaggccacacgggttaatcgaagaaagagcgcactggctttgcgctgggaagcagggatctatgccaaccaggaggaagaagacaacgaataaacttccttcaacccaggaagcgtctttggtgcttgggagaccaagaaaccaagaaattaacaactgaaagcattttaatggactatttattaaagtgcaaacaaactcagcaatccttatgtagaccagaagctgcaatatacaatgatgaaaatgaaacgaaaaggaagtccccccatcagactctggacacccaggaatcaaaagagaaaggacttttttggtgactcaatcccagtgtctggtttggggccaatctacaatggatccaaaaggacaaaacatgttacaagcaaatcaacatagttgctgcaggcggaactgagaccagcctctctgggcgatgaaggacaatggtggtagggccacttagagagcagtagggcccaggctggtgcagcctacatggcacaggatatttccctgcaccagtttcccacctgtcacttgcagcatcagagggtgttgcattaactccattttctccagcagccataaaatgaatggcgtttctctccatatttgcccagaagaggcagttatgattccacttctcctacatttaattatttttaattgagaacaactcatgatcacaattcataaaatccatattttaagacaatagttcttcatgtcacaaacacaatctattctacatgaggaggctgagaaaggggaagagaaaaacaaaccaaatggatgatgttagctttaggatcgtgtctgcttataatattcactgatctgcagtttatgagaacacattttcacagttatgtttcttcataggaaaactatatttagtgggcaacaactatttttatgatgggatgggggagtatatacacgtatagaatctgtacgcgttgaacaacttggttcaagatggtgggggcatttttagagcggcaataattgaaaaaaaaggcgaactctgccttggagaggtagatgataagaaataaaaaggtgtttataactattttgtattataaagtgggccttagagataggaagaagaatgatggattccttttggatcaatcagaaaggaaacacgaaagaaaagtcaggaaggtagagagagaaaaagggagggaaggagaaagaatgggaataaaataaggaggtaagagatactatttttgctgagcaaccagtgtgtttcaggatgatacaaagaaaaatatagaatagaaataagtgcaggcttggaatcagctacaaatcctaaagatggggtgtgtgtggatgtgtgtgtgtgtgtgtgtacaccattgtgtgtttgtaaaatgtgtatgttcatgagtaagggtgtgtgtgtgtgtgtattaaaattccagagtgaccgtggcacttgggtgtacaggtaattcctccagagctgtttgctggcttcaggagtggagtgagaatttcttttttatgaaaagggatataaaggcaccgagctgatgcagtatttgtaatattaagttgacctaacaaggtatttgcatgagtcacaattacaaagttttgagcggttttgtaatttgacatttaggagagtctcctatttattctcatactttacattcatgcttagtatactatagaggatgccagctttaatctttctgtcatttaaagcaatatgataagggtattcaataattgggtgccctaaatttctggatgagaaaattttcaattctggccatgagaaagaaaaaaaaataaacagccttctttttttttcctttgttttaaaactgtggttttttaaaaaagcaataattaactcagacctcactaaaaatcatttttgtttttatattgttatgtcataagctctattatgttattctaacaagtagcaatttcacaaaatttgtatgtagatgttaacgcacatttcctttgcttcttttattagactagtgttgactttggggggggacatttattcacaaatgagaagtaggcacaaagtaaaaaatggaaccatctactaacaaggatcctttaaaactgccaagggagctctaacttgaagccacatcctacagatggcagcccaaatagcacatgggcaattggcaccatctttatatggttgagtctcctgaatattttgaatgaattctcaacaaaatgtgctagccactggggacgcaaaacaagtaagatccctgttgcaagaaattcattttatagtgagggaggttggcatggagactaaaattctcaggaaaatgagatccgtgttagattagaagtcctgatgtgaaatgggaggactcaggaaggaggatcgtctttacctgaggatttctagccagaggtcccagatgcctgggctgagaacccagcgataagggggcgttcccaaagcagacacagggataagaacagaggaggcagcagcattgcacagccccaggcacagtggcagttaggatggctggagagtaggatagttctatgggttgcccaaaaaatgtgatgcgcttcatgttttctctgactcatggatctggtagagaccatagacatgatatagactaacttccccatttttcacaagaggaaaccatccttatgacttaccttaaagttttttgttctgttttgaaggaaaccatgtgcttcatgaaacctacagttgacaagagaatgtacagctaagagaaaagcttaagaggccacactattcgcggaatggctttagaggcagatgaagtggtctttgaccacagttgattgaaccagagcacttattgcttaaagaataacagagttctagagctgggggttcttgggccatgctccgtgtgtggataaggaaagaaatactgtttctgggactctcccacagtcacaaagctgttttcactgtggcccctacatctcttaacttttgctattactcctatgctgccttccggattactgctgtctatcttcttgctccactcactgaagatcctattataatcccatgaaaatgtaaattacagtttacttgggagagccagattttctctgtgctcttgagttttttattcattcaagaaaccttgggccaccgctttgtacatagcaccgtgctaggctctgggatcccaaatggacccttttaactttctgaagatgggaccgtcccctggaggaaagtcattcctgcctaatccatcgagagaaagaggcttacgaaaaactttgcctctgatgctcagccccacccccaaatagcacacaagcttgttaaccccacctcttacaaaatgtttagattctgtaggtgttaaaagcctttctggaagtattgcattctgccgtgtttataggtgttcactttcctccagagctgattaactactgacatgacttggctttctcatccagaaattatggaaacagggtctgtcagtggcaggaggccgtgctgtgttttacttggatgacacaatgcagtttacttgcctcttcatacccatgcatgctgctcaccctagacaatgacatataagccgtatatagatcaatgtccacatatatatacacacacacatatatatatataaagtgtaacaaggaacactaaaacagtgttgattcttgtctctgaagacaaataattaaaccttttttttcccaactaaagaatggatttaattaaactatgtattgaaaaaaaagtagcctaagtgttagagatggtgaatatattccattttagttaaagaacaaatttcctgaattttaagcattcagtgagctgccaattttgattttgtgttgctctttacccaaattattttttctttgtttttctttttttgggggaggaggggaaaaaagcagcaatactgtgtttggaaattatactctgtatctggttttcctgtgtatgttaaccacttaaatgttattatcctgctttggttttagagtgattgtgaggcattcaatgcaagtatacagttattttctcattaaaatccaatgtgtgttgagtttttataaa

SEQ ID NO: 2443 - protein, 948 aa, Homo sapiens
MRWPQPGAAARLPPESPGPPESPGPPEREAAAARRWTGAEPQDCAPGSGRPEKPPQLSEDDIWLKSEGDNYSATLLEPAASSLSPDHKNMEIEVSVAECKSVPGITSTPHPMDHPSAFYSPPHNGLLTDHHESLDNDVAREIRYLDEVLEANCCDSAVDGTYNGTSSPEPGAVVLVGGLSPPVHEATQPEPTERTASRQAPPHIELSNSSPDPMAEAERTNGHSPSQPRDALGDSLQVPVSPSSTTSSRCSSRDGEFTLTTLKKEAKFELRAFHEDKKPSKLFEDDEHEKEQYCIRKVRPSEEMLELEKERRELIRSQAVKKNPGIAAKWWNPPQEKTIEEQLDEEHLESHKKYKERKERRAQQEQLLLQKQLQQQQQQPPSQLCTAPASSHERASMIDKAKEDIVTEQIDFSAARKQFQLMENSRQAVAKGQSTPRLFSIKPFYRPLGSVNSDKPLTNPRPPSVGGPPEDSGASAAKGQKSPGALETPSAAGSQGNTASQGKEGPYSEPSKRGPLSKLWAEDGEFTSARAVLTVVKDDDHGILDQFSRSVNVSLTQEELDSGLDELSVRSQDTTVLETLSNDFSMDNISDSGASNETTNALQENSLADFSLPQTPQTDNPSEGRGEGVSKSFSDHGFYSPSSTLGDSPLVDDPLEYQAGLLVQNAIQQAIAEQVDKAVSKTSRDGAEQQGPEATVEEAEAAAFGSEKPQSMFEPPQVSSPVQEKRDVLPKILPAEDRALRERGPPQPLPAVQPSGPINMEETRPEGSYFSKYSEAAELRSTASLLATQESDVMVGPFKLRSRKQRTLSMIEEEIRAAQEREEELKRQRQVLQSTQSPRTKNAPSLPSRTCYKTAPGKIEKVKPPPSPTTEGPSLQPDLAPEEAAGTQRPKNLMQTLMEDYETHKSKRRERMDDSSVLEATRVNRRKSALALRWEAGIYANQEEEDNE

SEQ ID NO: 2444 - DNA, 2162 bp, Homo sapiens
tcccctccccaggtcctgccccacccagctgtgtttgcttttctcccggatccggatggaggggttgccctgcccgtgcccagccctgccccacttctggcagcttaggtctcacttaatggctgagggctccaggactcaggcccctgggaaagggcccccactcagcatccagttcctgcgagcccagtatgaaggcttgaagaggcagcagaggacccaggcccacctcctggtgcttccaaaaggaggaaacacacctgctcctgcagaatcgatggtcaatgctgtttggattaacaaggagagaagaagctcactgtccctggaagaggcagattctgaggtggaggggaggctggaggaggctgcccagggctgccttcaggcccccaagtctccatggcacacgcacctggagatgcattgtttggtccaaacctccccccaggacaccagtcatcaagtacatcataggggcaagcttgtgggatctgatcaaaggctccctcctgaaggagacacacacttgtttgaaaccaatcagatgactcagcaaggaaccggaatcccagaggctgcccagcttccatgccaggtgggcaatacccaaacaaaggcagtggaatctggcttaaaattcagcactcaatgtcctctttccataaagaacccacacaggtctggcaaaccagcttactatccatttccccagaggaaaacacccaggatctcccaagctgcccggaacctgggcttatatggctcagcgtgaagctttctattctgccagatgtcttgaccttgaggccacctatggccttatagaagaaccaaggaggcagagccacaacgaggtctctagctatgagcaagaactggactaacctaattataggaattgtgggagacgaacttcacaatggtaacatggttttacccttccaataagaagagacttcccaggccaaattgcccacagtttaggatgaagaggactgtctggtcagtgcagccccattctgacattactatgaggtcctggatatccattccttggggaggaccagtaagacatctgctccatccctggaactggataattttggaacataaaccagggacctagccaacagaatgccttagcaatgcccaggggtcaatgggcgtggcattcttgttttcaatgtcttctgatgatttctcatatattctggagaagacaagctctgagaattcagatgctttttctggtggctatgtctggggggccatctcacttagaagtcacaacactcattggcagtgatcacatcatttcaatttgggcttcccaaagtatggtcacccagggtatgaaggtgagatcaatgctacctaccattttgtgtctttaaggggtctttagaaagggctaatcatctgtcactgctcactgagacatgtacattccagcatcatcacagagttatctccttccttccttccttccttccttccttccttccttctgtctctccctccctccctcccttcctcccttctttccttctttctttcctctcttccttcttgccttctttcctgccttcctgcctatcttttctctctctctctctctgcaaattaagttcttattaaaaactgccaatcattgacgatatataatgatgagatcctgaacaaaagaggcaaagaaatgctcctacttgaaaaatacacattccctatagactgcctcctgtttagtccaacttagatcactcagatccttcctgggatcaaatatatttttaaacctaagacaaagcgaagcaggtgtcacttgggtgatagggaaaaaagcttgtatttcctggttaatgtttagcttttgtaatgctatttaaacacacctaaggtgcctttccctcatctcaggtgctttctctgtaaagtttcactcccacctttcttttctctgcatggccgtccagtcttgcccatctacatccagagctgttaactagtagtgtcattacctgtgaaaaacatgtagaagcttccttgaaccacccagaaatccactcaaatttggggattgtcattccttttgtgaataattaatacaattcagttgttttttaaatattctaataaaaaaggaaattttctcaaaaaaa

SEQ ID NO: 2445 - protein, 218 aa, Homo sapiens
MAEGSRTQAPGKGPPLSIQFLRAQYEGLKRQQRTQAHLLVLPKGGNTPAPAESMVNAVWINKERRSSLSLEEADSEVEGRLEEAAQGCLQAPKSPWHTHLEMHCLVQTSPQDTSHQVHHRGKLVGSDQRLPPEGDTHLFETNQMTQQGTGIPEAAQLPCQVGNTQTKAVESGLKFSTQCPLSIKNPHRSGKPAYYPFPQRKTPRISQAARNLGLYGSA

SEQ ID NO: 2446 - DNA, 508 bp, Homo sapiens
tttggtgctttggatccatttccatcggtccttacagccgctcgtcagactccagcagccaagatggtgaagcagatcgagagcaagactgcttttcaggaagccttggacgctgcaggtgataaacttgtagtagttgacttctcagccacgtggtgtgggccttgcaaaatgatcaagcctttctttcattccctctctgaaaagtattccaacgtgatattccttgaagtagatgtggatgactgtcaggatgttgcttcagagtgtgaagtcaaatgcatgccaacattccagttttttaagaagggacaaaaggtgggtgaattttctggagccaataaggaaaagcttgaagccaccattaatgaattagtctaatcatgttttctgaaaatataaccagccattggctatttaaaacttgtaatttttttaatttacaaaaatataaaatatgaagacataaacccagttgccatctgcgtgacaataaaacattaatgct

SEQ ID NO: 2447 - protein, 105 aa, Homo sapiens
MVKQIESKTAFQEALDAAGDKLVVVDFSATWCGPCKMIKPFFHSLSEKYSNVIFLEVDVDDCQDVASECEVKCMPTFQFFKKGQKVGEFSGANKEKLEATINELV

SEQ ID NO: 2448 - DNA, 480 bp, Homo sapiens
agaattcggcacgaggcctggtgtaatcatggtacagattattaaagacacgaatgaatttaaaacatttttgacagctgccggacacaaactcgcagtggttcaattttcttcgaaacggtgtggtccctgcaaaaggatgtttcctgttttccatgctatgtctgtgaaataccaaaatgtattttttgctaatgtggatgtgaacaattctccggagctggctgaaacttgtcacatcaaaacaatacccacatttcagatgttcaagaaaagccagaaggtaaccctattctcaagaatcaaaagaataatttgctgttatagaagtggattcatgagcaacctgtgtcttgcagatgatggaaatgagtaggatttaacttttcaatcaggaataaaattccttaaagcctcaacattttcgcagcacttgaatcaataaatgtttcacctttgtgcatttgtgaaaaaaaaaaa

SEQ ID NO: 2449 - protein, 115 aa, Homo sapiens
MVQIIKDTNEFKTFLTAAGHKLAVVQFSSKRCGPCKRMFPVFHAMSVKYQNVFFANVDVNNSPELAETCHIKTIPTFQMFKKSQKVTLFSRIKRIICCYRSGFMSNLCLADDGNE

SEQ ID NO: 2450 - DNA, 2752 bp, Homo sapiens
cgctaaggccgccctccgggtagccgccatgtcggtctccagcggcgtccagattctgacaaagccagagaccgtggaccggaggagaagtgcggaaacgaccaaagaggccgggcgaccactggagatggctgtgtccgagcccgaggccagcgccgcggaatggaagcaactggatcctgctcagagcaacctgtataatgatgtgatgctggagaactactgcaaccaagcctcaatggggtgtcaagctcccaaaccagacatgatctccaagttggaaaaaggagaagcaccatggttggggaaggggaaaagacccagtcaaggttgtccaagtaaaatagcaagacccaagcaaaaagaaactgatggaaaagtccagaaagatgatgaccagcttgaaaatatccagaaatctcaaaacaaactcctcagggaagttgcagtcaagaagaaaactcaagctaagaagaatggcagtgactgtggttcactggggaaaaaaaataatttgcataaaaaacatgttccttcaaagaaaaggcttcttaaatttgagtcatgtggaaaaattttgaaacagaatttagatttacctgatcactcaagaaactgtgtaaaaaggaaatctgatgcagctaaagaacacaagaagtcattcaaccatagcttatctgatacaaggaaaggcaaaaagcaaactggaaagaaacatgagaaattatccagccatagctcatctgataagtgtaacaaaactggcaaaaaacatgacaaattatgctgtcatagttcatcccatattaaacaggacaaaattcaaactggagagaaacatgagaaatcacccagccttagctcatctactaagcatgaaaaacctcaagcttgtgtgaaaccctatgaatgtaatcaatgtggaaaggttctcagccataaacaaggactcattgaccatcagagagttcatactggggagaaaccatatgaatgtaatgaatgtgggatagcctttagccaaaagtcacaccttgttgtacatcagagaactcacaccggagaaaaaccatatgaatgtattcagtgtggcaaagcccatggtcataaacatgcactcactgaccatctaagaattcatactggagaaaagccctatgaatgtgctgaatgtgggaaaaccttcagacacagctcaaaccttattcaacatgtgagatctcacacaggtgagaagccatatgaatgtaaggaatgtgggaagtcttttaggtataactcatctcttaccgaacatgtgagaacacatacaggtgaaataccatatgaatgcaatgaatgtggaaaagcctttaagtatagctcatcccttactaaacacatgagaattcatacaggtgagaaaccctttgaatgtaatgaatgtgggaaagctttcagcaagaagtcacacctcattatacatcaaagaactcatactaaggagaaaccttataaatgtaatgagtgtggaaaagcctttggacatagctcatctcttacttaccatatgagaactcatacaggtgaaagtccctttgaatgtaatcaatgtgggaaaggctttaaacaaattgaaggccttactcaacatcagagagttcatactggagagaaaccgtatgagtgtaatgaatgtgggaaagcctttagccaaaagtctcacctcattgtacatcagagaactcatactggggagaaaccttatgaatgtaacgaatgtgaaaaagcctttaatgcaaaatcacagcttgttatacatcagcgatcccacactggagaaaaaccctatgaatgtaatgaatgtgggaaaactttcaaacaaaatgcatccctaaccaaacatgtgaaaactcattcagaagataaatctcatgagtgaagttaatgtgggaaatttgttaactaaatttaaggttttgttgaaccttggaaatatgctgattttaaagagtgttagaaagcctttagcaagatgtcacaccttgttgtacatgagaaactttgaaaatggatcttcatatagaatcagtggatggaaacaagggtttaaacttgatacaaaaccttttataaaaaatattgttttaactactcaattattataaatgatctacatgttcagattgaaattgaaagctttaaaaattgtgaattatttgaatattcaaagcaatggagaaacaagttatatatgctgacagttcctgtgtttcttcttgttttgtacttaagcaccatatattagagttgaatttgcatatctgtttattgccttatgtaaatgagtgtggccatctgtataagcctctttgacattttcacccagctctttcttaatgtctgtgttggcttctgcatcagcagaaatctttttaaaagggttgttatatatgtaaaaaatgttaacaggaaaatgagagaaaataaagcagctgaggatacaaatgtgctggtagggagcgatattcaagatatattgtgaagtgtgaaaaagtaggttgctgaaccatgtatatagtatgttcccctttgtgtacaaaagggtatgtttgtttaacctctgtctcttatctctgtatgtgtatgtatctttgtatgcatatatacatgtatctgtatgtgaatagactttgaaaaaatacagaataaacttcatggtggttgccattgggcagaggagtataggactggggtctaggataggagcaag

SEQ ID NO: 2451 - protein, 630 aa, Homo sapiens
MSVSSGVQILTKPETVDRRRSAETTKEAGRPLEMAVSEPEASAAEWKQLDPAQSNLYNDVMLENYCNQASMGCQAPKPDMISKLEKGEAPWLGKGKRPSQGCPSKIARPKQKETDGKVQKDDDQLENIQKSQNKLLREVAVKKKTQAKKNGSDCGSLGKKNNLHKKHVPSKKRLLKFESCGKILKQNLDLPDHSRNCVKRKSDAAKEHKKSFNHSLSDTRKGKKQTGKKHEKLSSHSSSDKCNKTGKKHDKLCCHSSSHIKQDKIQTGEKHEKSPSLSSSTKHEKPQACVKPYECNQCGKVLSHKQGLIDHQRVHTGEKPYECNECGIAFSQKSHLVVHQRTHTGEKPYECIQCGKAHGHKHALTDHLRIHTGEKPYECAECGKTFRHSSNLIQHVRSHTGEKPYECKECGKSFRYNSSLTEHVRTHTGEIPYECNECGKAFKYSSSLTKHMRIHTGEKPFECNECGKAFSKKSHLIIHQRTHTKEKPYKCNECGKAFGHSSSLTYHMRTHTGESPFECNQCGKGFKQIEGLTQHQRVHTGEKPYECNECGKAFSQKSHLIVHQRTHTGEKPYECNECEKAFNAKSQLVIHQRSHTGEKPYECNECGKTFKQNASLTKHVKTHSEDKSHE

SEQ ID NO: 2452 - DNA, 5770 bp, Homo sapiens
atgtcagcgattccgggagagcccgcgagggggcgagcgaccaccgctcggccgcgagctcagcgcttccctcgccgcttcccaacggccagcagagggcgcgcgcctggcgctgagcccaaccgccgcctccaacgggactggaccagaccgggtgggaccggaccgcggtttgagtccaagcccagcggtgtttgcggcgggtccggggcctggaagcgcgggggcggcgccgagaacgaaactggaaaatggccttcattggaaaagccccagtcctcggggagcagatcccccatctctggcagtgcagtgtgcctgggagctgtctggaacattccgcaacggtcactcctctgccctgcattggccttgaccacatgacccagaggtgcagggagaagcctcccttggatgcttggagtgacttcagctgctgagagtgtctaaggagagccgggaacaccgcacgcttcctgcagatggcggggcagacctgtgtgcaagagtgcctgaaggggatctcccgtggcgctacctggtccagggaggtcacagagagctcctccaccctgagcacagggggtcccaccaaggacaaggacaagattcagcaccgtcgcacacagaacagctacctggagccacaggtcactttccaaaaagggagtttccaggccagaagccatccctgcagcattgtctttgtgctccaagagaagccctggcacacacttctgctcagatggaaccactgttccctcagtgtccttgtcagtaccagctggtgactttcctactcaaacccttccctcactctctgcctcattttctcaaggtgccgtgtttgcctgaaaggacattggcagccagcaggggcggcggctggtcctctagatgggcacgaatgccattggcaggcaatggggcagactccatggaaagatgcttctcttcctcaaggtatgcactcagcggggagacctcattgtcaagttcagagttacgctgcagactgcacagcacctcgcctgcttctagggcctgctccggtcagcccaggacccaccacagcaggaccccccatcctgtgctcacccggggcttgtccatggcactggaaactccttcctgttcctgatccccctctgggcgaggggtgggcagggacatgtggctcgtgccgaggtctaatactgtgttcccagcatggaagcaggtggggacacttcctgtggcatgcaggattccgtgtagaaagctgtgactgtcacccctcctccccactcagttttgttagtggacctttccctggcccttctctccttggccccctcttggcaggagagaggaggagaggatctcactttccccctgtaccagccacaccctcggtctgcggggttcccagcagctggccagggatgctccacacctggaggtcaagtaaccgtcccctcactctgggcatcggtgccctctctggggttggaacaggaaagaaagccaagacctgtatgtgggacttgagttgagactcaattctgtagagtcaggggtgaggaggagccaggcctcctgtgtgctctccataccccagagccgggtgcccagttccatgggtcctgatggacagaagggaagaacgggggggctgctgcaccgtgggtggtaatgcagtgggagccacctccagctgaatgcccagggactcctggggctgctggccccgggtcccagcagtgggtcctgtttcttctttactcttggaatgcaggatctgccacaccaaaacgtcccctccacatttggtgaaataggaagctccatggcatgtctccatctttcaaggtgactgagaggtttattttcataggagcctcagtggccttgtccgtacccacctctgcacgtggttgcagaaagtgaaggattgtcagggagcagggcagacatttggtttatctgtgtcattggtcaaagttttgtttttcctccagaagaaaaaggcttgtgaacatgccaccgtattcttcattccttcttttggaaatgtatgaagaacgggtggcattttggagttattggcctgtgaacagctggcccagaggaagggttagatgtgggtgggtgtggccgcctctgcccctccccagcgcaggtgtgcgtgggcagcccaggcaggcgctcaggaagggtgaggtggagccctgcacgctctgagcacaaagtcctgggatcccttaaacccaagcactgccttgacagcagccagcatggctgatagaagagacacagaagtccagctgatgccagacagagggcgtcactagagagccgtgctaggtgggggtcattcaagttgtcttggcgtatgcagacgttgcttctagagagtcagaagctctatatgcgtagtgttggagcagaatttcgggatagtgatggcaagcctcctcccaagccagctggggagtatggggagggggtggccggaggaacctggcatccccgggttaggaccacagaggtggctctgcctgcagctgggcctctgcctcatcctgactccccctgctttggccatggctcttcttgtccttcctcttctcagtgcaggaggaccctgaatcaaatgcctcatcctggtttgcattttaccctcggatgaagcttgtggcgaacccctggactctgtgtctcctgagtctctgcagacctcgggtcctggacccagagactcttctccctgggacaggaggcactggggtgggtggacaggggtggcctggggcacagtagctgacggggggacttcctagttttctgggcctttccaactctgagtgtgaccttcctattcttgatcacagcccccaacttcggagcctgctagagcctgcagaatgtggcttcatcctcttcctctgtgggaaaaggcggggcctggcagtcccgccaatcttgtatatttgctccccacctcggtggtgaatacattcttgggtggtgaataggttctctccttgccttcactctagaaaagtcccctgttttgtgatgtaggatgtggtcaatgactgactcgtccctttggaccatagacgcagctctgatttctggtgttcctgggctctgcacacagcaggagccactctgggctctgagaggtgcatcttctggctcactttcttcttgttggctcttctccctgcgtcttctgccactgccctgttctgggtgggaggctgtcacactgtggtggagggtcccctctcctgcctcccctctttgatccttttctgtgagggtctgctggggtcctgtgtgtcgtgcattgttgatagattcctgtcgtgcttgctgtcctccccattctaagggacctctgattgcctgtgagcagtttacagggtcctctcctggccccttcacccgaggaattcccgcaacgcatgagtttgtgaggggcggatcctgggaggatgtgacgtcaggtgagaagggagggcccgtcctagtccggtgggctcctctaacaaagtgcattagcctggggagttactgacgctcgaaatatgtcgtcaaagttctgaaggctgagaagtccgagatcaagatgcctgaggattcagtgcctggtgaggacccattccttagggcagtgcctctagctgtgtcctcatgtggccgaaggggacaagggaggttgctggagcctgtttgatgagagcactaccttccttcaggaggggattattcagaaagtctgtctggtttcagggcattcccaaaggccccacctgttcattctaccccattggtagaattcccattgggaattaggcttcaacatacaaatttgggagacactgacatttaggccatagcgcgtcaaaggcaaagtgaggctgagtgtggaaaccatcccagaatctggatgtggcccaggcagaaggaaactcaaagtgatggggtgaccgatggtccctggtctgtgcaggactcagcggtgcggatggccctgggcacggtggcagtggctgttggaggatgatagggaacatgttggtggggggagggtggagcccactatgagtggcaactccctgggggcacaggaaacaaagctagaggtggctcccctctcccctccctgcacacagtgtcacctctgtggtggccctgtcgtccgcctcagttcacaggtgttgctgtaacaactcctgaaattaccttcaaaaggaggctcgtgcaggtgcctgcaggagccaggaggccgaagtgcatcctgagtgtccggggacaggccagcctggcggggtccacggccccacagtcccaacgactgcctcagaaatgggcagagagcatgcctggttctagctggcaaggcccacatctcagagctgtggacagtcatgaagggtccgtgagcatggagagggggcaaaaatgacccatgaacctcaggccactgtgctgccatccagccaagtgcggtaccagcccttcgggcctcgagatcctctacccttctctgggccttgctgatttcctcctccagcccctctgtttgtgtacgcacatacacacatgcacgcacgcacacgcacacccagtgcaatttctctctgctccctgtactccccaaaattcaatgggttcctctttcctcctcagagatatagtcctgggccccatctcagcctgcagaggcctgaacgtttcccaggattgtcttctaattctcaggtccggctttaaaacaaaacctaaactaaaactaaaatgctttctgcaaagaataatacaccaacataaagtccgggtatcctaagcatgtggtgtgtatggtgtctgaaattgaatatgctgtgaaactgcctgtgtcgaaatgcagtgtttcccaagacctggaggctctctccagctgctgattgtgatcacctctcccgatcaccgctgagccctgcaggtcaccttctcctgacctattacaccactgattgcttatgctgggcacaattttatacccttgctgttgttcagtctaatcatccctataaccctatcggatcattcccatatgacagaggagaaaacctggggacacaggggctgtgtcctggccaaggccttgcttgcagcaaaaggcagagctggggtctagccaggagccccagcacagtcctgttcttcccccactaaactgagctgtgaaatagatcatggcagtttggaaaacgggctaactgtatgctgagggaggtggtgacggatacctacttcttttcatgggaaggtgaggtgtctccctgcccccctcaggtctagcctctctctgtagctcagaaccttgggaaagtgggaggctcagaggaggaaagagatttacttgcccaagggccgcagctgctaagtggcaggtaagggactgttattctcctgtccctttcacagaggacaggaggaaagtgaggacaggtggtgtacatgcatcttttctgcagcaggcccagatcagctttgcacatggtgctgacctcaaattcagccctagaggggcctgtctctgccctgagtgagtattgaagtgcaggcttcttcccctttgttctgtccatttccaaaaatgtgaacacacacctccaacatgtttctgtgtatattattgtgtgcatagatactaccattgtgaaatattatgcagattaataatgcactatgccattgaaaatttcaaaagaaatgtgtaatgaacatttaa

SEQ ID NO: 2453 - protein, 127 aa, Homo sapiens
MSAIPGEPARGRATTARPRAQRFPRRFPTASRGRAPGAEPNRRLQRDWTRPGGTGPRFESKPSGVCGGSGAWKRGGGAENETGKWPSLEKPQSSGSRSPISGSAVCLGAVWNIPQRSLLCPALALTT

SEQ ID NO: 2454 - DNA, 5768 bp, Homo sapiens
atgtcagcgattccgggagagcccgcgagggggcgagcgaccaccgctcggccgcgagctcagcgcttccctcgccgcttcccaacggccagcagagggcgcgcgcctggcgctgagcccaaccgccgcctccaacgggactggaccagaccgggtgggaccggaccgcggtttgagtccaagcccagcggtgtttgcggcgggtccggggcctggaagcgcgggggcggcgccgagaacgaaactggaaaatggccttcattggaaaagccccagtcctcggggagcagatcccccatctctggcagtgcagtgtgcctgggagctgtctggaacattccgcaacggtcactcctctgccctgcattggccttgaccacatgacccagaggtgcagggagaagcctcccttggatgcttggagtgacttcagctgctgagagtgtctaaggagagccgggaacaccgcacgcttcctgcagatggcggggcagacctgtgtgcaagagtgcctgaaggggatctcccgtggcgctacctggtccagggaggtcacagagagctcctccaccctgagcacagggggtcccaccaaggacaaggacaagattcagcaccgtcgcacacagaacagctacctggagccacaggtcactttccaaaaagggagtttccaggccagaagccatccctgcagcattgtctttgtgctccaagagaagccctggcacacacttctgctcagatggaaccactgttccctcagtgtccttgtcagtaccagctggtgactttcctactcaaacccttccctcactctctgcctcattttctcaaggtgccgtgtttgcctgaaaggacattggcagccagcaggggcggcggctggtcctctagatgggcacgaatgccattggcaggcaatggggcagactccatggaaagatgcttctcttcctcaaggtatgcactcagcggggagacctcattgtcaagttcagagttacgctgcagactgcacagcacctcgcctgcttctagggcctgctccggtcagcccaggacccaccacagcaggaccccccatcctgtgctcacccggggcttgtccatggcactggaaactccttcctgttcctgatccccctctgggcgaggggtgggcagggacatgtggctcgtgccgaggtctaatactgtgttcccagcatggaagcaggtggggacacttcctgtggcatgcaggattccgtgtagaaagctgtgactgtcacccctcctccccactcagttttgttagtggacctttccctggcccttctctccttggccccctcttggcaggagagaggaggagaggatctcactttccccctgtaccagccacaccctcggtctgcggggttcccagcagctggccagggatgctccacacctggaggtcaagtaaccgtcccctcactctgggcatcggtgccctctctggggttggaacaggaaagaaagccaagacctgtatgtgggacttgagttgagactcaattctgtagagtcaggggtgaggaggagccaggcctcctgtgtgctctccataccccagagccgggtgcccagttccatgggtcctgatggacagaagggaagaacgggggggctgctgcaccgtgggtggtaatgcagtgggagccacctccagctgaatgcccagggactcctggggctgctggccccgggtcccagcagtgggtcctgtttcttctttactcttggaatgcaggatctgccacaccaaaacgtcccctccacatttggtgaaataggaagctccatggcatgtctccatctttcaaggtgactgagaggtttattttcataggagcctcagtggccttgtccgtacccacctctgcacgtggttgcagaaagtgaaggattgtcagggagcagggcagacatttggtttatctgtgtcattggtcaaagttttgtttttcctccagaagaaaaaggcttgtgaacatgccaccgtattcttcattccttcttttggaaatgtatgaagaacgggtggcattttggagttattggcctgtgaacagctggcccagaggaagggttagatgtgggtgggtgtggccgcctctgcccctccccagcgcaggtgtgcgtgggcagcccaggcaggcgctcaggaagggtgaggtggagccctgcacgctctgagcacaaagtcctgggatcccttaaacccaagcactgccttgacagcagccagcatggctgatagaagagacacagaagtccagctgatgccagacagagggcgtcactagagagccgtgctaggtgggggtcattcaagttgtcttggcgtatgcagacgttgcttctagagagtcagaagctctatatgcgtagtgttggagcagaatttcgggatagtgatggcaagcctcctcccaagccagctggggagtatggggagggggtggccggaggaacctggcatccccgggttaggaccacagaggtggctctgcctgcagctgggcctctgcctcatcctgactccccctgctttggccatggctcttcttgtccttcctcttctcagtgcaggaggaccctgaatcaaatgcctcatcctggtttgcattttaccctcggatgaagcttgtggcgaacccctggactctgtgtctcctgagtctctgcagacctcgggtcctggacccagagactcttctccctgggacaggaggcactggggtgggtggacaggggtggcctggggcacagtagctgacggggggacttcctagttttctgggcctttccaactctgagtgtgaccttcctattcttgatcacagcccccaacttcggagcctgctagagcctgcagaatgtggcttcatcctcttcctctgtgggaaaaggcggggcctggcagtcccgccaatcttgtatatttgctccccacctcggtggtgaatacattcttgggtggtgaataggttctctccttgccttcactctagaaaagtcccctgttttgtgatgtaggatgtggtcaatgactgactcgtccctttggaccatagacgcagctctgatttctggtgttcctgggctctgcacacagcaggagccactctgggctctgagaggtgcatcttctggctcactttcttcttgttggctcttctccctgcgtcttctgccactgccctgttctgggtgggaggctgtcacactgtggtggagggtcccctctcctgcctcccctctttgatccttttctgtgagggtctgctggggtcctgtgtgtcgtgcattgttgatagattcctgtcgtgcttgctgtcctccccattctaagggacctctgattgcctgtgagcagtttacagggtcctctcctggccccttcacccgaggaattcccgcaacgcatgagtttgtgaggggcggatcctgggaggatgtgacgtcaggtgagaagggagggcccgtcctagtccggtgggctcctctaacaaagtgcattagcctggggagttactgacgctcgaaatatgtcgtcaaagttctgaaggctgagaagtccgagatcaagatgcctgaggattcagtgcctggtgaggacccattccttagggcagtgcctctagctgtgtcctcatgtggccgaaggggacaagggaggttgctggagcctgtttgatgagagcactaccttccttcaggaggggattattcagaaagtctgtctggtttcagggcattcccaaaggccccacctgttcattctaccccattggtagaattcccattgggaattaggcttcaacatacaaatttgggagacactgacatttaggccatagcgcgtcaaaggcaaagtgaggctgagtgtggaaaccatcccagaatctggatgtggcccaggcagaaggaaactcaaagtgatggggtgaccgatggtccctggtctgtgcaggactcagcggtgcggatggccctgggcacggtggcagtggctgttggaggatgatagggaacatgttggtggggggagggtggagcccactatgagtggcaactccctgggggcacaggaaacaaagctagaggtggctcccctctcccctccctgcacacagtgtcacctctgtggtggccctgtcgtccgcctcagttcacaggtgttgctgtaacaactcctgaaattaccttcaaaaggaggctcgtgcaggtgcctgcaggagccaggaggccgaagtgcatcctgagtgtccggggacaggccagcctggcggggtccacggccccacagtcccaacgactgcctcagaaatgggcagagagcatgcctggttctagctggcaaggcccacatctcagagctgtggacagtcatgaagggtccgtgagcatggagagggggcaaaaatgacccatgaacctcaggccactgtgctgccatccagccaagtgcggtaccagcccttcgggcctcgagatcctctacccttctctgggccttgctgatttcctcctccagcccctctgtttgtgtacgcacatacacacatgcacgcacgcacacgcacacccagtgcaatttctctctgctccctgtactccccaaaattcaatgggttcctctttcctcctcagagatatagtcctgggccccatctcagcctgcagaggcctgaacgtttcccaggattgtcttctaattctcaggtccggctttaaaacaaaacctaaactaaaactaaaatgctttctgcaaagaataatacaccaacataaagtccgggtatcctaagcatgtggtgtgtatggtgtctgaaattgaatatgctgtgaaactgcctgtgtcgaaatgcagtgtttcccaagacctggaggctctctccagctgctgattgtgatcacctctcccgatcaccgctgagccctgcaggtcaccttctcctgacctattacaccactgattgcttatgctgggcacaattttatacccttgctgttgttcagtctaatcatccctataaccctatcggatcattcccatatgacagaggagaaaacctggggacacaggggctgtgtcctggccaaggccttgcttgcagcaaaaggcagagctggggtctagccaggagccccagcacagtcctgttcttcccccactaaactgagctgtgaaatagatcatggcggtctggaaaacgagctaattccgtgccgatggaggtgttgatggatgtccaccactctccacttgggaggaggccttaacatccccctcaggtctagcttctctctgtgactgagtaccttgggaaagtgggctcagaggaggaaagggacttacttgcccaagggccacagctgccaagtggcaggtaagggaccgttattctcctgtccctttcacagaggacaggaggaaagtgaggacaggtggggtacatgagtttagcctcttttctgcagcaggcccagatcagctttgcacacggttggtgctgacctcaaatgcagccctagaggggcctatctctgccctgagtattgaggtgcaggcttcttcccctttgttctgtccatttccaaaaatgtgaacacacacctcctacatgtttatattattgtgtgcatagatactaccattgtaacattttttgcggattaaaaatgcactattgtattgaaaatttcaaaggaaatgtgtaataaaacatttaaaa

SEQ ID NO: 2455 - protein, 127 aa, Homo sapiens; identical to SEQ ID NO: 2453

SEQ ID NO: 2456 - DNA, 1698 bp, Homo sapiens
tcggcacaggagcgaggagacccgagagcagacgcgccctggcgcccgccctgcgcagtcaccatggcgatgcatttcatcttctcagatacagcggtgcttctgtttgatttctggagtgtccacagtcctgctggcatggccctttcggtgttggtgctcctgcttctggctgtactgtatgaaggcatcaaggttggcaaagccaagctgctcaaccaggtactggtgaacctgccaacctccatcagccagcagaccatcgcagagacagacggggactctgcaggctcagattcattccctgttggcagaacccaccacaggtggtacttgtgtcactttggccagtctctaatccatgtcatccaggtggtcatcggctacttcatcatgctggccgtaatgtcctacaacacctggattttccttggtgtggtcttgggctctgctgtgggctactacctagcttacccacttctcagcacagcttagatggtgaggaacgtgcaggcactgaggctggagggacatggagccccctcttccagacactatacttccaactgccctttcttctgatggctattcctccaccttattcccagcccctggaaactttgagctgaagccagcacttgctccctggagttcggaagccattgcagcaaccttccttctcagccagcctacgtagggcccaggcatggtcttgtgtcttaagacagctgctgtgaccaaagggagaatggagataacaggggtggcagggttactgagcccatgacaatgcttctctgtgactcaaaccaggaatttccaaagatttcaagccagggagaagggttcttggtgatgcagggcatggaacctggacaccctcagctctcctgctttgtgccttatctacaggagcatcgcccattggacttcctgacctcttctgtctttgagggacagagaccaagctagatcctttttctcacctttctgcctttggaacacatgaagatcatctcgtctatggatcatgttgacaaactaagttttttttatttttcccattgaactcctagttggcaattttgcacattcatacaaaaaaatttttaatgaaatgatttcattgattcatgatggatggcagaaactgctgagacctatttccctttcttggggagagaataagtgacagctgattaaaggcagagacacaggactgctttcaggctcctggtttattctctgattgactgagctccttccaccagaaggcactgcctgcaggaagaagatgatctgatggccgtgggtgtctgggaagctcttcgtggcctcaatgccctcctttatcctcatctttcttctatgcagaacaaaaagctgcatctaataatgttcaatacttaatattctctatttattacttactgcttactcgtaatgatctagtggggaaacatgattcattcacttaaaatactgattaagccatgggcaggtactgactgaagatgcaatccaaccaaagccattacattttttgagttagatgggactctctggatagttgaacctcttcactttataaaaaaggaaagagagaaaatcactgctgtatactaaatacctcacagattagatgaaaagatggttgtaagctttgggaattaaaaacaaatacattttagtaaatat

SEQ ID NO: 2457 - protein, 143 aa, Homo sapiens
MAMHFIFSDTAVLLFDFWSVHSPAGMALSVLVLLLLAVLYEGIKVGKAKLLNQVLVNLPTSISQQTIAETDGDSAGSDSFPVGRTHHRWYLCHFGQSLIHVIQVVIGYFIMLAVMSYNTWIFLGVVLGSAVGYYLAYPLLSTA

SEQ ID NO: 2458 - DNA, 4572 bp, Homo sapiens
atggccggttgcatacacggggaaactgaggcaccgagcaccccggcccaaggtcactctggctatgccactgcaggggccgggccgaagccccagtctttaaccctccagtcccgagctctttctccttccgcggagctgaggaaagcggcgaggaaggtccttgtcccgctgggaaaaggacggtacccatgcacagggagcccagtctactttcggtccagagaccgtgctggagttcgccctgccggaaagcagcacgccgccgcggcattttacgacgtcggcggtgacaggccctgggactctgggaatacccagcttcctccccgcaacccggtgaaagccaacgcaatgttcggtgcgggggacgaggacgacaccgatttcctctcgccgagcggcggtgccagattggcctcactttttggactggatcaggcagctgctggccatggaaatgaatttttccagtacacagccccaaaacagcctaagaaaggccagggaacggcagcaacaggaaatcaggcaacaccaaaaacagcaccagccaccatgagcactcccacaatactggtcgcaacagcagtccatgcatatcgatacacaaatggtcaatatgtaaagcagggcaaatttggtgctgcagttctggggaaccacacagccagagagtataggattcttctttatatcagtcaacaacagccagttacggttgctaggattcatgtgaactttgagctaatggttcggcccaataactatagcaccttttatgatgaccagagacagaactggtccatcatgtttgagtcggaaaaggctgctgtggagttcaataagcaggtgtgcattgctaagtgcaacagtacctcttccctggatgcagtgctctcccaggacctcattgtggcagacggccctgctgtagaagttggagattctttggaagtggcctataccggctggctctttcagaatcatgtgctgggccaggttttcgactccactgctaacaaagataagttgcttcgcttgaagttaggatcaggaaaagtcatcaagggctgggaggatggaatgctgggcatgaaaaaaggaggaaagcgattgcttattgtccctccagcctgtgctgttggctcagaaggggtaataggctggactcaagcaacggactcgatcctggtgttcgaggtggaggttaggcgggtgaagtttgccagagattctggctctgatggtcacagtgttagttcccgcgattctgcagctccgtctcccatccctggtgctgacaacctctctgctgatcctgttgtgtcaccacccacatcaatacctttcaaatcaggggagccagctcttcgtaccaaatctaactccctcagtgaacaacttgcaataaatacaagtcccgatgcagtcaaagccaagttgatctctcggatggctaaaatgggccagcccatgctgcccatccttccaccacagctggattccaatgattcagaaatcgaagatgtgaacactctgcaaggaggtgggcagcctgtggtgactccgtccgtccagccctctcttcatccggcccatccagcgttaccacagatgacctcacaggcacctcagccatctgttactgggctccaggcaccttctgctgccttaatgcaagtgtcatctctcgattcccactcagctgtatctggaaatgcccaatcctttcagccctatgcaggtatgcaagcctacgcttatccccaggcatctgccgtcacctcccagctgcagcccgttcggcctttgtacccagcaccgctctctcagcctccccatttccaaggatcaggtgatatggcttcatttctcatgactgaagcccggcaacataacactgaaattcgaatggcagtcagcaaagtggctgataaaatggatcatctcatgactaaggttgaagagttacagaaacatagtgctggcaattccatgcttattcctagcatgtcagttacaatggaaacaagcatgattatgagcaacatccagcgaatcattcaggaaaatgaaagattgaagcaagagatccttgaaaagagcaatcggatagaagaacagaatgacaagattagtgaactaattgaacgaaatcagaggtatgttgagcagagtaacctgatgatggagaagaggaacaactcacttcagacagccacagaaaacacacaggcaagagtattgcatgctgaacaagagaaggccaaggtgacagaggagttagcagcggccactgcacaggtctctcatctgcagctgaaaatgactgctcaccaaaaaaaggaaacagagctgcagatgcagctgacagaaagcctgaaggagacagatcttctcaggggccagctcaccaaagtgcaggcaaagctctcagagctccaagaaacctctgagcaagcacagtccaaattcaaaagtgaaaagcagaaccggaaacaactggaactcaaggtgacatccctggaggaggaactgactgaccttcgagttgagaaggagtccttggaaaagaacctctcagaaaggaaaaagaagtcagctcaagagcgttctcaggccgaggaggagatagatgaaattcgcaagtcataccaggaggaattggacaaacttcgacagctcttgaaaaagactcgagtgtccacagaccaagcagctgcagagcagctgtctttagtacaggctgagctacagacccagtgggaagcaaaatgtgaacatttgttggcctccgccaaggatgagcacctgcagcagtaccaggaggtgtgcgcacagagagatgcctaccagcagaagctggtacaacttcaggaaaagtgtttagccctccaggcccaaatcacagctctcaccaagcaaaatgaacagcacatcaaggaactagagaagaacaagtcccagatgtctggggttgaagctgctgcatctgacccctcagagaaggtcaagaagatcatgaaccaggtgttccagtccttacggagagagtttgagctggaggaatcttacaatggcaggaccattctgggaaccatcatgaatacgatcaagatggtgactcttcagctgttaaaccaacaggagcaagagaaggaagagagcagcagtgaagaagaagaagaaaaagcagaagagcggccacgaagaccttcccaggagcagtcagcctcagccagttctgggcagcctcaagcacccctgaatagggagaggccagagtcccccatggtgccctcagagcaggtggtcgaggaagctgtcccgttgcctcctcaggccctcaccacttcccaggatggacacagaaggaaaggggactcagaagctgaggcactctcagagataaaagatggttcccttccacccgaactgtcttgcatcccatcccacagagttctagggcccccgacttcaattccacctgagcccctaggccctgtatccatggactctgagtgtgaggagtcacttgctgccagcccaatggcagctaagcccgacaacccatcaggaaaggtctgtgtcagggaagtagcaccagatggcccactacaagaaagctccacaagactgtccctgacttcagaccccgaggagggggacccactggccttagggcctgaaagcccaggagagcctcagcctccacagctcaagaaagatgatgtcactagctccaccggtccccacaaggagctgtcaagcacagaggcaggttccacagttgcaggagcagccctcagacccagccatcattcccagcgttccagtctctctggggatgaagaggatgaactgtttaaaggggcaactctgaaagctctgaggcccaaagcacagcctgaggaggaggatgaagacgaggtgagcatgaagggacgcccgcccccaacgcccctttttggagatgatgatgatgacgatgacattgactggctgggatgaagacccaggaaactggtgcaaaggtttctctgcaacccttccctaagcatgattttgcacagccaaccctgggtctaggcgaaccacagggtgaggtcaaggtgagcattctgggaacaatatttgggctcagagggtgggttggccaccttctgagccccacccccgccagacctggtgaagaggatcataaccctgtcttcaagaacactgggatttcagcagcaagttggaagaaggactggtaggttcccctccaagccagtcacctgtaagagtcctgtcctctgccagactttttaatctcttcattaactctcagactgacctgggagccctcctctacctgaatccagtgctcaactgtgccccggcaacaagacctgggctgaggtctccctggtagaactaagggagattacaccatctaaatcccagtgcagtcaacagcctggcctatagtcctgggacatgtatcttcttctttgccttaaatctgatacaagaggtcaatgactttgaaaataaaactaaaataaatgtctataatgaaacttg

SEQ ID NO: 2459 - protein, 1337 aa, Homo sapiens
MAGCIHGETEAPSTPAQGHSGYATAGAGPKPQSLTLQSRALSPSAELRKAARKVLVPLGKGRYPCTGSPVYFRSRDRAGVRPAGKQHAAAAFYDVGGDRPWDSGNTQLPPRNPVKANAMFGAGDEDDTDFLSPSGGARLASLFGLDQAAAGHGNEFFQYTAPKQPKKGQGTAATGNQATPKTAPATMSTPTILVATAVHAYRYTNGQYVKQGKFGAAVLGNHTAREYRILLYISQQQPVTVARIHVNFELMVRPNNYSTFYDDQRQNWSIMFESEKAAVEFNKQVCIAKCNSTSSLDAVLSQDLIVADGPAVEVGDSLEVAYTGWLFQNHVLGQVFDSTANKDKLLRLKLGSGKVIKGWEDGMLGMKKGGKRLLIVPPACAVGSEGVIGWTQATDSILVFEVEVRRVKFARDSGSDGHSVSSRDSAAPSPIPGADNLSADPVVSPPTSIPFKSGEPALRTKSNSLSEQLAINTSPDAVKAKLISRMAKMGQPMLPILPPQLDSNDSEIEDVNTLQGGGQPVVTPSVQPSLHPAHPALPQMTSQAPQPSVTGLQAPSAALMQVSSLDSHSAVSGNAQSFQPYAGMQAYAYPQASAVTSQLQPVRPLYPAPLSQPPHFQGSGDMASFLMTEARQHNTEIRMAVSKVADKMDHLMTKVEELQKHSAGNSMLIPSMSVTMETSMIMSNIQRIIQENERLKQEILEKSNRIEEQNDKISELIERNQRYVEQSNLMMEKRNNSLQTATENTQARVLHAEQEKAKVTEELAAATAQVSHLQLKMTAHQKKETELQMQLTESLKETDLLRGQLTKVQAKLSELQETSEQAQSKFKSEKQNRKQLELKVTSLEEELTDLRVEKESLEKNLSERKKKSAQERSQAEEEIDEIRKSYQEELDKLRQLLKKTRVSTDQAAAEQLSLVQAELQTQWEAKCEHLLASAKDEHLQQYQEVCAQRDAYQQKLVQLQEKCLALQAQITALTKQNEQHIKELEKNKSQMSGVEAAASDPSEKVKKIMNQVFQSLRREFELEESYNGRTILGTIMNTIKMVTLQLLNQQEQEKEESSSEEEEEKAEERPRRPSQEQSASASSGQPQAPLNRERPESPMVPSEQVVEEAVPLPPQALTTSQDGHRRKGDSEAEALSEIKDGSLPPELSCIPSHRVLGPPTSIPPEPLGPVSMDSECEESLAASPMAAKPDNPSGKVCVREVAPDGPLQESSTRLSLTSDPEEGDPLALGPESPGEPQPPQLKKDDVTSSTGPHKELSSTEAGSTVAGAALRPSHHSQRSSLSGDEEDELFKGATLKALRPKAQPEEEDEDEVSMKGRPPPTPLFGDDDDDDDIDWLG

SEQ ID NO: 2460 - DNA, 4735 bp, Homo sapiens
agaagtggaggggccgttcgaagagtcgtgagggggtgacgggttaagattcggagagagaggtgctagtggctggacttgacctggaaggaatcttctgctgactctcaacttttcctggaaaaaatggatcattcccaccatatggggatgagctatatggactccaacagtaccatgcaaccttctcaccatcacccaaccacttcagcctcacactcccatggtggaggagacagcagcatgatgatgatgcctatgaccttctactttggctttaagaatgtggaactactgttttccggtttggtgatcaatacagctggagaaatggctggagcttttgtggcagtgtttttactagcaatgttctatgaaggactcaagatagcccgagagagcctgctgcgtaagtcacaagtcagcattcgctacaattccatgcctgtcccaggaccaaatggaaccatccttatggagacacacaaaactgttgggcaacagatgctgagctttcctcacctcctgcaaacagtgctgcacatcatccaggtggtcataagctacttcctcatgctcatcttcatgacctacaacgggtacctctgcattgcagtagcagcaggggccggtacaggatacttcctcttcagctggaagaaggcagtggtagtggatatcacagagcattgccattgacatcaaactctatggcgtggccttatcgattgcagtgggaagttgttgaagacttgaagacgtgattcctgctccaatcatcccttcttgctcctctttgtgcacgtacacacacacacacacacacacacacacacacccctgctcaacagaggtttagtttacagtctctgaactaaagtagtaacctcccaaattgttttttctaataagctgagattcccatttctcttaaggagaagccacccatgagatgtcttttccttctccatcatcttagagccaagttatatgttcttgtctaatccatgtagctttttgttcaatgacttgatcatctgcttcctttttgaatttttaacagatagtaagtaaatttggtggttttttcccctgggtcagtgatggaaaggggttaacttcagccaggattgatggcagctgagggaaattcttgcccaactaaacccagaactcaaacttaacattagaaaataaggtccagggccggacacagtggcccatgcctgtaatcccagcactttggggggccaaggcaggctggatcacctgaggacaggagttcgagaccagtctggccaacatggggaaaccccgtctctactaaaaatacaaaaattagccgggcatggtggtgggcgcctgtaatcccagctactcagaaggctgaggcaggagaatcacttgaacctaggaggcggaggttgcagtgagccaagatggcgccattgcactccagcctgggtgacaagagtgaaactccatctcaaaaaaaaagaaaagaaggtccagcttttggattcaatgagtgggaaatacattgtgcctttctctagatgtgatacgttataccaaaatctttgtagtgtgcagagcggtggtttgagactaaatacaggcttagaacttgcagagtgtgtattcttggatggctgatgcatcgacttgcattcccacttaacactctgattagcatgaacttgccaatcaaaaaatgacaatcaatttgagaaaatagaaatagatatttttaaataaaaccattcacagtttactttgtcttgataccttggtttgtcccagctgaagtgaagcaagagagtttgaattaatttttccattataatgttttcgcatgtctgcctctaaaactgtgattttcaagctttagcgtgcatcagaaccacctgtagggcttgttaaaacactaattgctgggcctcaacccaaaagcccccaaagtggcacttctgagttcctgctgatgttacaagggaccacacttttgagaatctgtgctttaagctaaggaaatattgcctggtgggttggctgcctggtattgggcatggaaatttgaattgctgattggtagatggtgtgtctggacctaactcacgtagtaaatactgctgatcaatacctaatcattccacatttattgagctccacctgtgtgtatgtgtacccaagcacacatgtgtgaagggctatagccaaagtatttttactagcctgtatgaaatcactagtccttatttttaaaggtctatggtttcttggaagtagtttgattgttgagagagacctttgatctgcagtgtaaatctaccagtcatgggccagaagggcaaaagcccagctttctctttggaaagactcaggctgtggtttgttgatggccaggttttcctcaggctccaacaactgtgcttataccaagcagatcctcatcctccatataatcatctttgttattcgtgggggtttaattacattacaagtggccaaaacccctgttctcagtgaagaaccacattggatttgtattctgttcagttgtagtctacactgcagtcttattcctggttcaaactacctctttaaattgatttgtcttgtgctggtctgttaaatcctgccctccttggtgctagatccagttgtgcctcagggcagaggaaacaaaacacagctatcctgttggcctgtgttgtggttttgaagtttgtactttctctgtgggtgccagttaaatattggagagcaaggaatgtggacttgtatggctttgaaccaagagagggttatgagcctactggattgaggttaaaatccaagaaccaacatttagagctttgtgcttttctctcattccatcactttgtaatgatgatacttaacatgagcagggtgaatgacaggtactgacgaagtccaacacaaaggtataatacagcctgttgtctaaagccaaggagtcataaaaccatgagaaataaataggaatcaatagttagtagtgacattggtgctctctagaaatctcagcatgagctgctatagaataccctcccagcaacaaaacctaatcagtaaggccagctagacccaatggctcatgcctgtaatcccaacactttgggaggccaaggtgggaggatggcttgtgtccagaagttcgagaccagcctggacaacatagtgagatcctatctctataaaaaatcaaaaattagccaggcatggtggtgcatacctatagtcctggctatttgggaggctgaggcaggaggattgctttagccctggaggtcgaggctgcagtaagccatgattgcgccactgcactcagcccgggtgacaaagcaagaccctgtctcagaaaaaaagaaaattcaaggccagttaagacagaatgctatgactttgaaattcacagaaagaaataacagtttagattaggtcttcaggtattcaggatagagataatctcctgaaaaacctgaatttcagagattcttagactggctgccaaaggatgaagctagtgaaggagaaaaagcttaaattccatcttgagctcttggattgtgataatacaatgatttcattaacttttcatttctgtatacctgttcatttggaatttaatgcttgacttctttgttcattttggatctaaacttctcttttcttccttccccattcacatctattagaagactgcaccaccatttctttggcccccttactctgttgtcctttcccttttctttcagtttttttaatcgcatgtctagtatattaagtctccatagccctcctgatgcagtagacagtgctatgctgtggatataataccaaccagaaattggcatttataaacctgttaagagactttaagcatgtttcaagaggcagttgccccactggaatttctataaggctggtacccttcccagagttacagaatcttgggtgctatctctagtctgtgagggaggaactcccagcatccccattgcccacaaatgggatcctcactgtatccactaggagattagaaattaaggtttcttcactacttctatggtagggttgtctgaaattccctttcaggctgtgggtactggtcttgggttctagtcataaggggttccttataaggagcaggcggaggggagtacactttcatgtgatttaattttgatcctgccctctccagctgctccttcaaaagaaacatcaaaagatagaaactctgggctgggcacagtggctcacacactttgggaggccaagcgggggtgcagatcacctgaggtcaggagtttgagaccagcctggccaatgtggtgaaaccccatctctactaaaaatacaaaaattagctgggcgtggtggtgcatgcctgtaatcccagctactcgggaggctgaggcaggagaatcgcttgaacccaggaggcggaggttgcagtgagccaagatggcgccattgcactccagcctgggcgacaagagcaaaactccgtctcaaaaaaaaaaaagatacaaagtctgcatttgatataatgccttaattactgggtctacaattaatgttgactgttttagattgtaagctcctggagagcagtattgctgtagtaggaatgttttaacagtgtcatatgaaaaagaacaaaataaatattttgattttgtgattctaaaaaaaaaaaaaaaaaaaa

SEQ ID NO: 2461 - protein, 190 aa, Homo sapiens
MDHSHHMGMSYMDSNSTMQPSHHHPTTSASHSHGGGDSSMMMMPMTFYFGFKNVELLFSGLVINTAGEMAGAFVAVFLLAMFYEGLKIARESLLRKSQVSIRYNSMPVPGPNGTILMETHKTVGQQMLSFPHLLQTVLHIIQVVISYFLMLIFMTYNGYLCIAVAAGAGTGYFLFSWKKAVVVDITEHCH

SEQ ID NO: 2462 - DNA, 885 bp, Homo sapiens
ggagcatgatggaagtcgtagtaggaaatggcgtcgtggcattgaggggcatccctcctagaacctccaggaaaagctcgcggaagacgaggttctgcggagagagaggctccaagcagtctgggaagtgtagtccagttggcttagcagtagtttcgttgggggggagccgaggttccgggaaggggctaggccggcttgaaaagagattatgactgtaccttttaactttgtagctggaacacaagaagtgtttgtttaatgaatgacgtacacatttaagatctgtttggacgcggaggataatcctgtgaattgctaatagttcactgggtttggcccttagtgttgacttcagtatgctgagacggaaaccaacacgcctagagctaaagcttgatgacattgaagagtttgagaacattcgaaaggacctggagacccgtaagaaacagaaggaagatgtggaagttgtaggaggcagtgatggagaaggagccattgggcttagcagtgatcccaagagccgggaacaaatgatcaatgatcggattggttataaaccccaacccaagcccaataatcgttcatctcaatttggaagtcttgaattttagagatggattatcttgcatgccagagcgctggaatggaataaaatgatggcagaagtacaaaccagatttagagaattgagtgcttgcagtcaagcagaatgtacctcctgcagagacaaatcttctgcatgagattactgatgcttcacttgcactctaagctggaatccaaactctggtttgtctcttgaaaatttgactctataaaactgatctgattttctgtttttaaaaataaatatatttttggaaaaaaaaaaaaaaaaaa

SEQ ID NO: 2463 - protein, 85 aa, Homo sapiens
MLRRKPTRLELKLDDIEEFENIRKDLETRKKQKEDVEVVGGSDGEGAIGLSSDPKSREQMINDRIGYKPQPKPNNRSSQFGSLEF

SEQ ID NO: 2464 - DNA, 2756 bp, Homo sapiens
gaaagggagtgttcgggtttcgctggggcctcgcggctccagagcccagcatggcttcctcgcgagcctcttccacgcaggcaaccaaaactaaagcacccgacgacttagttgctccggtcgtgaagaaaccacacatctattatggaagtttggaagagaaggagagggagcgtctggccaaaggagagtctgggattttggggaaagacggacttaaagcagggatcgaagctggaaatattaatataacctctggagaagtgtttgaaattgaagagcatatcagcgagcgacaggcagaagtattggctgagtttgagagaaggaagcgagcccggcagatcaatgtttccacagatgactcagaggtcaaagcttgccttagagccttgggggaacccatcacactttttggagagggtcctgctgaaagaagagaaaggttaagaaatatcctctcagttgtcggtactgatgccttgaaaaagaccaaaaaggatgatgagaagtctaaaaagtccaaagaagagtatcagcaaacctggtatcatgaaggaccaaatagcttgaaggtggcaagactatggattgctaattattcgttgcccagggcaatgaaacgcttggaagaggcccgactccataaggagattcctgagacaacaaggacctcccagatgcaagagctgcacaagtctctccggtctttgaataatttttgcagtcagattggggatgatcggcctatctcctactgtcactttagtcccaattccaagatgctggccacagcttgttggagtgggctttgcaagctctggtctgttcctgattgcaacctccttcacactcttcgagggcataacacaaatgtaggagcaattgtattccatcccaaatccactgtctccttggacccaaaagatgtcaacctggcctcttgtgcggctgatggctctgtgaagctttggagtctcgacagtgatgaaccagtggcagatattgaaggccatacagtgcgtgtggcgcgggtaatgtggcatccttcaggacgtttcctgggcaccacctgctatgaccgttcatggcgcttatgggatttggaggctcaagaggagatcctgcatcaggaaggccatagcatgggtgtgtatgacattgccttccatcaagatggctctttggctggcactgggggactggatgcatttggtcgagtttgggacctacgcacaggacgttgtatcatgttcttagaaggccacctgaaagaaatctatggaataaatttctcccccaatggctatcacattgcaaccggcagtggtgacaacacctgcaaagtgtgggacctccgacagcggcgttgcgtctacaccatccctgctcatcagaacttagtgactggtgtcaagtttgagcctatccatgggaacttcttgcttactggtgcctatgataacacagccaagatctggacgcacccaggctggtccccgctgaagactctggctggccacgaaggcaaagtgatgggcctagatatttcttccgatgggcagctcatagccacttgctcatatgacaggaccttcaagctgtggatggctgaatagatgacaatgggaaaaggacttgaacctcaagctctctctaaggagctgttttcctcaaacgagaagaattgaagtgtttagttctatcatgttttctgccaattaccatgcatagaccctcagtagaattggatttccatgtcagcccccactccaggaaggcagcccaatccctaggtgatggggaacccctctcacggttgaaaatttattacctttttacgccctgccacgaactgtgtagacattgtttttattaatcttttgtttggccgggcgtggtggctcacgcctgtaatcctagcactttgggaggccgaggtgggtagatcgcttgagctcaggagttcaagacgagcctgggcaacatggcaaatgccgtctctgcaaaaaaatactaaaattagctggtcgcggtggcttctgcctgtgattccggctacttgggaggctgaggtgggagggattgcttaagcctgggaggcagaggttgcagtgagccgagattgcgccattgcactctagcctgtgtgacagagcaagaccctgtctcaaaaaaaaaaaaaatttgttcgaatgccttatagccttcctcacagcacccaggattgtgactgactctgcatttttaattcttgaaacttggctttccataacatggtacatgcttcaggactacatatgacccagagagcaaggtggctgaactatagtctggaagccctcaggtaaagaggcacatctcaccactcattggttaaacaatgcatcatagcgagcacttttcctttccctggagaatgggatgtgaagcagtagaccgcagccacgccgatggttatacagtgaagaagacttcacctcttcctattgagtttgcttggaatgctgacagcatcaggcaactctgaactgaacatttgctttgtcagaaaatatctttttttttactttgaagtttggcaaccttcatgttaccccaaagcaaaaccattgtgtcaggagtcaaacaaatgtttagaaagcaaacatgacgtctctattgtacaacctcctttctcttggctgtttaaaggatgtacttcgtgtattaaagggtactttatgttgaagtaaaaaaaaaaaaaaaaaaaaaaa

SEQ ID NO: 2465 - protein, 522 aa, Homo sapiens
MASSRASSTQATKTKAPDDLVAPVVKKPHIYYGSLEEKERERLAKGESGILGKDGLKAGIEAGNINITSGEVFEIEEHISERQAEVLAEFERRKRARQINVSTDDSEVKACLRALGEPITLFGEGPAERRERLRNILSVVGTDALKKTKKDDEKSKKSKEEYQQTWYHEGPNSLKVARLWIANYSLPRAMKRLEEARLHKEIPETTRTSQMQELHKSLRSLNNFCSQIGDDRPISYCHFSPNSKMLATACWSGLCKLWSVPDCNLLHTLRGHNTNVGAIVFHPKSTVSLDPKDVNLASCAADGSVKLWSLDSDEPVADIEGHTVRVARVMWHPSGRFLGTTCYDRSWRLWDLEAQEEILHQEGHSMGVYDIAFHQDGSLAGTGGLDAFGRVWDLRTGRCIMFLEGHLKEIYGINFSPNGYHIATGSGDNTCKVWDLRQRRCVYTIPAHQNLVTGVKFEPIHGNFLLTGAYDNTAKIWTHPGWSPLKTLAGHEGKVMGLDISSDGQLIATCSYDRTFKLWMAE

SEQ ID NO: 2466 - DNA, 1265 bp, Homo sapiens
cgattcaggggagggagcaactggagcctcaggccctccagagtagtctgcctgaccaccctggagcccacagaagcccaggacgtctcccgcgaggcctccccgtgtgtggctgaggatggctgagcagcagggccgggagcttgaggctgagtgccccgtctgctggaaccccttcaacaacacgttccatacccccaaaatgctggattgctgccactccttctgcgtggaatgtctggcccacctcagccttgtgactccagcccggcgccgcctgctgtgcccactctgtcgccagcccacagtgctggcctcagggcagcctgtcactgacttgcccacggacactgccatgctcaccctgctccgcctggagccccaccatgtcatcctggaaggccatcagctgtgcctcaaggaccagcccaagagccgctacttcctgcgccagcctcgagtctacacgctggaccttggcccccagcctgggggccagactgggccgcccccagacacggcctctgccaccgtgtctacgcccatcctcatccccagccaccactctttgagggagtgtttccgcaaccctcagttccgcatctttgcctacctgatggccgtcatcctcagtgtcactctgttgctcatattctccatcttttggaccaagcagttcctttggggtgtggggtgagtgctgttcccagacaagaaaccaaacctttttcggttgctgctgggtatggtgactacggagcctcatttggtattgtcttcctttgtagtgttgtttattttacaatccagggattgttcaggccatgtgtttgcttctgggaacaatttaaaaaaaaaacaaaaaaacgaaaagcttgaaggactgggagatgtggagcgacctccgggtgtgagtgtggcgtcatggaagggcagagaagcggttctgaccacagagctccacagcaagttgtgccaaagggctgcacagtggtatccaggaacctgactagcccaaatagcaagttgcatttctcactggagctgcttcaaaatcagtgcatatttttttgagttgctcttttactatgggttgctaaaaaaaaaaaaaaaaaaattgggaagtgagcttcaattctgtgggtaaatgtgtgtttgtttctctttgaatgtcttgccactggttgcagtaaaagtgttctgtattcattaaaaaaaaaaaaaaaaaaaaaaaaaaaaaaaaaaaaaaaaaaaaaaaaaaaaaa

SEQ ID NO: 2467 - protein, 192 aa, Homo sapiens
MAEQQGRELEAECPVCWNPFNNTFHTPKMLDCCHSFCVECLAHLSLVTPARRRLLCPLCRQPTVLASGQPVTDLPTDTAMLTLLRLEPHHVILEGHQLCLKDQPKSRYFLRQPRVYTLDLGPQPGGQTGPPPDTASATVSTPILIPSHHSLRECFRNPQFRIFAYLMAVILSVTLLLIFSIFWTKQFLWGVG

SEQ ID NO: 2468 - DNA, 3105 bp, Homo sapiens
gtcccgcagtggctggagccctgggcgctgcaaagcgtgtcccgccgggtccccgagcgtcccgcgccctcgccccgccatgctcctgctgctggggctgtgcctggggctgtccctgtgtgtggggtcgcaggaagaggcgcagagctggggccactcttcggagcaggatggactcagggtcccgaggcaagtcagactgttgcagaggctgaaaaccaaacctttgatgacagaattctcagtgaagtctaccatcatttcccgttatgccttcactacggtttcctgcagaatgctgaacagagcttctgaagaccaggacattgagttccagatgcagattccagctgcagctttcatcaccaacttcactatgcttattggagacaaggtgtatcagggcgaaattacagagagagaaaagaagagtggtgatagggtaaaagagaaaaggaataaaaccacagaagaaaatggagagaaggggactgaaatattcagagcttctgcagtgattcccagcaaggacaaagccgcctttttcctgagttatgaggagcttctgcagaggcgcctgggcaagtacgagcacagcatcagcgtgcggccccagcagctgtccgggaggctgagcgtggacgtgaatatcctggagagcgcgggcatcgcatccctggaggtgctgccgcttcacaacagcaggcagaggggcagtgggcgcggggaagatgattctgggcctcccccatctactgtcattaaccaaaatgaaacatttgccaacataatttttaaacctactgtagtacaacaagccaggattgcccagaatggaattttgggagactttatcattagatatgacgtcaatagagaacagagcattggggacatccaggttctaaatggctattttgtgcactactttgctcctaaagaccttcctcctttacccaagaatgtggtattcgtgcttgacagcagtgcttctatggtgggaaccaaactccggcagaccaaggatgccctcttcacaattctccatgacctccgaccccaggaccgtttcagtatcattggattttccaaccggatcaaagtatggaaggaccacttgatatcagtcactccagacagcatcagggatgggaaagtgtacattcaccatatgtcacccactggaggcacagacatcaacggggccctgcagagggccatcaggctcctcaacaagtacgtggcccacagtggcattggagaccggagcgtgtccctcatcgtcttcctgacggatgggaagcccacggtcggggagacgcacaccctcaagatcctcaacaacacccgagaggccgcccgaggccaagtctgcatcttcaccattggcatcggcaacgacgtggacttcaggctgctggagaaactgtcgctggagaactgtggcctcacacggcgcgtgcacgaggaggaggacgcaggctcgcagctcatcgggttctacgatgaaatcaggaccccgctcctctctgacatccgcatcgattatccccccagctcagtggtgcaggccaccaagaccctgttccccaactacttcaacggctcggagatcatcattgcggggaagctggtggacaggaagctggatcacctgcacgtggaggtcaccgccagcaacagtaagaaattcatcatcctgaagacagatgtgcctgtgcggcctcagaaggcagggaaagatgtcacaggaagccccaggcctggaggcgatggagagggggacaccaaccacatcgagcgtctctggagctacctcaccacaaaggagctgctgagctcctggctgcaaagtgacgatgaaccggagaaggagcggctgcggcagcgggcccaggccctggctgtgagctaccgcttcctcactcccttcacctccatgaagctgagggggccggtcccacgcatggatggcctggaggaggcccacggcatgtcggctgccatgggacccgaaccggtggtgcagagcgtgcgaggagctggcacgcagccaggacctttgctcaagaagccataccagccaagaattaaaatctctaaaacatcagttcgtggcttcagaagggaagaacagattttttcaaatgtcatgaaatttccttttgccagcatcctggaactataataaaaattcagaggaaagaacaacctatgactgggttttgttctgctgtgtccagatcatcctctggaagtcttgattgttgcctttctgctgctgtgctgtacgtgcaagttcctaaagccagggacatcccggagatgagctgtggatatagagtccgcacagcctgcgggagacagaatgtaattccttccaacacacacacacaggctttatggaatgccagaaaagcttcctcttggatgctgcctggagtaatgactttttgaccctcccctcttttttggagcaagcactatctttccttgtaaagaaatttggacaatttgagtagaaatggtgtggtatgtgcacatagaaactctcagaaaactgtcagatgagctagacagttgtcctctatctccatgggtcccgcatcccaaggatcgaaccaacaacagatcaaaaatacgtgaaaaaggaattgcatctgtattgaatgtgtacggactttttttcttgtctttgttccttaaacaatgtagtgtaacaactatttacatcgcatctcctttgcattcattattataagtaaactagagatgatttaaagtgtatagaaaggctgcgtgcagtggctaatgtctgtaatcccagcactttgagaggccgaggcaggtggatcacctgaggtcaggagttcgagaccagcctggccaacgtggtgaaaccccatctctactaaaaatacaataattagctgggcatggtggtgcacgcctgtaatcccagctattcgggaggctgaggcaggagaatcgcttgaacccaggaggcagagattgcagtgaaccgagattgcaccattgcactccagcctgggtgacagagtgaacctccgtctcaaaaacaaaataaataaataagaataaatt

SEQ ID NO: 2469 - protein, 702 aa, Homo sapiens
MLLLLGLCLGLSLCVGSQEEAQSWGHSSEQDGLRVPRQVRLLQRLKTKPLMTEFSVKSTIISRYAFTTVSCRMLNRASEDQDIEFQMQIPAAAFITNFTMLIGDKVYQGEITEREKKSGDRVKEKRNKTTEENGEKGTEIFRASAVIPSKDKAAFFLSYEELLQRRLGKYEHSISVRPQQLSGRLSVDVNILESAGIASLEVLPLHNSRQRGSGRGEDDSGPPPSTVINQNETFANIIFKPTVVQQARIAQNGILGDFIIRYDVNREQSIGDIQVLNGYFVHYFAPKDLPPLPKNVVFVLDSSASMVGTKLRQTKDALFTILHDLRPQDRFSIIGFSNRIKVWKDHLISVTPDSIRDGKVYIHHMSPTGGTDINGALQRAIRLLNKYVAHSGIGDRSVSLIVFLTDGKPTVGETHTLKILNNTREAARGQVCIFTIGIGNDVDFRLLEKLSLENCGLTRRVHEEEDAGSQLIGFYDEIRTPLLSDIRIDYPPSSVVQATKTLFPNYFNGSEIIIAGKLVDRKLDHLHVEVTASNSKKFIILKTDVPVRPQKAGKDVTGSPRPGGDGEGDTNHIERLWSYLTTKELLSSWLQSDDEPEKERLRQRAQALAVSYRFLTPFTSMKLRGPVPRMDGLEEAHGMSAAMGPEPVVQSVRGAGTQPGPLLKKPYQPRIKISKTSVRGFRREEQIFSNVMKFPFASILEL

SEQ ID NO: 2470 - DNA, 6331 bp, Homo sapiens
gtcccgcagtggctggagccctgggcgctgcaaagcgtgtcccgccgggtccccgagcgtcccgcgccctcgccccgccatgctcctgctgctggggctgtgcctggggctgtccctgtgtgtggggtcgcaggaagaggcgcagagctggggccactcttcggagcaggatggactcagggtcccgaggcaagtcagactgttgcagaggctgaaaaccaaacctttgatgacagaattctcagtgaagtctaccatcatttcccgttatgccttcactacggtttcctgcagaatgctgaacagagcttctgaagaccaggacattgagttccagatgcagattccagctgcagctttcatcaccaacttcactatgcttattggagacaaggtgtatcagggcgaaattacagagagagaaaagaagagtggtgatagggtaaaagagaaaaggaataaaaccacagaagaaaatggagagaaggggactgaaatattcagagcttctgcagtgattcccagcaaggacaaagccgcctttttcctgagttatgaggagcttctgcagaggcgcctgggcaagtacgagcacagcatcagcgtgcggccccagcagctgtccgggaggctgagcgtggacgtgaatatcctggagagcgcgggcatcgcatccctggaggtgctgccgcttcacaacagcaggcagaggggcagtgggcgcggggaagatgattctgggcctcccccatctactgtcattaaccaaaatgaaacatttgccaacataatttttaaacctactgtagtacaacaagccaggattgcccagaatggaattttgggagactttatcattagatatgacgtcaatagagaacagagcattggggacatccaggttctaaatggctattttgtgcactactttgctcctaaagaccttcctcctttacccaagaatgtggtattcgtgcttgacagcagtgcttctatggtgggaaccaaactccggcagaccaaggatgccctcttcacaattctccatgacctccgaccccaggaccgtttcagtatcattggattttccaaccggatcaaagtatggaaggaccacttgatatcagtcactccagacagcatcagggatgggaaagtgtacattcaccatatgtcacccactggaggcacagacatcaacggggccctgcagagggccatcaggctcctcaacaagtacgtggcccacagtggcattggagaccggagcgtgtccctcatcgtcttcctgacggatgggaagcccacggtcggggagacgcacaccctcaagatcctcaacaacacccgagaggccgcccgaggccaagtctgcatcttcaccattggcatcggcaacgacgtggacttcaggctgctggagaaactgtcgctggagaactgtggcctcacacggcgcgtgcacgaggaggaggacgcaggctcgcagctcatcgggttctacgatgaaatcaggaccccgctcctctctgacatccgcatcgattatccccccagctcagtggtgcaggccaccaagaccctgttccccaactacttcaacggctcggagatcatcattgcggggaagctggtggacaggaagctggatcacctgcacgtggaggtcaccgccagcaacagtaagaaattcatcatcctgaagacagatgtgcctgtgcggcctcagaaggcagggaaagatgtcacaggaagccccaggcctggaggcgatggagagggggacaccaaccacatcgagcgtctctggagctacctcaccacaaaggagctgctgagctcctggctgcaaagtgacgatgaaccggagaaggagcggctgcggcagcgggcccaggccctggctgtgagctaccgcttcctcactcccttcacctccatgaagctgagggggccggtcccacgcatggatggcctggaggaggcccacggcatgtcggctgccatgggacccgaaccggtggtgcagagcgtgcgaggagctggcacgcagccaggacctttgctcaagaagccataccagccaagaattaaaatctctaaaacatcagtggatggtgatccccactttgttgtggatttccccctgagcagactcaccgtgtgcttcaacattgatgggcagcccggggacatcctcaggctggtctctgatcacagggactctggtgtcacagtgaacggagagttaattggggcacccgcccctccaaatggccacaagaaacagcgcacttacttgcgcactatcaccatcctcatcaacaagccagagagatcttatctcgagatcacaccgagcagagtcatcttggatggtggggacagactggtgctcccctgcaaccagagtgtggtggtggggagctgggggctggaggtgtccgtgtctgccaacgccaatgtcaccgtcaccatccagggctccatagcctttgtcatcctcatccacctctacaaaaagccggcgcccttccagcgacaccacctgggtttctacattgccaacagcgagggcctttccagcaactgccacggactgctgggtcagttcctgaatcaggatgccagactcacagaagaccctgcagggcccagccagaacctcactcaccctctgctccttcaggtgggagaggggcctgaggccgtcctaacagtgaaaggccaccaagtcccagtggtctggaagcaaaggaagatttacaacggggaagagcagatagactgctggtttgccaggaacaatgccgccaaactgattgacggggagtacaaggattacctggcatcccatccatttgacacagggatggacacttggccggggaatgtccagggagctctgaagctggcagccttaaagatgcaagtgcatgaaggacagtgatgtggggaggccgtggggcagctcttttcatggcttgtacacgcctcagctcctggcaattagctggactccatgacccacccctggtgcagcatagatccgacgtctgtctgggcgaagggtaggggtgggtaggggcgggaagcctgagtgcaaatgtcatttccctctactgcctcttcctgcctctccccaccctgcccacatccacagaggggagagaagggtcatagctaaatgcaacaaagtctgtatcttgtcccaacctgcttttctgttctgttagcatatcataaagtaagcctttctggtgaaggaaggttgctatgaaactttttttcttggtggaaatggacaagtttaggcactctgctttttgccttacactaatgcttagaaagctgtcttttcagtggtgttgcagcccccagatgtgtggccaacctctgctgcaaaggaatctcttgctgagtccaggccaccaatcaggcaaatagcccatacatttgatcgttgtaaaccatgaagtcttttcttgcaagacgtttttcttctgctgtggtatcttgcccttaaaaattagttttcattaaaaagaaatttgattgaaaatagaaacatctacagctcagatactgatctctttctagtgggctttgtaaaccacttgactttgctaatggctattctccaatttgttccaataagctaagggcttttcatacacaggacaactccatgtggttgattttactggcatgtcttggtgacgaagagttggccaagtgaatgatgcatcttttacttggagctctccagcctttgtcatagttcccagaccttttttccttgtggtcatccaggaggtgatcaattacatgtgcacagtgctaggacgggaggcagagccggctcagagcaggtccaccagcccacctatagcaggaagcgtgtcggtgcttaggaaatctaggacttccagcttccctcatgtcagatagaaaaaaagtcaggaaaccagctcgtggacaggggctttggttccaaaacttggacaaacctgatgccttaaggaaaaggttaagatgagagggggcttccagagtcaatgaacgtcacccttcagccgacggataccgggagcgcttgggcaaaacagcagagaaagaaagactgtggtcggggaagtggaatgcttcgatgcaggccagagttcaaggctctggggctggcctcacaagaggcttcttccacggggcttgacaccagagcagcccccgcgtgaaatgagaaggcatgcttagcactgggaggaaaagctgagttaagaaaattctttatcatgtttgccttccctggggaaacattcaggcagtaaaatgacatccacgtgttcctgtcggacgcagcggcttcgggaacaagttagcgctgggggactatctgggctcgtctctctctgcttcgtgaacccaccacaccagggcctgtctgctgtgctatttatttgccttccgtcttcccaacctcagctgcctgtattcatgccagaggtgcaaaggctgccagccagtgctgctgacagatgctttcagactgtagagctcagagaaagggagcggcagctagaggtagccagggagctggccaggctccccggggccttcctattatgtaaatcccagctggacagacagccctggagccaggtggccctgtcccctgtggagcacttggagcagtgatctgttgttccaggtgtaagtctcgacactgcagaaatgaggacgttattaggaaagaccagttcctactgcctgtgttgctactttaagagctgagaaaaacattccaatgagctatccatagctaacttgcttgctcagaaaaacataagtaacaaagttgagctttcatttttaaaaattatattttactttagaaaaatatcaccttttttcttcctcttctttacgtgtagatctttttttttttttcaaatggggtcagtacctgaaagcccgaaaccccataccaagcttatagttaggacctttgcatttgataaaaaaaaatatagtattttctgttgtccagaaaatcttcccagatagggaaactgaggcagagagtgccgtggagtggtttttgccaagtcatacaacatacttaatgcagggctacactgaacctccagaatcattttgtttgctttgaccctgtttcaccatctgggcaatcatttattttccttgagcatttataaaccagggcgagggttgttccaaaatgagtaattgaatgagatgaagaaatatgtcataattagaggagataaatctccttgttatcacaatagttaatgtgtcatgatcactgactaactgggaccttgaacaagtcagcatctctgcctttcaaaatgaaggaacattgttctctatcctcccctgaccccccacggccccatgctaggtgcaccatcttcctccatttgactttttaatgctttacaacttcaggctaaagggaggggatgttgggaggagaaaccatcacaagattccctcggtgccacagctgtgctgaggaggccggggactgggaatcggagtgggcacctctgtgtttctctagggagtaacattcaacatttaattgaatcgtgtatcctgataggtggattaggaacaggattcattcctttaactttaacttttggctaaacgacatgccttggattgagtgtatatgtcttccccaaattcatatgttgaagcttaaatcctgaatgtgatggttcttggaattgggacctttggaaggttattgggtcttgagggcagagccctcacgaatgggattaaggcccttataagaagagacatggggccaggtgcagtggctcacacctgtaatcccaacattttgggaggccgagaagggtggatcatgaggtcaggagatggagaccatcctggccaacatggtgaaacctcgtctctactaaaaatacaaaaattagctgggcgtggtggtgcgtgcctgtagttccagctacttgggaggctgaggcaggagaatcgcttgaaccaggcagtcggaacttgtagtgagccaagatcacgccactgcactccagctggagtgacagagccaaactccgtcaaaaaaaaacaaaacaaaacaaaaaaaagacatgggagagatggtgtttttcctctccaccacctggggatacgatgagaagatggccacctgcaagccaggaagacggccctcaccagacaccatgtctgctggcaccttgatcttggacctcccagcctccagaactgtgagaaataaatgtgttttgtttaagctaaaaaaaaaaaaaaa

SEQ ID NO: 2471 - protein, 956 aa, Homo sapiens
MLLLLGLCLGLSLCVGSQEEAQSWGHSSEQDGLRVPRQVRLLQRLKTKPLMTEFSVKSTIISRYAFTTVSCRMLNRASEDQDIEFQMQIPAAAFITNFTMLIGDKVYQGEITEREKKSGDRVKEKRNKTTEENGEKGTEIFRASAVIPSKDKAAFFLSYEELLQRRLGKYEHSISVRPQQLSGRLSVDVNILESAGIASLEVLPLHNSRQRGSGRGEDDSGPPPSTVINQNETFANIIFKPTVVQQARIAQNGILGDFIIRYDVNREQSIGDIQVLNGYFVHYFAPKDLPPLPKNVVFVLDSSASMVGTKLRQTKDALFTILHDLRPQDRFSIIGFSNRIKVWKDHLISVTPDSIRDGKVYIHHMSPTGGTDINGALQRAIRLLNKYVAHSGIGDRSVSLIVFLTDGKPTVGETHTLKILNNTREAARGQVCIFTIGIGNDVDFRLLEKLSLENCGLTRRVHEEEDAGSQLIGFYDEIRTPLLSDIRIDYPPSSVVQATKTLFPNYFNGSEIIIAGKLVDRKLDHLHVEVTASNSKKFIILKTDVPVRPQKAGKDVTGSPRPGGDGEGDTNHIERLWSYLTTKELLSSWLQSDDEPEKERLRQRAQALAVSYRFLTPFTSMKLRGPVPRMDGLEEAHGMSAAMGPEPVVQSVRGAGTQPGPLLKKPYQPRIKISKTSVDGDPHFVVDFPLSRLTVCFNIDGQPGDILRLVSDHRDSGVTVNGELIGAPAPPNGHKKQRTYLRTITILINKPERSYLEITPSRVILDGGDRLVLPCNQSVVVGSWGLEVSVSANANVTVTIQGSIAFVILIHLYKKPAPFQRHHLGFYIANSEGLSSNCHGLLGQFLNQDARLTEDPAGPSQNLTHPLLLQVGEGPEAVLTVKGHQVPVVWKQRKIYNGEEQIDCWFARNNAAKLIDGEYKDYLASHPFDTGMDTWPGNVQGALKLAALKMQVHEGQ

SEQ ID NO: 2472 - DNA, 5671 bp, Homo sapiens
gacgtgttcgctttgcgtttgccttctgcgtgattgtaagtttcccgaggcttccccagccatgcggaactatgattctgggcctcccccatctactgtcattaaccaaaatgaaacatttgccaacataatttttaaacctactgtagtacaacaagccaggattgcccagaatggaattttgggagactttatcattagatatgacgtcaatagagaacagagcattggggacatccaggttctaaatggctattttgtgcactactttgctcctaaagaccttcctcctttacccaagaatgtggtattcgtgcttgacagcagtgcttctatggtgggaaccaaactccggcagaccaaggatgccctcttcacaattctccatgacctccgaccccaggaccgtttcagtatcattggattttccaaccggatcaaagtatggaaggaccacttgatatcagtcactccagacagcatcagggatgggaaagtgtacattcaccatatgtcacccactggaggcacagacatcaacggggccctgcagagggccatcaggctcctcaacaagtacgtggcccacagtggcattggagaccggagcgtgtccctcatcgtcttcctgacggatgggaagcccacggtcggggagacgcacaccctcaagatcctcaacaacacccgagaggccgcccgaggccaagtctgcatcttcaccattggcatcggcaacgacgtggacttcaggctgctggagaaactgtcgctggagaactgtggcctcacacggcgcgtgcacgaggaggaggacgcaggctcgcagctcatcgggttctacgatgaaatcaggaccccgctcctctctgacatccgcatcgattatccccccagctcagtggtgcaggccaccaagaccctgttccccaactacttcaacggctcggagatcatcattgcggggaagctggtggacaggaagctggatcacctgcacgtggaggtcaccgccagcaacagtaagaaattcatcatcctgaagacagatgtgcctgtgcggcctcagaaggcagggaaagatgtcacaggaagccccaggcctggaggcgatggagagggggacaccaaccacatcgagcgtctctggagctacctcaccacaaaggagctgctgagctcctggctgcaaagtgacgatgaaccggagaaggagcggctgcggcagcgggcccaggccctggctgtgagctaccgcttcctcactcccttcacctccatgaagctgagggggccggtcccacgcatggatggcctggaggaggcccacggcatgtcggctgccatgggacccgaaccggtggtgcagagcgtgcgaggagctggcacgcagccaggacctttgctcaagaagccataccagccaagaattaaaatctctaaaacatcagtggatggtgatccccactttgttgtggatttccccctgagcagactcaccgtgtgcttcaacattgatgggcagcccggggacatcctcaggctggtctctgatcacagggactctggtgtcacagtgaacggagagttaattggggcacccgcccctccaaatggccacaagaaacagcgcacttacttgcgcactatcaccatcctcatcaacaagccagagagatcttatctcgagatcacaccgagcagagtcatcttggatggtggggacagactggtgctcccctgcaaccagagtgtggtggtggggagctgggggctggaggtgtccgtgtctgccaacgccaatgtcaccgtcaccatccagggctccatagcctttgtcatcctcatccacctctacaaaaagccggcgcccttccagcgacaccacctgggtttctacattgccaacagcgagggcctttccagcaactgccacggactgctgggtcagttcctgaatcaggatgccagactcacagaagaccctgcagggcccagccagaacctcactcaccctctgctccttcaggtgggagaggggcctgaggccgtcctaacagtgaaaggccaccaagtcccagtggtctggaagcaaaggaagatttacaacggggaagagcagatagactgctggtttgccaggaacaatgccgccaaactgattgacggggagtacaaggattacctggcatcccatccatttgacacagggatggacacttggccggggaatgtccagggagctctgaagctggcagccttaaagatgcaagtgcatgaaggacagtgatgtggggaggccgtggggcagctcttttcatggcttgtacacgcctcagctcctggcaattagctggactccatgacccacccctggtgcagcatagatccgacgtctgtctgggcgaagggtaggggtgggtaggggcgggaagcctgagtgcaaatgtcatttccctctactgcctcttcctgcctctccccaccctgcccacatccacagaggggagagaagggtcatagctaaatgcaacaaagtctgtatcttgtcccaacctgcttttctgttctgttagcatatcataaagtaagcctttctggtgaaggaaggttgctatgaaactttttttcttggtggaaatggacaagtttaggcactctgctttttgccttacactaatgcttagaaagctgtcttttcagtggtgttgcagcccccagatgtgtggccaacctctgctgcaaaggaatctcttgctgagtccaggccaccaatcaggcaaatagcccatacatttgatcgttgtaaaccatgaagtcttttcttgcaagacgtttttcttctgctgtggtatcttgcccttaaaaattagttttcattaaaaagaaatttgattgaaaatagaaacatctacagctcagatactgatctctttctagtgggctttgtaaaccacttgactttgctaatggctattctccaatttgttccaataagctaagggcttttcatacacaggacaactccatgtggttgattttactggcatgtcttggtgacgaagagttggccaagtgaatgatgcatcttttacttggagctctccagcctttgtcatagttcccagaccttttttccttgtggtcatccaggaggtgatcaattacatgtgcacagtgctaggacgggaggcagagccggctcagagcaggtccaccagcccacctatagcaggaagcgtgtcggtgcttaggaaatctaggacttccagcttccctcatgtcagatagaaaaaaagtcaggaaaccagctcgtggacaggggctttggttccaaaacttggacaaacctgatgccttaaggaaaaggttaagatgagagggggcttccagagtcaatgaacgtcacccttcagccgacggataccgggagcgcttgggcaaaacagcagagaaagaaagactgtggtcggggaagtggaatgcttcgatgcaggccagagttcaaggctctggggctggcctcacaagaggcttcttccacggggcttgacaccagagcagcccccgcgtgaaatgagaaggcatgcttagcactgggaggaaaagctgagttaagaaaattctttatcatgtttgccttccctggggaaacattcaggcagtaaaatgacatccacgtgttcctgtcggacgcagcggcttcgggaacaagttagcgctgggggactatctgggctcgtctctctctgcttcgtgaacccaccacaccagggcctgtctgctgtgctatttatttgccttccgtcttcccaacctcagctgcctgtattcatgccagaggtgcaaaggctgccagccagtgctgctgacagatgctttcagactgtagagctcagagaaagggagcggcagctagaggtagccagggagctggccaggctccccggggccttcctattatgtaaatcccagctggacagacagccctggagccaggtggccctgtcccctgtggagcacttggagcagtgatctgttgttccaggtgtaagtctcgacactgcagaaatgaggacgttattaggaaagaccagttcctactgcctgtgttgctactttaagagctgagaaaaacattccaatgagctatccatagctaacttgcttgctcagaaaaacataagtaacaaagttgagctttcatttttaaaaattatattttactttagaaaaatatcaccttttttcttcctcttctttacgtgtagatctttttttttttttcaaatggggtcagtacctgaaagcccgaaaccccataccaagcttatagttaggacctttgcatttgataaaaaaaaatatagtattttctgttgtccagaaaatcttcccagatagggaaactgaggcagagagtgccgtggagtggtttttgccaagtcatacaacatacttaatgcagggctacactgaacctccagaatcattttgtttgctttgaccctgtttcaccatctgggcaatcatttattttccttgagcatttataaaccagggcgagggttgttccaaaatgagtaattgaatgagatgaagaaatatgtcataattagaggagataaatctccttgttatcacaatagttaatgtgtcatgatcactgactaactgggaccttgaacaagtcagcatctctgcctttcaaaatgaaggaacattgttctctatcctcccctgaccccccacggccccatgctaggtgcaccatcttcctccatttgactttttaatgctttacaacttcaggctaaagggaggggatgttgggaggagaaaccatcacaagattccctcggtgccacagctgtgctgaggaggccggggactgggaatcggagtgggcacctctgtgtttctctagggagtaacattcaacatttaattgaatcgtgtatcctgataggtggattaggaacaggattcattcctttaactttaacttttggctaaacgacatgccttggattgagtgtatatgtcttccccaaattcatatgttgaagcttaaatcctgaatgtgatggttcttggaattgggacctttggaaggttattgggtcttgagggcagagccctcacgaatgggattaaggcccttataagaagagacatggggccaggtgcagtggctcacacctgtaatcccaacattttgggaggccgagaagggtggatcatgaggtcaggagatggagaccatcctggccaacatggtgaaacctcgtctctactaaaaatacaaaaattagctgggcgtggtggtgcgtgcctgtagttccagctacttgggaggctgaggcaggagaatcgcttgaaccaggcagtcggaacttgtagtgagccaagatcacgccactgcactccagctggagtgacagagccaaactccgtcaaaaaaaaacaaaacaaaacaaaaaaaagacatgggagagatggtgtttttcctctccaccacctggggatacgatgagaagatggccacctgcaagccaggaagacggccctcaccagacaccatgtctgctggcaccttgatcttggacctcccagcctccagaactgtgagaaataaatgtgttttgtttaagctaaaaaaaaaaaaaaa

SEQ ID NO: 2473 - protein, 742 aa, Homo sapiens
MRNYDSGPPPSTVINQNETFANIIFKPTVVQQARIAQNGILGDFIIRYDVNREQSIGDIQVLNGYFVHYFAPKDLPPLPKNVVFVLDSSASMVGTKLRQTKDALFTILHDLRPQDRFSIIGFSNRIKVWKDHLISVTPDSIRDGKVYIHHMSPTGGTDINGALQRAIRLLNKYVAHSGIGDRSVSLIVFLTDGKPTVGETHTLKILNNTREAARGQVCIFTIGIGNDVDFRLLEKLSLENCGLTRRVHEEEDAGSQLIGFYDEIRTPLLSDIRIDYPPSSVVQATKTLFPNYFNGSEIIIAGKLVDRKLDHLHVEVTASNSKKFIILKTDVPVRPQKAGKDVTGSPRPGGDGEGDTNHIERLWSYLTTKELLSSWLQSDDEPEKERLRQRAQALAVSYRFLTPFTSMKLRGPVPRMDGLEEAHGMSAAMGPEPVVQSVRGAGTQPGPLLKKPYQPRIKISKTSVDGDPHFVVDFPLSRLTVCFNIDGQPGDILRLVSDHRDSGVTVNGELIGAPAPPNGHKKQRTYLRTITILINKPERSYLEITPSRVILDGGDRLVLPCNQSVVVGSWGLEVSVSANANVTVTIQGSIAFVILIHLYKKPAPFQRHHLGFYIANSEGLSSNCHGLLGQFLNQDARLTEDPAGPSQNLTHPLLLQVGEGPEAVLTVKGHQVPVVWKQRKIYNGEEQIDCWFARNNAAKLIDGEYKDYLASHPFDTGMDTWPGNVQGALKLAALKMQVHEGQ

SEQ ID NO: 2474 - DNA, 3198 bp, Homo sapiens
gtcccaattttgaacaaagttagagagttttttcttcttttttcttctttcttaaagcgaactgtactcctctgctgttcctttgaacttggttcagtaggaagaagtgatatcctccccagaccatctgctttggggagcttggcaaaactgtccagcaaaatgaaaagactcacgtgctttttcatctgcttctttctttctgaagtatcaggcttcgaaatccccataaatggactttctgaatttgtagactatgaagatcttgtggaactggccccaggcaaatttcaattggtggcagagaaccggagatatcagagaagccttccaggagaatcggaagaaatgatggaagaggttgatcaagtaactctttatagctataaagtccagtctactattacttctcggatggccaccaccatgatccagagcaaagtggtgaacaattccccgcagcctcagaatgtcgtgtttgatgttcagatccccaaaggagcattcatttccaacttctccatgactgtggacggcaagacatttaggagctctattaaggagaaaactgtgggccgagctctttatgcacaggccagagcaaaaggcaagacggctggcttggtgaggagcagcgctcttgatatggaaaacttcagaacggaagtaaatgtcctcccaggagcaaaggtgcagttcgaacttcactaccaggaggtgaagtggaggaagctgggctcctatgagcacaggatctatctgcaacctggacggctggccaaacacttagaggtagatgtgtgggttatcgaaccacagggactgagatttcttcatgttcccgacacatttgaaggccatttcgatggtgttccggtcatttctaaaggacaacagaaggcgcacgtctccttcaagcccacggtagcacagcagagaatatgccctaactgccgggagactgcggtagatggggaactggtggtgctgtatgacgtgaaaagagaagagaaggctggtgaactggaggtgtttaatggatattttgtccacttctttgctcctgacaacctggacccaattcccaaaaacatcctctttgtcatcgatgtgagtggctccatgtggggagttaaaatgaaacaaactgtggaagcaatgaagaccatattggatgacctcagagcagaagaccatttctctgtgattgatttcaaccagaacattcgaacttggagaaatgatttaatttcagctacaaaaacacaggttgcagatgccaagaggtatattgagaaaatccagcccagtggaggcacaaacatcaacgaagcactcctacgggcaatcttcattttgaatgaagccaataacttgggactgttagaccccaactccgtctcgctgatcattttggtttctgatggagatccaacagtgggcgaactaaaactgtcaaaaattcagaaaaacgttaaggagaacatccaagacaatatctccttgttcagtttgggcatgggatttgatgtggactatgattttttgaagagactgtccaatgaaaaccatggaattgcacaaaggatttatggaaaccaggacacgtcttcccagcttaagaaattctacaaccaggtctccactccattgctccggaatgttcagttcaactatccccatacatcagtcacggacgtcactcaaaacaatttccataactactttggaggctcagagattgtggtggcaggaaaatttgaccctgctaaattggatcaaatagagagcgttatcacggcgacttcggctaacacgcagttagtcttggagaccctggcccagatggacgacttgcaggattttctatcgaaagacaagcatgcagatcccgatttcaccaggaaactgtgggcctatctaaccatcaaccaactgctagctgaacgaagcctggctcctacagctgccgccaagagaagaattacaagatcgatcctgcagatgtctctagaccaccacattgtgactccgctgacctcgctggtgatcgagaacgaggctggggatgagcgcatgctggcggatgccccaccgcaggatccctcctgctgctcaggggccctgtattacggcagcaaagtggttccagattccaccccgtcttgggccaatccttcaccaacgcccgtgatctccatgctggcacaaggatctcaggtgctagagtccacgccacccccacatgtgatgagagttgaaaatgacccacatttcatcatttatctaccaaaaagccaaaagaacatttgtttcaatattgactcagaacctggaaaaatcctcaacctggtttctgacccagaatcaggaattgtagtcaacggtcagcttgttggtgccaagaagcccaacaatggaaaactaagcacctattttggaaaactgggattttatttccaaagtgaagacataaaaatagaaatcagcactgagaccatcaccctgagccatggttctagcacattctccttgtcctggtccgacacggctcaagtcacgaatcagagggtgcagatctcagtgaagaaagaaaaagtggtaactatcaccctggataaagagatgtccttttctgttttacttcatcgtgtttggaagaagcatcccgtcaatgttgactttctgggaatctacataccccctacaaacaagttctcacctaaagcccacggactaataggccagttcatgcaggaaccaaagatacacatcttcaatgagagaccaggaaaggaccctgagaagccagaggccagcatggaagtgaaggggcagaagctgatcatcaccaggggcttacagaaagactacagaacggatctagtgtttggaacggacgttacctgctggtttgtgcacaacagtggaaaaggattcattgacgggcattacaaggattacttcgtgcctcagctctacagctttctcaaacggccttaaaggtttatagtttgggaaattatatatattaatatacatctttcccctgtcacttttgcagatattcttcggtttgaataattaaaatgaaccagatatcagggtggttaattaaaatgaaccagatatcagggtggtttataaagcctgtaaacacacctaagaaaataaacattttacaaatgaaaaaaaaaa

SEQ ID NO: 2475 - protein, 946 aa, Homo sapiens
MKRLTCFFICFFLSEVSGFEIPINGLSEFVDYEDLVELAPGKFQLVAENRRYQRSLPGESEEMMEEVDQVTLYSYKVQSTITSRMATTMIQSKVVNNSPQPQNVVFDVQIPKGAFISNFSMTVDGKTFRSSIKEKTVGRALYAQARAKGKTAGLVRSSALDMENFRTEVNVLPGAKVQFELHYQEVKWRKLGSYEHRIYLQPGRLAKHLEVDVWVIEPQGLRFLHVPDTFEGHFDGVPVISKGQQKAHVSFKPTVAQQRICPNCRETAVDGELVVLYDVKREEKAGELEVFNGYFVHFFAPDNLDPIPKNILFVIDVSGSMWGVKMKQTVEAMKTILDDLRAEDHFSVIDFNQNIRTWRNDLISATKTQVADAKRYIEKIQPSGGTNINEALLRAIFILNEANNLGLLDPNSVSLIILVSDGDPTVGELKLSKIQKNVKENIQDNISLFSLGMGFDVDYDFLKRLSNENHGIAQRIYGNQDTSSQLKKFYNQVSTPLLRNVQFNYPHTSVTDVTQNNFHNYFGGSEIVVAGKFDPAKLDQIESVITATSANTQLVLETLAQMDDLQDFLSKDKHADPDFTRKLWAYLTINQLLAERSLAPTAAAKRRITRSILQMSLDHHIVTPLTSLVIENEAGDERMLADAPPQDPSCCSGALYYGSKVVPDSTPSWANPSPTPVISMLAQGSQVLESTPPPHVMRVENDPHFIIYLPKSQKNICFNIDSEPGKILNLVSDPESGIVVNGQLVGAKKPNNGKLSTYFGKLGFYFQSEDIKIEISTETITLSHGSSTFSLSWSDTAQVTNQRVQISVKKEKVVTITLDKEMSFSVLLHRVWKKHPVNVDFLGIYIPPTNKFSPKAHGLIGQFMQEPKIHIFNERPGKDPEKPEASMEVKGQKLIITRGLQKDYRTDLVFGTDVTCWFVHNSGKGFIDGHYKDYFVPQLYSFLKRP

SEQ ID NO: 2476 - DNA, 1906 bp, Homo sapiens
ggctggctgagtactggggtccagaaagtgatcgctgccgtggtcgccatggggaagtcggattttcttactcccaaggctatcgccaacaggatcaagtccaaggggctgcagaagctacgctggtattgccagatgtgccagaagcagtgccgggacgagaatggctttaagtgtcattgtatgtccgaatctcatcagagacaactattgctggcttcagaaaatcctcagcagtttatggattatttttcagaggaattccgaaatgactttctagaacttctcaggagacgctttggcactaaaagggtccacaacaacattgtctacaacgaatacatcagccaccgagagcacatccacatgaatgccactcagtgggaaactctgactgattttactaagtggctgggcagagaaggcttgtgcaaagtggacgagacaccaaaaggctggtatattcagtacatagacagggacccagaaactatccgccggcaactggaactggagaaaaagaaaaagcaggaccttgatgatgaagaaaaaactgccaaatttattgaagagcaagtgagaagaggcctggaagggaaggaacaggaggtccctacttttacggaattaagcagagaaaatgatgaagagaaagtcacgtttaatttgagtaaaggagcatgtagctcatccggagcaacatcttccaagtcaagtactctgggaccgagtgcactgaagacgataggaagttcagcatcagtgaaacgaaaagaatcttcccagagctcaactcagtctaaagaaaagaagaaaaagaaatctgcactggatgaaatcatggagattgaagaggaaaagaaaagaactgcccgaacagactactggctacagcctgaaattattgtgaaaattataaccaagaaactgggagagaaatatcataagaaaaaggctattgttaaggaagtaattgacaaatatacagctgttgtgaagatgattgattctggagacaagctgaaacttgaccagactcatttagagacagtaattccagcaccaggaaaaagaattctagttttaaatggaggctacagaggaaatgaaggtaccctagaatccatcaatgagaagactttttcagctactatcgtcattgaaactggccctttaaaaggacgcagagttgaaggaattcaatatgaagacatttctaaacttgcctgagtttgaaaatttgttaacaatacattaaaatcttaaagcatcaaattggtgttcgccaaggcattatgagactctactgtgttagggtatattcttttgtataaaacaaacaggtttttgaaaatattactgtatagttgttcagctaaactttgagaagaatttaattatgtctcatgaggtatcaaactatgtaattttgtccttgttatttttgtttcctttgtaatttacttgatgagtttatatcttcattaaagaatgttattataaagtgttttatctatgacaatttagaatcatgtaattggaggaaatccttcatacactctatattttcagtagtagagtagtaaagttgaactctaagtgtgactaaattttaaatgtcaaactataaatatagaagcagctttattgtggtaataattcatataccatacagttcactcatttaaaatatacatacaattcagtggtttttagtatttttgcagaattgtgcagccatcaccactgtctgattttaaaacactttcataccccaaaatgaaaccctttaatagtcaatcgctatttttcccctctgccctagccctagacagccactaatgtactttctgtctctatggatttgccctttctggacatttcttataaatggaatcatataata

SEQ ID NO: 2477 - protein, 393 aa, Homo sapiens
MGKSDFLTPKAIANRIKSKGLQKLRWYCQMCQKQCRDENGFKCHCMSESHQRQLLLASENPQQFMDYFSEEFRNDFLELLRRRFGTKRVHNNIVYNEYISHREHIHMNATQWETLTDFTKWLGREGLCKVDETPKGWYIQYIDRDPETIRRQLELEKKKKQDLDDEEKTAKFIEEQVRRGLEGKEQEVPTFTELSRENDEEKVTFNLSKGACSSSGATSSKSSTLGPSALKTIGSSASVKRKESSQSSTQSKEKKKKKSALDEIMEIEEEKKRTARTDYWLQPEIIVKIITKKLGEKYHKKKAIVKEVIDKYTAVVKMIDSGDKLKLDQTHLETVIPAPGKRILVLNGGYRGNEGTLESINEKTFSATIVIETGPLKGRRVEGIQYEDISKLA

SEQ ID NO: 2478 - DNA, 1162 bp, Homo sapiens
gggaggggcgcgctggggagcttcggcgcatgcgcgctgaggcctgcctgaccgaccttcagcagggctgtggctaccatgttctctcgcgcgggtgtcgctgggctgtcggcctggaccttgcagccgcaatggattcaagttcgaaatatggcaactttgaaagatatcaccaggagactaaagtccatcaaaaacatccagaaaattaccaagtctatgaaaatggtagcggcagcaaaatatgcccgagctgagagagagctgaaaccagctcgaatatatggattgggatctttagctctgtatgaaaaagctgatatcaaggggcctgaagacaagaagaaacacctccttattggtgtgtcctcagatcgaggactgtgtggtgctattcattcctccattgctaaacagatgaaaagcgaggttgctacactaacagcagctgggaaagaagttatgcttgttggaattggtgacaaaatcagaggcatactttataggactcattctgaccagtttctggtggcattcaaagaagtgggaagaaagccccccacttttggagatgcgtcagtcattgcccttgaattactaaattctggatatgaatttgatgaaggctccatcatctttaataaattcaggtctgtcatctcctataagacagaagaaaagcccatcttttcccttaataccgttgcaagtgctgacagcatgagtatctatgacgatattgatgctgacgtgctgcaaaattaccaagaatacaatctggccaacatcatctactactctctgaaggagtccaccactagtgagcagagtgccaggatgacagccatggacaatgccagcaagaatgcttctgagatgattgacaaattgacattgacattcaaccgtacccgccaagctgtcatcacaaaagagttgattgaaattatctctggtgctgcagctctggattaatgaaaatcaagttccatcctcagacaagaggtaaagaaggaaaattcagccagttgattttgtttttagcttactgctgcctttgtccgaagaaactgttcctccattatttgaattactgaagacagcaagatatttgtaaattatcttaaaataaacaacttaaaataaaaaaaaaaaaaaaaaa

SEQ ID NO: 2479 - protein, 298 aa, Homo sapiens
MFSRAGVAGLSAWTLQPQWIQVRNMATLKDITRRLKSIKNIQKITKSMKMVAAAKYARAERELKPARIYGLGSLALYEKADIKGPEDKKKHLLIGVSSDRGLCGAIHSSIAKQMKSEVATLTAAGKEVMLVGIGDKIRGILYRTHSDQFLVAFKEVGRKPPTFGDASVIALELLNSGYEFDEGSIIFNKFRSVISYKTEEKPIFSLNTVASADSMSIYDDIDADVLQNYQEYNLANIIYYSLKESTTSEQSARMTAMDNASKNASEMIDKLTLTFNRTRQAVITKELIEIISGAAALD

SEQ ID NO: 2480 - DNA, 1125 bp, Homo sapiens
gggaggggcgcgctggggagcttcggcgcatgcgcgctgaggcctgcctgaccgaccttcagcagggctgtggctaccatgttctctcgcgcgggtgtcgctgggctgtcggcctggaccttgcagccgcaatggattcaagttcgaaatatggcaactttgaaagatatcaccaggagactaaagtccatcaaaaacatccagaaaattaccaagtctatgaaaatggtagcggcagcaaaatatgcccgagctgagagagagctgaaaccagctcgaatatatggattgggatctttagctctgtatgaaaaagctgatatcaaggggcctgaagacaagaagaaacacctccttattggtgtgtcctcagatcgaggactgtgtggtgctattcattcctccattgctaaacagatgaaaagcgaggttgctacactaacagcagctgggaaagaagttatgcttgttggaattggtgacaaaatcagaggcatactttataggactcattctgaccagtttctggtggcattcaaagaagtgggaagaaagccccccacttttggagatgcgtcagtcattgcccttgaattactaaattctggatatgaatttgatgaaggctccatcatctttaataaattcaggtctgtcatctcctataagacagaagaaaagcccatcttttcccttaataccgttgcaagtgctgacagcatgagtatctatgacgatattgatgctgacgtgctgcaaaattaccaagaatacaatctggccaacatcatctactactctctgaaggagtccaccactagtgagcagagtgccaggatgacagccatggacaatgccagcaagaatgcttctgagatgattgacaaattgacattgacattcaaccgtacccgccaagctgtcatcacaaaagagttgattgaaattatctctggtgctgcagctctgtaaagaaggaaaattcagccagttgattttgtttttagcttactgctgcctttgtccgaagaaactgttcctccattatttgaattactgaagacagcaagatatttgtaaattatcttaaaataaacaacttaaaataaaaaaaaaaaaaaaaaa

SEQ ID NO: 2481 - protein, 297 aa, Homo sapiens
MFSRAGVAGLSAWTLQPQWIQVRNMATLKDITRRLKSIKNIQKITKSMKMVAAAKYARAERELKPARIYGLGSLALYEKADIKGPEDKKKHLLIGVSSDRGLCGAIHSSIAKQMKSEVATLTAAGKEVMLVGIGDKIRGILYRTHSDQFLVAFKEVGRKPPTFGDASVIALELLNSGYEFDEGSIIFNKFRSVISYKTEEKPIFSLNTVASADSMSIYDDIDADVLQNYQEYNLANIIYYSLKESTTSEQSARMTAMDNASKNASEMIDKLTLTFNRTRQAVITKELIEIISGAAAL

SEQ ID NO: 2482 - DNA, 7408 bp, Homo sapiens
atgaatgatggtgacacagtacaagaatacagtggccggctggaaagggctcccactggccaaatacgggacaatttaagcagcaagagaatcacgaagacatactgggatgttggcacaacccctacgctggttctttggcccatagttctgatggtacaaggacgagttcagcagccacagtctgaaaagggcctggaaaccaggggctcagacctgcacatgagggtctgcatcatgccaccaaataagctactgagaccagaagtgagagaaatgtttgaaattttccgaaataaaatcccctcccctatacacagaaaggcaaatgaagaggaacaaacacccagggtggcggcggtgagcgccccagcacctgccgccctgggcgcctcctccacctgcgcgccccacgcccgcttccggccggcttccaggcctcagaggcgatcccgaggaatcgttccgctcccaaggggcggagctttctcatcgccgcgctcggcattcggcttatgctgcctcgccccggcggccgtccagcgggaggcggagcgagtccaaaatggcggctctcaggctggcgcgctccgtgctgctggggctttgaggtggtcgccgggggtccgggggaccctttccccgccgcggaagccctagaggatgaatcggggaccctgctaaggtctggcggcggggctggagagcagtggcagcaagggctgcggtggcgtccacgcagcgggatgtgcgagagttactccaggtcgttgttgagggtctcggtggcgcagatctgccaggcgctgggctgggactcggtgcagctcagcgcctgccacctcctcacggacgtgctgcagcgctatctgcagcagctgggccggggctgccatcggtactctgagctctatggccgaacagacccaattttggatgatgttggtgaagctttccagctgatgggggttagtctacatgaactagaagactatattcacaacattgagcctgtcaccttcccacaccaaattccgtcatttcctgttagcaagaacaatgtacttcagtttcctcaacctggaagtaaagatgcagaggaaagaaaagaatacattcctgattacctgccacccattgtgtcttctcaagaagaagaagaagaagagcaggtgcccactgatggaggcacatcagcagaagccatgcaggttcccttggaagaagatgatgaattggaggaggaagaaattattaatgatgagaatttcctgggcaagagaccactggatagtcctgaagctgaagaactgccagccatgaagcggcctcggctattaagcactaaaggggacacgctagatgttgtgttattggaagctcgagagccactcagctcaataaatactcaaaagatcccaccaatgctttctccagtccatgtacaggacagtacagacttggcacctccctcacccgagccgccaatgttggctccagttgcaaaatcacaaatgccaactgcaaaaccattagaaacaaagtcatttacacctaaaacaaagactaaaactagctctccaggacagaagactaaatcacctaaaaccgcccagtcaccagcaatggtcggaagtcctattcgatcaccaaaaactgtatccaaagaaaagaaatcacctggacgttccaagagccccaagagtcccaagagccccaaggtcacgactcacattccccaaacacctgtgagacctgaaacgcccaacaggactccttcagctacactcagtgaaaaaatcagtaaagagactatccaggtaaaacaaatacagacaccccctgatgctgggaaactgaacagtgagaatcagccgaaaaaggctgtggtagcagataaaacgattgaggcctctatcgatgctgtgattgcacgagcctgtgctgagcgagagccagatcctttcgaattttcttctggatcggaatctgaaggagacatttttactagccctaagagaatttcaggcccggagtgtactactcccaaagcttccacttccgcgaacaatttcacaaagtcaggatccactcctctgcctctttccggtggaacctcaagttccgataactcatggacaatggatgcctccattgatgaggttgtacgtaaagcaaaactgggaacaccttcaaatatgccccccaactttccttatatctcttctccgtcagtgtctcctcccactcccgaacctctccacaaggtgtatgaggagaaaaccaagctgccttcctccgtggaggtaaagaagaagttgaaaaaggaactaaagactaaaatgaaaaagaaagaaaagcagagagatagggagagggaaaaagacaagaacaaggacaaaagtaaggagaaggataaagtgaaagagaaagagaaagacaaggaaactggcagggaaacaaagtatccctggaaggaatttcttaaagaggaagaggcagatccctacaagtttaaaatcaaagaatttgaagatgttgatcccaaagtgaaattgaaagatggacttgtgaggaaggagaaagagaagcataaagataagaagaaagatagagagaaaggcaagaaagataaagataagagagagaaagaaaaagtgaaagataaaggcagagaagataagatgaaagccccagcacccccactggtgttgcccccaaaagagttggccctgcccttgttcagccctgccacagcctccagggtcccagccatgctgccatctttgttgccagtgcttccggaaaaactgtttgaggagaaagagaaggtgaaggagaaagaaaagaaaaaggacaaaaaggagaagaagaaaaagaaggaaaaagagaaggagaagaaggagaaggaaagagagaaagagaagagagagcgagagaagagagaaaaagagaaggagaaacacaagcatgaaaaaataaaagtggaaccagtcgctctggccccgagtccagttatccccagattaactctccgagtcggtgctggccaagacaagattgtcatcagcaaggtggtccctgcccccgaggccaagccggcgccctcgcagaacaggccgaagaccccaccgccggcccccgcgcccgcccccggccccatgctcgtcagccctgcgcccgtgccgctgccgctgctcgcccaggccgccgcgggccctgccctgctgccctccccgggtcccgccgcctccggggccagtgccaaagcccccgtgcgcagcgtggtgactgagacggtcagcacctacgtgatccgagatgagtggggcaatcagatctggatctgccctgggtgtaacaagcctgacgatgggagtcccatgattgggtgtgacgactgcgatgactggtaccactggccctgtgttggaatcatgactgcacccccagaagagatgcagtggttctgccccaagtgtgcgaacaagaagaaggacaaaaagcacaagaagaggaagcatcgagcccactgacgactcccgaggggctggaccaagcggggtcagcccgggcttcttccctggcgcctctggaagggagctggtgcaagtctgccgtcacatccacccccagatgcctgtggataaagaacccaggaggactgaggctggaacacaccgcgcacctggattgttcactcccgagccgccttggcctgtggctccgtggcagtgcgacagaaggaaactcaagcagaggcgtggcctgggggctgcccctcctccacttctctaataccagtgacaagtattattaataaagagcgtacatcttcccttttgatttcctttattctctccagggccttttcattgaggtattagatgagaagataatgtacaaactgcctcaactgtaatttaaggatgatagagtctgtatacagttttcagcccctttccctctatagtaagataatcagaataacataaaagaaaactccagttggagtaccggtaaatatttttgtgataagaatatatgaagcttccctccttcccccgtttttagtactaacatgtaaaatgttcaggcttttgtgaaataccttatattttttaagaaaaaggtttctatcatgtcctgtttgcttttgtgcaaattatttttgtttaatgtattttatatcttcgttgcattctaattttgcccttctttaaactgctggagtctcttctcactgcttgtacatttcatcaacttgtataaaaactcttcagactaaaagattgcccctaatgtaaataataaatatttatgaagtagttattttttaaatttttatcgtgtttaattctggctttctctgaaatccactgtgatttcagccaggtctgtaatgacgctggacagaaacaaggctagagaaaaagccatcgttcaaagaaatttcccttgagctcagcctgcgcagtgcccggaaacatggtggggaaagggcccgagcagttggaaggaaaacaaggcaatttaaatttagagtttatgacttgaagttgttttgtttgttgtctattttgtttttgtaaatttctttgacagacttttactaaaaggacatgtagtttccatgaaagtaaaaaaaaaaaacaacaaaaaacccacatatactgtagcattttgtctttatattgttttatttctacaaatctgttcattaatattgtgctttaaggctgaaatgaagtatattatgaatttttttaagaaaactcatcaaatttcagggtatcacaaaactttattatattattatactgcccactatttattatatgttatagatgtctgagaggtaaaccaaatattttatttttaatgttaaaaaaacatcaaatttaactttattagcatattttagcaactttgggataaatacggacttttacttgattttgaaataatcccagtgtaggcccatgtgctggatctgttggatgctagaatatgggctttgaacctaatacaaatatattactagaaaatgtgatttttttaaatgccaagtaaattgatattagtgtatgaattagtcatattttaaaacattatgtggttagagaaatgcggttttctgccatgaatgttaagttgcaaatcagtggaaatggagtcgacctcttcggagcacagggtgtcattgccctcgttgttcaagaggccagaatttttctatccccgctaagaaacaaagcatctatgttgagatatgtgtttttttgtttgattaatttgagatcattctaaatactttatacaatattttcacatgcacaaaaatgcgcgttagtggtttttggagaggggtgaggggtgggggaagtgcaaaataaagattattggctatttcatagtttgcttttccattttctttatttaggatttagttccttgaggcgtggtccatgatctgaagttgccacgtttaagtgagcaggtcacgctactgaaatcagaatggaggtgcctatatataactttccccccaatcttactgtctgagagacttcagcccatgctacatttaaggaatttcaatcagtttgttgtcccttgctatttcatggttgctttcctaaatccagttcatgattttataaatggtctttgcaataataaaaccaaagaatcattttcagggggctggagagctcgagggattagtaatggaatacagagcctttcacctctaggtcagtgagtcggatccagtccaggtcactagagaccaaaagttgtcaccatcttatgactgttcagtggcctgtgtgaaatgaactggtggtctcagtctctactgggtggctggctgtgacaccaaccaaaggaagttcaagaaactgcaaagagaaatgtggattagaaaataaaacatccacattacaaagaaaaagttagaaagttgggcgtagtcattctccagaaagtaataccgaagaaaaaagagcaacttacaaataccacagacaaacagagattaatttactttccttaatgaagtcaagcaaaaccggaaaagaaaagcctatattgggtgagaggggagagggttaagtggggaggatgatttgatcagaagaaaaagttcagggacccaaacatcagggaaaaatgggttttgacttttgagggagaaggaaatcgcaacagcagcaatttgaggaactactgtagcagaattcgacacaaaggaatgagaagtatttccctttagagggcttgcagtgttccagttggaagcaaaaccctgaccggctttcatttagcccagcactgtcatttgaatagcatcaatactttattaagagaagtaatgcggggggggcggggattgtcctgactagtgattttattgagggagatggtatttgagaaacagaccctcacctcatgaaaccgagacgctcttctggtgtgatgatctgccgtcagagccagatggaactggcagagcttaatttctgtggctgacaaggtgtttctcttccaaaggtgtctacagtgaggcacagtgaggatctttatcccctgactgatttgtggttccaaatgtcctggagaaaaccagaggctatcagagtcttctgactttgtcgggcttttttcagagataaaatatagtgcattactctcctgtatcacctaaaccgcctttgttctcctttcaatgggatgattaaacaaagacctactaaccaaattaaagtataaaatgaacactgagatatggaaaccttgccactaagaatgctaatgaaaaaagttcactaaagccacgctggctatgttttcaatacaaatagttttatggccaatctctttagatcatagcagttttctttagaagtgtaagtctaaaagtagatgagttaccttgacggaagaatgaaacagataatgtcctgaataatgtctctttccacaatggtatcagtcattctgttaggaaactatttctttgagaatcttgcgttcgctgcagcctaaaaagtataaagtaactattaatccatgtgtgcaggcgagtagatgacatcgaaatgagatatttaggtggacagcttgttcatttaatctacatatgagttattaaaatggctagtggttatttttttcgttctgggcaactcagttttaaatttagtttgaagaacattgttacatggtttcattcatttcgtccacatttgctacgcacgttttttggaaatggcaatgatgtatcagaaccaagttcatttccagttgcctggtttctgagctgctctagcccttccgctggctccatgattttggaattgttcccaaagtatactatgtattaaagtgtattgcatgaaattct

SEQ ID NO: 2483 - protein, 1178 aa, Homo sapiens
  misc_feature (220)..(220): Xaa can be any naturally occurring amino acid
  misc_feature (228)..(228): Xaa can be any naturally occurring amino acid
  misc_feature (259)..(259): Xaa can be any naturally occurring amino acid
  misc_feature (321)..(321): Xaa can be any naturally occurring amino acid
  misc_feature (329)..(329): Xaa can be any naturally occurring amino acid
  misc_feature (441)..(441): Xaa can be any naturally occurring amino acid
  misc_feature (447)..(447): Xaa can be any naturally occurring amino acid
  misc_feature (454)..(454): Xaa can be any naturally occurring amino acid
  misc_feature (468)..(468): Xaa can be any naturally occurring amino acid
  misc_feature (512)..(512): Xaa can be any naturally occurring amino acid
  misc_feature (584)..(584): Xaa can be any naturally occurring amino acid
  misc_feature (608)..(608): Xaa can be any naturally occurring amino acid
  misc_feature (620)..(620): Xaa can be any naturally occurring amino acid
  misc_feature (631)..(631): Xaa can be any naturally occurring amino acid
  misc_feature (643)..(643): Xaa can be any naturally occurring amino acid
  misc_feature (770)..(770): Xaa can be any naturally occurring amino acid
  misc_feature (774)..(774): Xaa can be any naturally occurring amino acid
  misc_feature (778)..(778): Xaa can be any naturally occurring amino acid
  misc_feature (782)..(782): Xaa can be any naturally occurring amino acid
  misc_feature (808)..(808): Xaa can be any naturally occurring amino acid
  misc_feature (851)..(851): Xaa can be any naturally occurring amino acid
  misc_feature (853)..(853): Xaa can be any naturally occurring amino acid
  misc_feature (858)..(858): Xaa can be any naturally occurring amino acid
  misc_feature (887)..(887): Xaa can be any naturally occurring amino acid
  misc_feature (896)..(896): Xaa can be any naturally occurring amino acid
  misc_feature (945)..(945): Xaa can be any naturally occurring amino acid
  misc_feature (994)..(994): Xaa can be any naturally occurring amino acid
  misc_feature (1010)..(1010): Xaa can be any naturally occurring amino acid
  misc_feature (1097)..(1097): Xaa can be any naturally occurring amino acid
  misc_feature (1105)..(1105): Xaa can be any naturally occurring amino acid
  misc_feature (1129)..(1129): Xaa can be any naturally occurring amino acid
  misc_feature (1147)..(1147): Xaa can be any naturally occurring amino acid
MNDGDTVQEYSGRLERAPTGQIRDNLSSKRITKTYWDVGTTPTLVLWPIVLMVQGRVQQPQSEKGLETRGSDLHMRVCIMPPNKLLRPEVREMFEIFRNKIPSPIHRKANEEEQTPRVAAVSAPAPAALGASSTCAPHARFRPASRPQRRSRGIVPLPRGGAFSSPRSAFGLCCLAPAAVQREAERVQNGGSQAGALRAAGALRWSPGVRGTLSPPRKPXRMNRGPCXGLAAGLESSGSKGCGGVHAAGCARVTPGRCXGSRWRRSARRWAGTRCSSAPATSSRTCCSAICSSWAGAAIGTLSSMAEQTQFWMMLVKLSSXWGLVYMNXKTIFTTLSLSPSHTKFRHFLLARTMYFSFLNLEVKMQRKEKNTFLITCHPLCLLKKKKKKSRCPLMEAHQQKPCRFPWKKMMNWRRKKLLMMRISWARDHWIVLKLKNCQPXSGLGYXALKGTRXMLCYWKLESHSAQXILKRSHQCFLQSMYRTVQTWHLPHPSRQCWLQLQNHKCQLQNHXKQSHLHLKQRLKLALQDRRLNHLKPPSHQQWSEVLFDHQKLYPKKRNHLDVPRAPRVPRAPRSRLTFPKHLXDLKRPTGLLQLHSVKKSVKRLSRXNKYRHPLMLGNXTVRISRKRLWXQIKRLRPLSMLXLHEPVLSESQILSNFLLDRNLKETFLLALREFQARSVLLPKLPLPRTISQSQDPLLCLFPVEPQVPITHGQWMPPLMRLYVKQNWEHLQICPPTFLISLLRQCLLPLPNLSTRCMRRKPSCLPPWRXRRSXKRNXRLKXKRKKSREIGRGKKTRTRTKVRRRIKXKRKRKTRKLAGKQSIPGRNFLKRKRQIPTSLKSKNLKMLIPKXNXKMDLXGRRKRSIKIRRKIERKARKIKIRERKKKXKIKAEKIRXKPQHPHWCCPQKSWPCPCSALPQPPGSQPCCHLCCQCFRKNCLRRKRRXRRKKRKRTKRRRRKRRKKRRRRRRRKERKRRESERREKKRRRNTSMKKXKWNQSLWPRVQLSPDXLSESVLAKTRLSSARWSLPPRPSRRPRRTGRRPHRRPPRPPPAPCSSALRPCRCRCSPRPPRALPCCPPRVPPPPGPVPKPPCAAWXLRRSAPTXSEMSGAIRSGSALGVTSLTMGVPXLGVTTAMTGTTGPVLESXLHPQKRCSGSAPSVRTRRRTKSTRRGSIEPT

SEQ ID NO: 2484 - DNA, 2232 bp, Homo sapiens
ggaagaggaacaagtgtgggaaaagggagaggaagccggagctaaatgacaggatgcaggcgacttgagacacaaaaagagaagcgttcctctcggatccaggcattgcctcgctgctttcttttctccaagacgggctgaggattgtacagctctaggcggagttggggctcttcggatcgcttagattctcctctttgctgcatttccccccacgtcctcgttctcccgcgtctgcctgcggacccggagaagggagaatggagagggggctgccgctcctctgcgccgtgctcgccctcgtcctcgccccggccggcgcttttcgcaacgataaatgtggcgatactataaaaattgaaagccccgggtaccttacatctcctggttatcctcattcttatcacccaagtgaaaaatgcgaatggctgattcaggctccggacccataccagagaattatgatcaacttcaaccctcacttcgatttggaggacagagactgcaagtatgactacgtggaagtcttcgatggagaaaatgaaaatggacattttaggggaaagttctgtggaaagatagcccctcctcctgttgtgtcttcagggccatttctttttatcaaatttgtctctgactacgaaacacatggtgcaggattttccatacgttatgaaattttcaagagaggtcctgaatgttcccagaactacacaacacctagtggagtgataaagtcccccggattccctgaaaaatatcccaacagccttgaatgcacttatattgtctttgcgccaaagatgtcagagattatcctggaatttgaaagctttgacctggagcctgactcaaatcctccaggggggatgttctgtcgctacgaccggctagaaatctgggatggattccctgatgttggccctcacattgggcgttactgtggacagaaaacaccaggtcgaatccgatcctcatcgggcattctctccatggttttttacaccgacagcgcgatagcaaaagaaggtttctcagcaaactacagtgtcttgcagagcagtgtctcagaagatttcaaatgtatggaagctctgggcatggaatcaggagaaattcattctgaccagatcacagcttcttcccagtatagcaccaactggtctgcagagcgctcccgcctgaactaccctgagaatgggtggactcccggagaggattcctaccgagagtggatacaggtagacttgggccttctgcgctttgtcacggctgtcgggacacagggcgccatttcaaaagaaaccaagaagaaatattatgtcaagacttacaagatcgacgttagctccaacggggaagactggatcaccataaaagaaggaaacaaacctgttctctttcagggaaacaccaaccccacagatgttgtggttgcagtattccccaaaccactgataactcgatttgtccgaatcaagcctgcaacttgggaaactggcatatctatgagatttgaagtatacggttgcaagataacagattatccttgctctggaatgttgggtatggtgtctggacttatttctgactcccagatcacatcatccaaccaaggggacagaaactggatgcctgaaaacatccgcctggtaaccagtcgctctggctgggcacttccacccgcacctcattcctacatcaatgagtggctccaaatagacctgggggaggagaagatcgtgaggggcatcatcattcagggtgggaagcaccgagagaacaaggtgttcatgaggaagttcaagatcgggtacagcaacaacggctcggactggaagatgatcatggatgacagcaaacgcaaggcgaagtcttttgagggcaacaacaactatgatacacctgagctgcggacttttccagctctctccacgcgattcatcaggatctaccccgagagagccactcatggcggactggggctcagaatggagctgctgggctgtgaagtggaagcccctacagctggaccgaccactcccaacgggaacttggtggatgaatgtgatgacgaccaggccaactgccacagtggaacaggtgatgacttccagctcacaggtggcaccactgtgctggccacagaaaagcccacggtcatagacagcaccatacaatcaggtatcaaataaaatacgaaatgtgacaaaaaaaaaaaaaaaaaaaaaa

SEQ ID NO: 2485 - protein, 644 aa, Homo sapiens
MERGLPLLCAVLALVLAPAGAFRNDKCGDTIKIESPGYLTSPGYPHSYHPSEKCEWLIQAPDPYQRIMINFNPHFDLEDRDCKYDYVEVFDGENENGHFRGKFCGKIAPPPVVSSGPFLFIKFVSDYETHGAGFSIRYEIFKRGPECSQNYTTPSGVIKSPGFPEKYPNSLECTYIVFAPKMSEIILEFESFDLEPDSNPPGGMFCRYDRLEIWDGFPDVGPHIGRYCGQKTPGRIRSSSGILSMVFYTDSAIAKEGFSANYSVLQSSVSEDFKCMEALGMESGEIHSDQITASSQYSTNWSAERSRLNYPENGWTPGEDSYREWIQVDLGLLRFVTAVGTQGAISKETKKKYYVKTYKIDVSSNGEDWITIKEGNKPVLFQGNTNPTDVVVAVFPKPLITRFVRIKPATWETGISMRFEVYGCKITDYPCSGMLGMVSGLISDSQITSSNQGDRNWMPENIRLVTSRSGWALPPAPHSYINEWLQIDLGEEKIVRGIIIQGGKHRENKVFMRKFKIGYSNNGSDWKMIMDDSKRKAKSFEGNNNYDTPELRTFPALSTRFIRIYPERATHGGLGLRMELLGCEVEAPTAGPTTPNGNLVDECDDDQANCHSGTGDDFQLTGGTTVLATEKPTVIDSTIQSGIK

SEQ ID NO: 2486 - DNA, 2005 bp, Homo sapiens
cttttcaccaagacgggctgaggattgtacagctctaggcggagttggggctcttcggatcgcttagattctcctctttgctgcatttccccccacgtcctcgttctcccgcgtctgcctgcggacccggagaagggagaatggagagggggctgccgctcctctgcgccgtgctcgccctcgtcctcgccccggccggcgcttttcgcaacgataaatgtggcgatactataaaaattgaaagccccgggtaccttacatctcctggttatcctcattcttatcacccaagtgaaaaatgcgaatggctgattcaggctccggacccataccagagaattatgatcaacttcaaccctcacttcgatttggaggacagagactgcaagtatgactacgtggaagtcttcgatggagaaaatgaaaatggacattttaggggaaagttctgtggaaagatagcccctcctcctgttgtgtcttcagggccatttctttttatcaaatttgtctctgactacgaaacacatggtgcaggattttccatacgttatgaaattttcaagagaggtcctgaatgttcccagaactacacaacacctagtggagtgataaagtcccccggattccctgaaaaatatcccaacagccttgaatgcacttatattgtctttgcgccaaagatgtcagagattatcctggaatttgaaagctttgacctggagcctgactcaaatcctccaggggggatgttctgtcgctacgaccggctagaaatctgggatggattccctgatgttggccctcacattgggcgttactgtggacagaaaacaccaggtcgaatccgatcctcatcgggcattctctccatggttttttacaccgacagcgcgatagcaaaagaaggtttctcagcaaactacagtgtcttgcagagcagtgtctcagaagatttcaaatgtatggaagctctgggcatggaatcaggagaaattcattctgaccagatcacagcttcttcccagtatagcaccaactggtctgcagagcgctcccgcctgaactaccctgagaatgggtggactcccggagaggattcctaccgagagtggatacaggtagacttgggccttctgcgctttgtcacggctgtcgggacacagggcgccatttcaaaagaaaccaagaagaaatattatgtcaagacttacaagatcgacgttagctccaacggggaagactggatcaccataaaagaaggaaacaaacctgttctctttcagggaaacaccaaccccacagatgttgtggttgcagtattccccaaaccactgataactcgatttgtccgaatcaagcctgcaacttgggaaactggcatatctatgagatttgaagtatacggttgcaagataacagattatccttgctctggaatgttgggtatggtgtctggacttatttctgactcccagatcacatcatccaaccaaggggacagaaactggatgcctgaaaacatccgcctggtaaccagtcgctctggctgggcacttccacccgcacctcattcctacatcaatgagtggctccaaatagacctgggggaggagaagatcgtgaggggcatcatcattcagggtgggaagcaccgagagaacaaggtgttcatgaggaagttcaagatcgggtacagcaacaacggctcggactggaagatgatcatggatgacagcaaacgcaaggcgaagtcttttgagggcaacaacaactatgatacacctgagctgcggacttttccagctctctccacgcgattcatcaggatctaccccgagagagccactcatggcggactggggctcagaatggagctgctgggctgtgaagtggaaggtggcaccactgtgctggccacagaaaagcccacggtcatagacagcaccatacaatcaggtatcaaataaaatacgaaatgtgacagaaaaaaaaaaaaaaaaaa

SEQ ID NO: 2487 - protein, 609 aa, Homo sapiens
MERGLPLLCAVLALVLAPAGAFRNDKCGDTIKIESPGYLTSPGYPHSYHPSEKCEWLIQAPDPYQRIMINFNPHFDLEDRDCKYDYVEVFDGENENGHFRGKFCGKIAPPPVVSSGPFLFIKFVSDYETHGAGFSIRYEIFKRGPECSQNYTTPSGVIKSPGFPEKYPNSLECTYIVFAPKMSEIILEFESFDLEPDSNPPGGMFCRYDRLEIWDGFPDVGPHIGRYCGQKTPGRIRSSSGILSMVFYTDSAIAKEGFSANYSVLQSSVSEDFKCMEALGMESGEIHSDQITASSQYSTNWSAERSRLNYPENGWTPGEDSYREWIQVDLGLLRFVTAVGTQGAISKETKKKYYVKTYKIDVSSNGEDWITIKEGNKPVLFQGNTNPTDVVVAVFPKPLITRFVRIKPATWETGISMRFEVYGCKITDYPCSGMLGMVSGLISDSQITSSNQGDRNWMPENIRLVTSRSGWALPPAPHSYINEWLQIDLGEEKIVRGIIIQGGKHRENKVFMRKFKIGYSNNGSDWKMIMDDSKRKAKSFEGNNNYDTPELRTFPALSTRFIRIYPERATHGGLGLRMELLGCEVEGGTTVLATEKPTVIDSTIQSGIK

SEQ ID NO: 2488 - DNA, 5890 bp, Homo sapiens
ggcagttggtgaaactcctctgtctcccgctcatcttttcattgctcgttcccctccttcccgcagacacccggacctcccctgggcgccagctccgcggctccaacgggtccagaaacaagccggattttttttttttttcttcctggaaattggctttggtgtgtgttgccctacctccctcctccccctcccacccacagcccccccccggccttttttttttttttttttttttgagacatggcccgggcagtggctcctggaagaggaacaagtgtgggaaaagggagaggaagccggagctaaatgacaggatgcaggcgacttgagacacaaaaagagaagcgttcctctcggatccaggcattgcctcgctgctttcttttctccaagacgggctgaggattgtacagctctaggcggagttggggctcttcggatcgcttagattctcctctttgctgcatttccccccacgtcctcgttctcccgcgtctgcctgcggacccggagaagggagaatggagagggggctgccgctcctctgcgccgtgctcgccctcgtcctcgccccggccggcgcttttcgcaacgataaatgtggcgatactataaaaattgaaagccccgggtaccttacatctcctggttatcctcattcttatcacccaagtgaaaaatgcgaatggctgattcaggctccggacccataccagagaattatgatcaacttcaaccctcacttcgatttggaggacagagactgcaagtatgactacgtggaagtcttcgatggagaaaatgaaaatggacattttaggggaaagttctgtggaaagatagcccctcctcctgttgtgtcttcagggccatttctttttatcaaatttgtctctgactacgaaacacatggtgcaggattttccatacgttatgaagttttcaagagaggtcctgaatgttcccagaactacacaacacctagtggagtgataaagtcccccggattccctgaaaaatatcccaacagccttgaatgcacttatattgtctttgcgccaaagatgtcagagattatcctggaatttgaaagctttgacctggagcctgactcaaatcctccaggggggatgttctgtcgctacgaccggctagaaatctgggatggattccctgatgttggccctcacattgggcgttactgtggacagaaaacaccaggtcgaatccgatcctcatcgggcattctctccatggttttttacaccgacagcgcgatagcaaaagaaggtttctcagcaaactacagtgtcttgcagagcagtgtctcagaagatttcaaatgtatggaagctctgggcatggaatcaggagaaattcattctgaccagatcacagcttcttcccagtatagcaccaactggtctgcagagcgctcccgcctgaactaccctgagaatgggtggactcccggagaggattcctaccgagagtggatacaggtagacttgggccttctgcgctttgtcacggctgtcgggacacagggcgccatttcaaaagaaaccaagaagaaatattatgtcaagacttacaagatcgacgttagctccaacggggaagactggatcaccataaaagaaggaaacaaacctgttctctttcagggaaacaccaaccccacagatgttgtggttgcagtattccccaaaccactgataactcgatttgtccgaatcaagcctgcaacttgggaaactggcatatctatgagatttgaagtatacggttgcaagataacagattatcctcgctctggaatgttgggtatggtgtctggacttatttctgactcccagatcacatcatccaaccaaggggacagaaactggatgcctgaaaacatccgcctggtaaccagtcgctctggctgggcacttccacccgcacctcattcctacatcaatgagtggctccaaatagacctgggggaggagaagatcgtgaggggcatcatcattcagggtgggaagcaccgagagaacaaggtgttcatgaggaagttcaagatcgggtacagcaacaacggctcggactggaagatgatcatggatgacagcaaacgcaaggcgaagtcttttgagggcaacaacaactatgatacacctgagctgcggacttttccagctctctccacgcgattcatcaggatctaccccgagagagccactcatggcggactggggctcagaatggagctgctgggctgtgaagtggaagcccctacagctggaccgaccactcccaacgggaacttggtggatgaatgtgatgacgaccaggccaactgccacagtggaacaggtgatgacttccagctcgcaggtggcaccactgtgctggccacagaaaagcccacggtcatagacagcaccatacaatcagagtttccaacatatggttttaactgtgaatttggctggggctctcacaagaccttctgccactgggaacatgacaatcacgtgcagctcaagtggagtgtgttgaccagcaagacgggacccattcaggatcacacaggagatggcaacttcatctattcccaagctgacgaaaatcagaagggcaaagtggctcgcctggtgagccctgtggtttattcccagaactctgcccactgcatgaccttctggtatcacatgtctgggtcccacgtcggcacactcagggtcaaactgcgctaccagaagccagaggagtacgatcagctggtctggatggccattggacaccaaggtgaccactggaaggaagggcgtgtcttgctccacaagtctctgaaactttatcaggtgattttcgagggcgaaatcggaaaaggaaaccttggtgggattgctgtggatgacattagtattaataaccacatttcacaagaagattgtgcaaaaccagcagacctggataaaaagaacccagaaattaaaattgatgaaacagggagcgcgccaggatacgaaggtgaaggagaaggtgacaagaacatctccaggaagccaggcaatgtgttgaagaccttagaccccatcctcatcaccatcatagccatgagtgccctgggggtcctcctgggggctgtctgtggggtcgtgctgtactgtgcctgttggcataatgggatgtcagaaagaaacttgtctgccctggagaactataactttgaacttgtggatggtgtgaagttgaaaaaagacaaactgaatacacagagtacttattcggaggcatgaaggcagacagagatgaaaagacagtcaaaggacggaagtggaaggacgggagtgagctggggagctgttgatctttcactatacaggctgggaagtgtgttgatgaccactgagccaggcttttctcaggagcttcaatgagtatggccgacagacatggacaaggagctgtgttcaccatcggactcatgtgcagtcagcttttttcctgttggtttcatttgaataatcagatgctggtgttgagaccaagtatgattgacataatcattcatttcgacccctcctgcccctctctctctctctcctctcccctttgtggattctttttggaaactgagcgaaatccaagatgctggcaccaagcgtattccgtgtggccctttggatggacatgctacctgaaacccagtgcccagaatatactagaatcaccgcatttcagtggactcctgaagttgtacttgtgtataattgcccgcgtcgtgcataggcaaagaaggattaggctgttttctttttaaagtactgtagcctcagtactggtgtagtgtgtcagctctgtttacgaagcaatactgtccagttttcttgctgtttttccggtgttgtactaaacctcgtgcttgtgaactccatacagaaaacggtgccatccctgaacacggctggccactgggtatactgctgacaaccgcaacaacaaaaacacaaatccttggcactggctagtctatgtcctctcaagtgcctttttgtttgtactggttcattgtgttacattaacgacccactctgcttcttgctggtgaaagccctgctctttaatcaaactctggtggcccactgactaagaagaaagtttattttcgtgtgagatgccagcccctccgggcaggcaagggctctgaagatttggcaacgtggcttaattgttctgctttttctgtagttcaatttcatgtttcttgacccttttgtataaagctacaatattctctcttattgttctttcatatggaatgtattttcaaatgtaaactctcttctctttctctctcctatctctctgtcttttttctctcttagaattggaggatttgccattgtccaggaaagaaacttgcagctttaacctgctgggaatggcaaacgattttactagactttatgtttaaaaataaataaataagggaaattcctaactttgccctccaaagtctaactttggttttcttgttaactggttaaagtgacagtatcttttttccttatctattctattcaaaatgacctttgatagaaatgttggcatttagtagaaatagtgataagttgaggaaagaaataatacaaattggctttcaagtgagacccaaaggaagaactggataaaatcttccaaatccaaaagcatgagatttttctatccaaatatgcaaaaatgacccaagagaactttcttattttgctactgagtcacacaagggaagtggaaggaagaacagttaatttaagaatgaaactataaatcctgatgcctgggggtcaagtattttaagataagagggggaaaaacacatagagtcaaacaaatgttttaaaaattcataacagcaaccttgaaaaaatagacttaaatgaatgcttctagaaacttccagcggctcacaaagaataagcctgccttagggctggcaacatctaagcctctaacagcacagggaagcaaatatcttaccaggcagcctatgaattaacccaaagaagctttggttggttttggtggatttttatcatgccatgttggacatgagattttttagatcttccttcccacattgctagacgtctcactcaaagacatttgttgggagtcacatttgcatcatagacgagacagtccattcatcttagttaaattggattgagaatgccttttgtttccaggaaaatattgatcaccatgaaagaagaatagttttttgtccccagagacattcatttagttgatataatcctaccagaaggaaagcactaagaaacactcgtttgttgtttttaaaggcaacagacttaaagttgtcctcagccaaggaaaaatgatactgcaactttaaaatttaaagtatcttgcactgataaatatatttaaaaattatatgtctataaagttattaatttgtaaaggcagtgttacaaaatgttcagtttatattgttttagattgttttgtaatttttaaaggtgtaaaataacatattttttctttatggaaatctataaaactttctgtagtaaaatgttttcattttactggtatattattgcttcatgttttgtaccatcataagattttgtgcagatttttttacagaaattattattttctatgacaatatgacacttgtaaattgttgtttcaaaatgaacagcgaagccttaactttaaatgacatttgtattctcagacactgagtagcataaaaaccacatagaactgaactgtaacttaaattccaaactatgactactacattccaaagaaacagttgaattaaacattttcataaaataaaaaaaaaaaaaaaaaa

SEQ ID NO: 2489 - protein, 923 aa, Homo sapiens
MERGLPLLCAVLALVLAPAGAFRNDKCGDTIKIESPGYLTSPGYPHSYHPSEKCEWLIQAPDPYQRIMINFNPHFDLEDRDCKYDYVEVFDGENENGHFRGKFCGKIAPPPVVSSGPFLFIKFVSDYETHGAGFSIRYEVFKRGPECSQNYTTPSGVIKSPGFPEKYPNSLECTYIVFAPKMSEIILEFESFDLEPDSNPPGGMFCRYDRLEIWDGFPDVGPHIGRYCGQKTPGRIRSSSGILSMVFYTDSAIAKEGFSANYSVLQSSVSEDFKCMEALGMESGEIHSDQITASSQYSTNWSAERSRLNYPENGWTPGEDSYREWIQVDLGLLRFVTAVGTQGAISKETKKKYYVKTYKIDVSSNGEDWITIKEGNKPVLFQGNTNPTDVVVAVFPKPLITRFVRIKPATWETGISMRFEVYGCKITDYPRSGMLGMVSGLISDSQITSSNQGDRNWMPENIRLVTSRSGWALPPAPHSYINEWLQIDLGEEKIVRGIIIQGGKHRENKVFMRKFKIGYSNNGSDWKMIMDDSKRKAKSFEGNNNYDTPELRTFPALSTRFIRIYPERATHGGLGLRMELLGCEVEAPTAGPTTPNGNLVDECDDDQANCHSGTGDDFQLAGGTTVLATEKPTVIDSTIQSEFPTYGFNCEFGWGSHKTFCHWEHDNHVQLKWSVLTSKTGPIQDHTGDGNFIYSQADENQKGKVARLVSPVVYSQNSAHCMTFWYHMSGSHVGTLRVKLRYQKPEEYDQLVWMAIGHQGDHWKEGRVLLHKSLKLYQVIFEGEIGKGNLGGIAVDDISINNHISQEDCAKPADLDKKNPEIKIDETGSAPGYEGEGEGDKNISRKPGNVLKTLDPILITIIAMSALGVLLGAVCGVVLYCACWHNGMSERNLSALENYNFELVDGVKLKKDKLNTQSTYSEA

SEQ ID NO: 2490 - DNA, 1546 bp, Homo sapiens
gattgtgggaaggcagctgaactcggcgcctggaaagatggaggcagcggagacagaggcggaagctgcagccctagaggtcctggctgaggtggcaggcatcttggaacctgtaggcctgcaggaggaggcagaactgccagccaagatcctggttgagtttgtggtggactctcagaagaaagacaagctgctctgcagccagcttcaggtagcggatttcctgcagaacatcctggctcaggaggacactgctaagggtctcgaccccttggcttctgaagacacgagccgacagaaggcaattgcagctaaggaacaatggaaagagctgaaggccacctacagggagcacgtagaggccatcaaaattggcctcaccaaggccctgactcagatggaggaagcccagaggaaacggacacaactccgggaagcctttgagcagctccaggccaagaaacaaatggccatggagaaacgcagagcagtccagaaccagtggcagctacaacaggagaagcatctgcagcatctggcggaggtttctgcagagggtaagctgttgttccctgaggctgaggctgaggcagagaatcttccagatgataaaccccagcagccgactcgaccccaggagcagagtacaggagacaccatggggagagaccctggtgtgtccttcaaggctgttggtctacaacctgctggagatgtaaatttgccatgacttcctggaggacagcagcatggagaaagatcctagaaaaggcctctgacttccctcacctcccaaccatcattacaggaaagactgtgaactcctgagttcagcttgatttctgactacatcccagcaagctctggcatctgtggattaaaatccctggatctctctcagttgtgtatttgttcatcttcatatgctggcaggaacaactattaatacagatactcagaagccaataacatgacaggagctgggactggtttgaacacagggtgtgcagatggggagggggtactggccttgggcctcctatgatgcagacatggtgaatttaattcaaggaggaggagaatgttttaggcaggtggttatatgtgggaagataattttattcatggatccaaatgtttgttgagtcctttctttgtgctaaggttcttgcggtgaaccagaattataacagtgagctcatctgactgttttaggatgtacagcctagtgttaacattcttggtatctttttgtgccttatctaaaacatttctcgatcactggtttcagatgttcatttattatattcttttcaaagattcagagattggcttttgtcatccactattgtatgttttgtttcattgacctctagtgataccttgatctttcccactttctgttttcggattggagaagatgtaccttttttgtcaactcttacttttatcagatgatcaactcacgtatttggatctttatttgttttctcaaataaatatttaaggttatacatttaaaaaaaaaaaaaaaaaaaaaaaaaaa

SEQ ID NO: 2491 - protein, 230 aa, Homo sapiens
MEAAETEAEAAALEVLAEVAGILEPVGLQEEAELPAKILVEFVVDSQKKDKLLCSQLQVADFLQNILAQEDTAKGLDPLASEDTSRQKAIAAKEQWKELKATYREHVEAIKIGLTKALTQMEEAQRKRTQLREAFEQLQAKKQMAMEKRRAVQNQWQLQQEKHLQHLAEVSAEGKLLFPEAEAEAENLPDDKPQQPTRPQEQSTGDTMGRDPGVSFKAVGLQPAGDVNLP

SEQ ID NO: 2492 - DNA, 2002 bp, Homo sapiens
gattgtgggaaggcagctgaactcggcgcctggaaagatggaggcagcggagacagaggcggaagctgcagccctagaggtcctggctgaggtggcaggcatcttggaacctgtaggcctgcaggaggaggcagaactgccagccaagatcctggttgagtttgtggtggtatgtacaagatgagagcgagcctttcagaagccagggtctggtcctggctcctcttactgagatacagggcagcattggcagagagcagacttaaggaaacctgtaaggaggtaaggatgttccctgtctctgccctccctctgagcaggactctcagaagaaagacaagctgctctgcagccagcttcaggtagcggatttcctgcagaacatcctggctcaggaggacactgctaagggtctcgaccccttggcttctgaagacacgagccgtgagtaggcaggggattgtagtagcagctgacctgagtggggaaggaaggaggatttcagttaggtctcccatttggctgatgggaaggaggcccagtgttgcagggaggcaggctagcaggccaccctcactcatgtactcattcctggtggctcatctcaggacagaaggcaattgcagctaaggaacaatggaaagagctgaaggccacctacagggagcacgtagaggccatcaaaattggcctcaccaaggccctgactcagatggaggaagcccagaggaaacggacacaactccgggaagcctttgagcagctccaggccaagaaacaaatggccatggagaaacgcagagcagtccagaaccagtggcagctacaacaggagaagcatctgcagcatctggcggaggtttctgcagaggtgagggagcgtaagacagggactcagcaggagcttgacagggtgtttcagaaacttggaaacctgaagcagcaggcagaacaggagcgggacaagctgcagaggtatcagaccttcctccagcttctgtataccctgcagggtaagctgttgttccctgaggctgaggctgaggcagagaatcttccagatgataaaccccagcagccgactcgaccccaggagcagagtacaggagacaccatggggagagaccctggtgtgtccttcaaggctgttggtctacaacctgctggagatgtaaatttgccatgacttcctggaggacagcagcatggagaaagatcctagaaaaggcctctgacttccctcacctcccaaccatcattacaggaaagactgtgaactcctgagttcagcttgatttctgactacatcccagcaagctctggcatctgtggattaaaatccctggatctctctcagttgtgtatttgttcatcttcatatgctggcaggaacaactattaatacagatactcagaagccaataacatgacaggagctgggactggtttgaacacagggtgtgcagatggggagggggtactggccttgggcctcctatgatgcagacatggtgaatttaattcaaggaggaggagaatgttttaggcaggtggttatatgtgggaagataattttattcatggatccaaatgtttgttgagtcctttctttgtgctaaggttcttgcggtgaaccagaattataacagtgagctcatctgactgttttaggatgtacagcctagtgttaacattcttggtatctttttgtgccttatctaaaacatttctcgatcactggtttcagatgttcatttattatattcttttcaaagattcagagattggcttttgtcatccactattgtatgttttgtttcattgacctctagtgataccttgatctttcccactttctgttttcggattggagaagatgtaccttttttgtcaactcttacttttatcagatgatcaactcacgtatttggatctttatttgttttctcaaataaatatttaaggttatacatttaaaaaaaaaaaaaaaaaaaaaaaaaaa

SEQ ID NO: 2493 - protein, 48 aa, Homo sapiens
MEAAETEAEAAALEVLAEVAGILEPVGLQEEAELPAKILVEFVVVCTR

SEQ ID NO: 2494 - DNA, 1687 bp, Homo sapiens
gattgtgggaaggcagctgaactcggcgcctggaaagatggaggcagcggagacagaggcggaagctgcagccctagaggtcctggctgaggtggcaggcatcttggaacctgtaggcctgcaggaggaggcagaactgccagccaagatcctggttgagtttgtggtggactctcagaagaaagacaagctgctctgcagccagcttcaggtagcggatttcctgcagaacatcctggctcaggaggacactgctaagggtctcgaccccttggcttctgaagacacgagccgacagaaggcaattgcagctaaggaacaatggaaagagctgaaggccacctacagggagcacgtagaggccatcaaaattggcctcaccaaggccctgactcagatggaggaagcccagaggaaacggacacaactccgggaagcctttgagcagctccaggccaagaaacaaatggccatggagaaacgcagagcagtccagaaccagtggcagctacaacaggagaagcatctgcagcatctggcggaggtttctgcagaggtgagggagcgtaagacagggactcagcaggagcttgacagggtgtttcagaaacttggaaacctgaagcagcaggcagaacaggagcgggacaagctgcagaggtatcagaccttcctccagcttctgtataccctgcagggtaagctgttgttccctgaggctgaggctgaggcagagaatcttccagatgataaaccccagcagccgactcgaccccaggagcagagtacaggagacaccatggggagagaccctggtgtgtccttcaaggctgttggtctacaacctgctggagatgtaaatttgccatgacttcctggaggacagcagcatggagaaagatcctagaaaaggcctctgacttccctcacctcccaaccatcattacaggaaagactgtgaactcctgagttcagcttgatttctgactacatcccagcaagctctggcatctgtggattaaaatccctggatctctctcagttgtgtatttgttcatcttcatatgctggcaggaacaactattaatacagatactcagaagccaataacatgacaggagctgggactggtttgaacacagggtgtgcagatggggagggggtactggccttgggcctcctatgatgcagacatggtgaatttaattcaaggaggaggagaatgttttaggcaggtggttatatgtgggaagataattttattcatggatccaaatgtttgttgagtcctttctttgtgctaaggttcttgcggtgaaccagaattataacagtgagctcatctgactgttttaggatgtacagcctagtgttaacattcttggtatctttttgtgccttatctaaaacatttctcgatcactggtttcagatgttcatttattatattcttttcaaagattcagagattggcttttgtcatccactattgtatgttttgtttcattgacctctagtgataccttgatctttcccactttctgttttcggattggagaagatgtaccttttttgtcaactcttacttttatcagatgatcaactcacgtatttggatctttatttgttttctcaaataaatatttaaggttatacatttaaaaaaaaaaaaaaaaaaaaaaaaaaa

SEQ ID NO: 2495 - protein, 277 aa, Homo sapiens
MEAAETEAEAAALEVLAEVAGILEPVGLQEEAELPAKILVEFVVDSQKKDKLLCSQLQVADFLQNILAQEDTAKGLDPLASEDTSRQKAIAAKEQWKELKATYREHVEAIKIGLTKALTQMEEAQRKRTQLREAFEQLQAKKQMAMEKRRAVQNQWQLQQEKHLQHLAEVSAEVRERKTGTQQELDRVFQKLGNLKQQAEQERDKLQRYQTFLQLLYTLQGKLLFPEAEAEAENLPDDKPQQPTRPQEQSTGDTMGRDPGVSFKAVGLQPAGDVNLP

SEQ ID NO: 2496 - DNA, 1878 bp, Homo sapiens
gattgtgggaaggcagctgaactcggcgcctggaaagatggaggcagcggagacagaggcggaagctgcagccctagaggtcctggctgaggtggcaggcatcttggaacctgtaggcctgcaggaggaggcagaactgccagccaagatcctggttgagtttgtggtggactctcagaagaaagacaagctgctctgcagccagcttcaggtagcggatttcctgcagaacatcctggctcaggaggacactgctaagggtctcgaccccttggcttctgaagacacgagccgacagaaggcaattgcagctaaggaacaatggaaagagctgaaggccacctacagggagcacgtagaggccatcaaaattggcctcaccaaggccctgactcagatggaggaagcccagaggaaacggacacaactccgggaagcctttgagcagctccaggccaagaaacaaatggccatggagaaacgcagagcagtccagaaccagtggcagctacaacaggagaagcatctgcagcatctggcggaggtttctgcagaggtgagggagcgtaagacagggactcagcaggagcttgacagggtgtttcagaaacttggaaacctgaagcagcaggcagaacaggagcgggacaagctgcagaggtatcagaccttcctccagcttctgtataccctgcagggtaagctgttgttccctgaggctgaggctgaggcagagaatcttccagatgataaaccccagcagccgactcgaccccaggagcagagtacaggagacaccatggggagagaccctggtgtgtccttcaaggctgttggtctacaacctgctggagatgtaaatttgccatgacttcctggaggacagcagcatggagaaagatcctagaaaaggtcagacccaactcaggccttggtgtccctggactgcaagtgtggaaggagggaaagcctggtttacctctctctgcatctgagctctgctacccatggagcagatggatggtgggaacaggaaagagcttatgttacacctcattcccatgcttagcccacccagagctaacccctgtcttcttccccaggcctctgacttccctcacctcccaaccatcattacaggaaagactgtgaactcctgagttcagcttgatttctgactacatcccagcaagctctggcatctgtggattaaaatccctggatctctctcagttgtgtatttgttcatcttcatatgctggcaggaacaactattaatacagatactcagaagccaataacatgacaggagctgggactggtttgaacacagggtgtgcagatggggagggggtactggccttgggcctcctatgatgcagacatggtgaatttaattcaaggaggaggagaatgttttaggcaggtggttatatgtgggaagataattttattcatggatccaaatgtttgttgagtcctttctttgtgctaaggttcttgcggtgaaccagaattataacagtgagctcatctgactgttttaggatgtacagcctagtgttaacattcttggtatctttttgtgccttatctaaaacatttctcgatcactggtttcagatgttcatttattatattcttttcaaagattcagagattggcttttgtcatccactattgtatgttttgtttcattgacctctagtgataccttgatctttcccactttctgttttcggattggagaagatgtaccttttttgtcaactcttacttttatcagatgatcaactcacgtatttggatctttatttgttttctcaaataaatatttaaggttatacatttaaaaaaaaaaaaaaaaaaaaaaaaaaa

SEQ ID NO: 2497 - protein, 277 aa, Homo sapiens; identical to SEQ ID NO: 2495

SEQ ID NO: 2498 - DNA, 4158 bp, Homo sapiens
gttccccgcggaggtggcagccctgggccgcggcgttccggaacccccgcacccacggcgcggtgccccacggtgcccgcgagcgccgcccccgctggctagccgcgcctcgctccgccctggacgccgccggtcccggcgcggaggtgcggcggggagtgggagccggcccggctcagtctgatttacggctctgctgaaaaccgcttcgctcccgcagcatcagcaccggaggcggcggctgcagcagcagcaacaagtcgggacttttagagtaatgcaacagaaggcttttgaggaaagcagatatccctggcaggagtcctttgagaatgttgctgtgtgcctgccattacgctgcccgaggtgtggagaccataccagatttagaagcttgtcatccttgagggcccatctggagttcagtcacagctacgaagaaagaaccctcttgacaaaatgcagtctctttccatccctcaaagacacagacctagtcacttcctcagaactcctgaaaccgggaaaattgcagagcagtggcaacgtggtaaagcagaaaccgagctatgttaacttgtacagcatttcacatgaacattccaaggacaggaagccatttgaggtggtggcagagaggcctgtgtcctatgtgcagacctacactgccatggacctccatgcagactcgctggatgggacacggtcgggtcctggactgcccacctcagacaccaaagcttctttcgaggcacatgtcagagaaaaattcaatcgaatggttgaggctgtggataggaccattgagaagagaattgataaactcaccaaagagttggcccagaaaactgcggaactgttggaagttcgggcagcttttgtgcagctgactcagaaaaagcaggaagttcagagacgagagcgggccttaaacagacaggtggacgtggccgtggaaatgatagctgtactgaggcaacgcctgacggaatctgaggaggagcttcttaggaaagaagaagaagttgtcacattcaaccatttcctggaagcggcagctgagaaggaggttcaagggaaagcccggctccaggactttattgagaatctgttacagcgggtagaactggcggagaagcagcttgagtactatcagagccagcaggcctctggctttgtccgtgatctcagcgggcacgtgcttacagacatctcctcaaataggaagcccaaatgcctaagccgagggcacccgcattcggtatgtaaccaccctgatctcaagtcccatttccacccaaagggaaggaaccacctgaaaaaggccaaggatgacagagccagcatgcagcctgccaaggccattcacgaacaggctgagtcctcaagagacctctgcagacctccaaagaaaggggagctcctggggtttggccgcaaaggcaacatcaggcccaaaatggctaaaaaaaagccaacagccattgtgaacatcatctaaaagggtgggtggtgctggaccaatcatcgctgggctttggggaacgttgttccaggagccaacagtaatgtctttctggaaacattccatagtaagacacattggaaaagccaagggcataacacaggcaagcacctcaattaaccagagcttagcaaatgggaatcttagtgaaccagaattttattataacccccttttagaagcttgcaaattacagaaagaataaaaaaattaaatcaatcttaaagctctaacttctaaagtaactggcccagtctccagtaatcttggcatctgggcttctatgcagtggtcactaattttcaggaccaaggccacacaaaatgtcaggcctagggagaaaattcatctgtgcccactgctctccaaagtgcgaggcaaggaatggcagtgtaaagttctgttaatagcagtaaaatgaaaatatttgtgtttgtgtataaccttcccctcagctaatttgaaagcctccaaaataaggattcccattccccgagtattctggttaatcaagatttcaatttctgggttgctcaagggactcgttcagtcagacttcagttctcattccgacagggtgtctttcagttcgtttgtttgattgaggttttttggtggcctagatgcatgtttattcagattttggtacacctctgccgtcttctttggctgagtattctgcacccacagaccatgctgccagcctctatcttaatagctgcttctgtggatatggctggggagcgaagtaaaatcctcttttgattagcacccagcatgggctgggtggctaggtggttggaatgacagtggactgcacgcttggtgcatcgtgcatcgtgaccatcctggaagcactgcgggtgtcgccaagccctttcctaagacctgcttcccggccagtgtcagtggccctctctctctctgctatgggcatgactttctcttcgctggcttaacttttccactgggtggttcactttgcctcctgctgcttctgtgccctgttaaggcttcaggtatctttcaaccaagtatctggagtgttcactctatgttgcattctaaagtaatttctgaaataaacaatgcatgtaggagccagaatctgacactgtcttcccctccttccctccctaaaatggctttagtttccacaaagagctgttaagaatttcctgctgtatgattttcctcaagaatgaatttccatgttattttttccttaaatttagcaatatcatcaggtctcttgcagagtttacaagtgctgacattcttctgaaaacaggaataattttgtccacaaatatatacatatatacatatatataacacatacaaaatatatatgttaagtatattaataatttatttttaaatactcatggagaaagtgtgtgtttgtggtgggtggtttttaaactatatatgtttgttcatgtaaactgaattctcttatttaaaaaatcaaaactgtaacgtaattaacattggcagaattatgattgttactgcaataagcatcaaattagcagcgcattaaaaataggaaataaagcagttgcttaaaatgccagtcaattgaaaagtgtaacttatcattatacaaacattctgaacctaccataatgaaaatgttcttgaatcttcactttgactttcagtttatgggggggtagatcattcatgtgatatataagcagctatcaagtgggcaaaaacattgctgtgaatagcactgtttaggctaacattgtaaaaattgtaatgttataattattatttatttggagaattaacttccccctctaaagttatttattattgatgcttataccatgattgcaccttagccttttacatactaaaaacatgacttgttagttgtattgcatgctctttgtcctgtaatgtgtgtgcaatgacaacttgtttctgttttatttaaagtaactgacattttggattttcatctaacatagagggcatggcaactctctttgacagtggtaccccatgatcttcagaaagtaccataatgtcatcctactctacatttcacaagacgaattattttgagatttgtttattatattaaaatgtttttttacgttcccactaaattttgaccccatataaagaaatgtgttatgtatgttgtgcctccttagagacataaatttagtgtcaaaacatgggagatggcttactcagaagcatactccacttaacataccatggcctgagctaagtaccatgtcctgtttgtgtcttatttttaaatattttctttgtccacatgggccgttgaccttagagttaaggcggttgcttttttgaagaaatcaccaaagtttctgggaaactatgttcaaggttgaaatggagagtagatttaattttatttgtcttgtagggaagaaatcttcctttgaaccgcttttcttgctttttccctttttcccaaactaggttacaggttcttatctgcaaggttcaagttgcttagacattgttttccagtattctgcagggccagtcagttgtacagaagttggaatattctgttccagaattaaagaagtttttagattatgaaatattatgataataaagctatatttctgact

SEQ ID NO: 2499 - protein, 407 aa, Homo sapiens
MQQKAFEESRYPWQESFENVAVCLPLRCPRCGDHTRFRSLSSLRAHLEFSHSYEERTLLTKCSLFPSLKDTDLVTSSELLKPGKLQSSGNVVKQKPSYVNLYSISHEHSKDRKPFEVVAERPVSYVQTYTAMDLHADSLDGTRSGPGLPTSDTKASFEAHVREKFNRMVEAVDRTIEKRIDKLTKELAQKTAELLEVRAAFVQLTQKKQEVQRRERALNRQVDVAVEMIAVLRQRLTESEEELLRKEEEVVTFNHFLEAAAEKEVQGKARLQDFIENLLQRVELAEKQLEYYQSQQASGFVRDLSGHVLTDISSNRKPKCLSRGHPHSVCNHPDLKSHFHPKGRNHLKKAKDDRASMQPAKAIHEQAESSRDLCRPPKKGELLGFGRKGNIRPKMAKKKPTAIVNII

SEQ ID NO: 2500 - DNA, 1671 bp, Homo sapiens
gttccccgcggaggtggcagccctgggccgcggcgttccggaacccccgcacccacggcgcggtgccccacggtgcccgcgagcgccgcccccgctggctagccgcgcctcgctccgccctggacgccgccggtcccggcgcggaggtgcggcggggagtgggagccggcccggctcagtctgatttacggctctgctgaaaaccgcttcgctcccgcagcatcagcaccggaggcggcggctgcagcagcagcaacaagtcgggacttttagagtaatgcaacagaaggcttttgaggaaagcagatatccctggcaggagtcctttgagaatgttgctgtgtgcctgccattacgctgcccgaggtgtggagaccataccagatttagaagcttgtcatccttgagggcccatctggagttcagtcacagctacgaagaaagaaccctcttgacaaaatgcagtctctttccatccctcaaagacacagacctagtcacttcctcagaactcctgaaaccgggaaaattgcagagcagtggcaacgtggtaaagcagaaaccgagctatgttaacttgtacagcatttcacatgaacattccaaggacaggaagccatttgaggtggtggcagagaggcctgtgtcctatgtgcagacctacactgccatggacctccatgcagactcgctggatgggacacggtcgggtcctggactgcccacctcagacaccaaagcttctttcgaggcacatgtcagagaaaaattcaatcgaatggttgaggctgtggataggaccattgagaagagaattgataaactcaccaaagagttggcccagaaaactgcggaactgttggaagttcgggcagcttttgtgcagctgactcagaaaaagcaggaagttcagagacgagagcgggccttaaacagacaggtggacgtggccgtggaaatgatagctgtactgaggcaacgcctgacggaatctgaggaggagcttcttaggaaagaagaagaagttgtcacattcaaccatttcctggaagcggcagctgagaaggaggttcaagggaaagcccggctccaggactttattgagaatctgttacagcgggtagaactggcggagaagcagcttgagtactatcagagccagcaggcctctggctttgtccgtgatctcagcgggcacgtgagctggaaaggtgctggcgaagctcgcctggtgtgccaaaatgacctggaattggaggagtctgcgattgtggaataatgaacttcgaatgatgtgattctggatgaggacttggatcaagagaatcgcaaattaattgtgccagagaagctttcattcattcaacaaatatttattaagcatgttttacactccaggaactttacaagaaacttgggctacttggtgactttactcaccaggagtgggttcagactcctgatggatgagctccaggtcctccctaacaagactgcagacttcctgagggcacagcccacccctcatgctttgagtttctcatataacccatcatagcaagtagaagatgcttcagaacatttgtccctatgagatagagtcatattctatttagcttgggacatggcaggtactcagttgttaaataaaaaatagttattgagtaattt

SEQ ID NO: 2501 - protein, 333 aa, Homo sapiens
MQQKAFEESRYPWQESFENVAVCLPLRCPRCGDHTRFRSLSSLRAHLEFSHSYEERTLLTKCSLFPSLKDTDLVTSSELLKPGKLQSSGNVVKQKPSYVNLYSISHEHSKDRKPFEVVAERPVSYVQTYTAMDLHADSLDGTRSGPGLPTSDTKASFEAHVREKFNRMVEAVDRTIEKRIDKLTKELAQKTAELLEVRAAFVQLTQKKQEVQRRERALNRQVDVAVEMIAVLRQRLTESEEELLRKEEEVVTFNHFLEAAAEKEVQGKARLQDFIENLLQRVELAEKQLEYYQSQQASGFVRDLSGHVSWKGAGEARLVCQNDLELEESAIVE

SEQ ID NO: 2502 - DNA, 3376 bp, Homo sapiens
gttccccgcggaggtggcagccctgggccgcggcgttccggaacccccgcacccacggcgcggtgccccacggtgcccgcgagcgccgcccccgctggctagccgcgcctcgctccgccctggacgccgccggtcccggcgcggaggtgcggcggggagtgggagccggcccggctcagtctgatttacggctctgctgaaaaccgcttcgctcccgcagcatcagcaccggaggcggcggctgcagcagcagcaacaagtcgggacttttagagtaatgcaacagaaggcttttgaggaaagcagatatccctggcaggagtcctttgagaatgttgctgtgtgcctgccattacgctgcccgaggtgtggagaccataccagatttagaagcttgtcatccttgagggcccatctggagttcagtcacagctacgaagaaagaaccctcttgacaaaatgcagtctctttccatccctcaaagacacagacctagtcacttcctcagaactcctgaaaccgggaaaattgcagagcagtggcaacgtggtaaagcagaaaccgagctatgttaacttgtacagcatttcacatgaacattccaaggacaggaagccatttgaggtggtggcagagaggcctgtgtcctatgtgcagacctacactgccatggacctccatgcagactcgctggatgggacacggtcgggtcctggactgcccacctcagacaccaaagcttctttcgaggcacatgtcagagaaaaattcaatcgaatggttgaggctgtggataggaccattgagaagagaattgataaactcaccaaagagttggcccagaaaactgcggaactgttggaagttcgggcagcttttgtgcagctgactcagaaaaagcaggaagttcagagacgagagcgggccttaaacagacaggtggacgtggccgtggaaatgatagctgtactgaggcaacgcctgacggaatctgaggaggagcttcttaggaaagaagaagaagttgtcacattcaaccatttcctggaagcggcagctgagaaggaggttcaagggaaagcccggctccaggactttattgagaatctgttacagcgggtagaactggcggagaagcagcttgagtactatcagagccagcaggcctctggctttgtccgtgatctcagcgggcacgtgagctggaaaggtgctggcgaagctcgcctggtgtgccaaaatgacctggaattggagatttttggccatataaaccaccatctttcggggttgaaagattctcattgtctagtttttctgcaagccccacctgtgccctggatcattttagccagctttctctggattctcggaaatccctggacgtcttccacggctactgcaggatttagccaaatttgggtgctatttcccttttgtggagggacttttcatcacaatgagaaggacgtcttaggactccaggactttgagagagaaagtgtctctacaagtcaaagcaggaatatcagccttcttacactaggacaactccaaaattgtgtgattggcaaattgacaatcatcgatttgttgactgaacacctgttaggtgtaaggcacggtgtcatatgctttccttggggcttgccttcaagcagctaacagaaataagaagaaaacaggtgaaaaagacagtgtgataaggccatggtggtggattgtggatgccctgccctgtatccacttgggagagagcctctacaacatgctggcaacttccccctcactgattcaaatgttaatctcctttggcaacaccctcacagacacacccaggatcaatacgttgtatcctttgatccaatcaagttgccactcagtattaaccatgacaccttctaagccatcatctcctcctaatcctcccataacaatgggtataagttatgaaggtgggttagaaactagtgcctatccctcactaagttgccagatggatttaacagcacctcaaagtcaacatgccccaagtcaaagtcttctttacccatggaataagctggcttgctacttccctacatctctgaagggctccaccattcctctagcaaccatgctctcaaagctcagagggaggaaaaggaaatggatctaaatggaattccaggtcccacgctggatattttcacaccttacctcatttaatacaacaagcaaggaggtagacaatattgtctacctttgcaaatgaggaaacagaggcttagagaagttaaataatttgcctgagaataaagctaaaagtagctttaaaatactagagctgggattgcaagtttgatgcaaagtttgtgctctcttcatccttcaccaagatctttcattttccctttaaatatctcttatgtctgcatttcccttccattcccatcactagcactgtcctctaatgccccacccagtggggaagtctccaataggtccccctgcttataacagccaagagggtagctataaactaggtccaataacatgcttcatgtgagggaactgatggacagctgtctaattcataacctctggcctcaacggaatttacagttcagagtccaaaatagcaaggaagtggtgggaagaaggtgagagaaaagggtgggagggtgagagaggggagggaggggaataaggtgtgggcagtagagggaatctgtcagtctcatggtttgccctaggaaaccttctgctcagccccagcctgcttctgggcactcctcctcacccctccttgctgtccatatgggttcaatgtgagtaaccacaattgtagagtgtggccatcttcttctgacatggtcctaaataaacctaactgagtagccagaagaatcacttctaaggtaaacatctgtaaacattggttatatttattttcaatattactggttaacattgtggagctattactgatgggccagactctgtgctaggcacagactttctagggattatttcatttaattctcatggcaaccaccatgcatttgcagataggcaagtcaggctcacaaaaatgtatgcagagcttcagggttgtgatgggtagagccaaacccatctgcccaacccaagggcccgtgcgctccaaccctgcatcgaactgccaacatagtacaccttttagaaaaagattcttgttgcaaaagtaccataggcagtgtgtgtgtaaggtcattgtaaaagtgtagataagcaagaaagtgttataccaccactcagaagtaaccactgttaacatgttggcttatctgctctcaggtgtttctgtgcctgtacatactattcttcttgaataaaaacaggattacacagtgt

SEQ ID NO: 2503 - protein, 462 aa, Homo sapiens
MQQKAFEESRYPWQESFENVAVCLPLRCPRCGDHTRFRSLSSLRAHLEFSHSYEERTLLTKCSLFPSLKDTDLVTSSELLKPGKLQSSGNVVKQKPSYVNLYSISHEHSKDRKPFEVVAERPVSYVQTYTAMDLHADSLDGTRSGPGLPTSDTKASFEAHVREKFNRMVEAVDRTIEKRIDKLTKELAQKTAELLEVRAAFVQLTQKKQEVQRRERALNRQVDVAVEMIAVLRQRLTESEEELLRKEEEVVTFNHFLEAAAEKEVQGKARLQDFIENLLQRVELAEKQLEYYQSQQASGFVRDLSGHVSWKGAGEARLVCQNDLELEIFGHINHHLSGLKDSHCLVFLQAPPVPWIILASFLWILGNPWTSSTATAGFSQIWVLFPFCGGTFHHNEKDVLGLQDFERESVSTSQSRNISLLTLGQLQNCVIGKLTIIDLLTEHLLGVRHGVICFPWGLPSSS

SEQ ID NO: 2504 - DNA, 2695 bp, Homo sapiens
gaagaggaagagagacccgagctagcacactcagtccccttgctatgtgatgttctttaccatctcaggactctgcacagagtccccaacagcaagaaggccctcaccagatacagccccttgacctgggacttctcagcctccataaccgaattggcccctacaagtcaagttgcaaaccctgggtcaaagggtgaagtagaaggaagctggaaacacatagtattttagaagtttttcagagaaatcacaaggcaggaacttctgctcagtttggaagaaagagcattccatcatgacccttggactgggtgagagcatcatcctttaattaatgtctgcgctgggtcagataaccatcactgtctccaggtgctggaatacagagaggaaccaaacagataaaaatccttgcctgcacggagcttaccttcagctaagggagacagtcaaaaacaagtcaacacatctaaagaagccactgatgaaacaggctcccccttggaaagaccatctcgccttccaacctctccatcctgcagagaggaaaacccaagtttggcgttggcagtcaggtaattcatcagatctggaaaccacctcatcagcatccccctggccaactggaagcaaccgtgacgttgtgctgaatacacttgcagagtcgtgctgtggtctctccgagctcatcacggcacctccctatgcaggagtttcaattcaaggatttagccaaatttgggtgctatttcccttttgtggagggacttttcatcacaatgagaaggacgtcttaggactccaggactttgagagagaaagtgtctctacaagtcaaagcaggaatatcagccttcttacactaggacaactccaaaattgtgtgattggcaaattgacaatcatcgatttgttgactgaacacctgttaggtgtaaggcacggtgtcatatgctttccttggggcttgccttcaagcagctaacagaaataagaagaaaacaggtgaaaaagacagtgtgataaggccatggtggtggattgtggatgccctgccctgtatccacttgggagagagcctctacaacatgctggcaacttccccctcactgattcaaatgttaatctcctttggcaacaccctcacagacacacccaggatcaatacgttgtatcctttgatccaatcaagttgccactcagtattaaccatgacaccttctaagccatcatctcctcctaatcctcccataacaatgggtataagttatgaaggtgggttagaaactagtgcctatccctcactaagttgccagatggatttaacagcacctcaaagtcaacatgccccaagtcaaagtcttctttacccatggaataagctggcttgctacttccctacatctctgaagggctccaccattcctctagcaaccatgctctcaaagctcagagggaggaaaaggaaatggatctaaatggaattccaggtcccacgctggatattttcacaccttacctcatttaatacaacaagcaaggaggtagacaatattgtctacctttgcaaatgaggaaacagaggcttagagaagttaaataatttgcctgagaataaagctaaaagtagctttaaaatactagagctgggattgcaagtttgatgcaaagtttgtgctctcttcatccttcaccaagatctttcattttccctttaaatatctcttatgtctgcatttcccttccattcccatcactagcactgtcctctaatgccccacccagtggggaagtctccaataggtccccctgcttataacagccaagagggtagctataaactaggtccaataacatgcttcatgtgagggaactgatggacagctgtctaattcataacctctggcctcaacggaatttacagttcagagtccaaaatagcaaggaagtggtgggaagaaggtgagagaaaagggtgggagggtgagagaggggagggaggggaataaggtgtgggcagtagagggaatctgtcagtctcatggtttgccctaggaaaccttctgctcagccccagcctgcttctgggcactcctcctcacccctccttgctgtccatatgggttcaatgtgagtaaccacaattgtagagtgtggccatcttcttctgacatggtcctaaataaacctaactgagtagccagaagaatcacttctaaggtaaacatctgtaaacattggttatatttattttcaatattactggttaacattgtggagctattactgatgggccagactctgtgctaggcacagactttctagggattatttcatttaattctcatggcaaccaccatgcatttgcagataggcaagtcaggctcacaaaaatgtatgcagagcttcagggttgtgatgggtagagccaaacccatctgcccaacccaagggcccgtgcgctccaaccctgcatcgaactgccaacatagtacaccttttagaaaaagattcttgttgcaaaagtaccataggcagtgtgtgtgtaaggtcattgtaaaagtgtagataagcaagaaagtgttataccaccactcagaagtaaccactgttaacatgttggcttatctgctctcaggtgtttctgtgcctgtacatactattcttcttgaataaaaacaggattacacagtgt

SEQ ID NO: 2505 - protein, 216 aa, Homo sapiens
MSALGQITITVSRCWNTERNQTDKNPCLHGAYLQLRETVKNKSTHLKKPLMKQAPPWKDHLAFQPLHPAERKTQVWRWQSGNSSDLETTSSASPWPTGSNRDVVLNTLAESCCGLSELITAPPYAGVSIQGFSQIWVLFPFCGGTFHHNEKDVLGLQDFERESVSTSQSRNISLLTLGQLQNCVIGKLTIIDLLTEHLLGVRHGVICFPWGLPSSS

SEQ ID NO: 2506 - DNA, 4701 bp, Homo sapiens
ggcgaggccggcggctgccgggcctccaatctcggcggcggcggcggcaacaggggagcctgggtctcgcggcctgcgagtccgtcgcgtgctgagggagacgcaggaggtggagccggccgggtgctcgagggaaggagactggaagctggttccggcgtgaggagagtctgaaaaaggggagcgcggagaggaggctggaagaggaagatgcctagcacagaccttctgatgttgaaggcctttgagccctacttagagattttggaagtatactccacaaaagccaagaattatgtaaatggacattgcaccaagtatgagccctggcagctaattgcatggagtgtcgtgtggaccctgctgatagtctggggatatgagtttgtcttccagccagagagtttatggtcaaggtttaaaaagaaatgttttaagctcaccaggaagatgcccattattggtcgtaagattcaagacaagttgaacaagaccaaggatgatattagcaagaacatgtcattcctgaaagtggacaaagagtatgtgaaagctttaccctcccagggtctgagctcatctgctgttttggagaaacttaaggagtacagctctatggacgccttctggcaagaggggagagcctctggaacagtgtacagtggggaggagaagctcactgagctccttgtgaaggcttatggagattttgcatggagtaaccccctgcatccagatatcttcccaggactacgcaagatagaggcagaaattgtgaggatagcttgttccctgttcaatgggggaccagattcgtgtggatgtgtgacttctgggggaacagaaagcatactgatggcctgcaaagcatatcgggatctggcctttgagaaggggatcaaaactccagaaattgtggctccccaaagtgcccatgctgcatttaacaaagcagccagttactttgggatgaagattgtgcgggtcccattgacgaagatgatggaggtggatgtgcgggcaatgagaagagctatctccaggaacactgccatgctcgtctgttctaccccacagtttcctcatggtgtaatagatcctgtccctgaagtggccaagctggctgtcaaatacaaaataccccttcatgtcgacgcttgtctgggaggcttcctcatcgtctttatggagaaagcaggatacccactggagcacccatttgatttccgggtgaaaggtgtaaccagcatttcagctgacacccataagtatggctatgccccaaaaggctcatcattggtgttgtatagtgacaagaagtacaggaactatcagttcttcgtcgatacagattggcagggtggcatctatgcttccccaaccatcgcaggctcacggcctggtggcattagcgcagcctgttgggctgccttgatgcacttcggtgagaacggctatgttgaagctaccaaacagatcatcaaaactgctcgcttcctcaagtcagaactggaaaatatcaaaggcatctttgtttttgggaatccccaattgtcagtcattgctctgggatcccgtgattttgacatctaccgactatcaaacctgatgactgctaaggggtggaacttgaaccagttgcagttcccacccagtattcatttctgcatcacattactacacgcccggaaacgagtagctatacaattcctaaaggacattcgagaatctgtcactcaaatcatgaagaatcctaaagcgaagaccacaggaatgggtgccatctatggcatggcccagacaactgttgacaggaatatggttgcagaattgtcctcagtcttcttggacagcttgtacagcaccgacactgtcacccagggcagccagatgaatggttctccaaaaccccactgaacttggaccctttctagtctcaaggggattccagccttcagaaggttcttgggatatggaacaggccgtgcacaactttgacatctggtcttgctccatagagcacaactcaagatagaccatgagacagcttgagcctcaggattcttgttcttcctcttatcttccttttgtggtttttaatttgaagaccccagagaattccattacataatgattttgcccttgttataaatgttaccctaggaattgttttaaccatttccttttctaaactctctagctttcaactttacttaaacattgtgtggtagctctgacctgtcctgattctttagagaagctggggtacagtttatgagatagctagagcttctttgttatctcaggcaggaggcgtttacataacagatgtttcctcagctgggtgtgaggtatactctaagcaggaggctttttcagccttctctctcttttttttttttttttttttttgagatggaattttgctcttttgcccagtctggagtgcagtggcatgatctcagctcactgcaacctccacccactgggttcaagcgattcttctgcctcagcctcccgagtagctgggattaccggcacccaccaccacgcctggctaatttttcaattttctttttcagtagagacgggttcaccgtgttggccaggctggtcttgaactcctgacctcaggtgatacccgcccccccgcctcagcctcccaaagtgctgggattacaggcgtgagccaccgtgcctggccctgtctctcttaagagtaggttcattgtctgtcttagagtcacttctattgcaactcattttctttttccagggcacagatcgaccaagctgccgttccctattctgcaggacaggactattctagcatacctgcttcgtccacccaggcagggtttggggtggtctcttctgtgcctgcagtccccatttgacacttggttgccaccatctttggagattattgtttggaatgatgcttccattggctttttcttgttaccatggactaggaagaaaacatggtttccaaataatctgggagcttttggccatggtgccgccttcctgaattggcagtggtcagagcacacctgaaccctatcctgggctggtgatgagcagaaatcagacctttttctatgcttttttgaatatcagagtaggatgaacacccagattcaaatatgtcaccaaagttggtggtggtccttccctgcacccttgcgttaagccattatgtaatgaaaatgtgtttgcttgaaggaacagctcaaagcaccttcacaagttgccttgacttaccctaggtgggtgtgaaagagcacccgtagcaaggaaaattttctctattagtgtgttcttctgcctcttcccccttgattcagctttcagaggtactatggcagttttgcctcaggtgctgaacatttctcagccctggctaaaagggagcagcacagggagagaaacaggataggaaagcagaatggcgagcagcctatggcccagggcctgtaatcccttcccaagactagctgctcagggtggtgcagggacaggaccagaccctgcgcctatttcctgccttctttcccctatagggaactctgtaggctgagccactgtcctgctcttatgacattatatcttgtgcctttctcctcagcagtgagcagtgagctactcctggcccaggccctaggggaaatggatcagtctttgaggtttctatttggggaggggagtacttaagatgagtcaaaagacactttcctctgttccattccccatctcagggactcctgaatattcagcctctccaggctggtgtcttctagtttcccccactgggaatgctggctgggagagccatgactaccagacttttcctcaggctccttggcatgttagtctgaattgttcttgagcactgtactactgacccaacaactgtgactagctggccacgccattcagggctggtgtggcatttatgtgtgtgtgtgtgtgtgtgtgtttttcctgtttgcccagcagtgcattgtgggttccaagagtgggtagtgtgtgtatgtgtgtgtgtcagagggagacctggcaggcacctctttgagagtagctgtggtcagagctgtttggtcagtgcattatgttgaatgaggtccaggaacccagagccacccagcagacaccactgtggcttgccagctgccaagatggagaagcatgtgcccctgtagagcgtctccccagaaccagaccccgagccactcgcttcctctgtgctgtgacaacattggtgccaggggagatggtgtttttcaaagggacctactgtagccactttaatttacaattaagagccttagtttgacttaacacttttgtaggcttttcattgtgtatttttgtgtatgtgtgcatatagcagctactctgtagcagaggtgggtagagacacttaatagtatcatgtcgcatgcagatgtcacatcggcctctgcaaaaactgtactgtcttgtttctgcattagacttaagtagtcatgtgaatatactgctatgtcacttttaatattacgagttttatacttggaaaatggtacttgcttcttttaaatctctgtcttctctaacctcccccttcccatttcaatgctcccttcctaatttcagcaataatctcaaaaagcaattaaatagttaaatgaccctaattgtaaaaaaaaaaaaaaa

SEQ ID NO: 2507 - protein, 568 aa, Homo sapiens
MPSTDLLMLKAFEPYLEILEVYSTKAKNYVNGHCTKYEPWQLIAWSVVWTLLIVWGYEFVFQPESLWSRFKKKCFKLTRKMPIIGRKIQDKLNKTKDDISKNMSFLKVDKEYVKALPSQGLSSSAVLEKLKEYSSMDAFWQEGRASGTVYSGEEKLTELLVKAYGDFAWSNPLHPDIFPGLRKIEAEIVRIACSLFNGGPDSCGCVTSGGTESILMACKAYRDLAFEKGIKTPEIVAPQSAHAAFNKAASYFGMKIVRVPLTKMMEVDVRAMRRAISRNTAMLVCSTPQFPHGVIDPVPEVAKLAVKYKIPLHVDACLGGFLIVFMEKAGYPLEHPFDFRVKGVTSISADTHKYGYAPKGSSLVLYSDKKYRNYQFFVDTDWQGGIYASPTIAGSRPGGISAACWAALMHFGENGYVEATKQIIKTARFLKSELENIKGIFVFGNPQLSVIALGSRDFDIYRLSNLMTAKGWNLNQLQFPPSIHFCITLLHARKRVAIQFLKDIRESVTQIMKNPKAKTTGMGAIYGMAQTTVDRNMVAELSSVFLDSLYSTDTVTQGSQMNGSPKPH

SEQ ID NO: 2508 - DNA, 1025 bp, Homo sapiens
cggggtgggattccaacccagaagcgggcatttggagccctcatgcttcaccctagctccctgaaacaagcacggaggatggctctgagcagcgaggaaagtgctggaagcaagcaggccgagcgcgtccctggctggggacgttaatcattaccggagggcggcccgagcgcggccccgccccgggacggcagcctgcgcgcccggccgccgcctgccctctccgctggccacctgctgccgcccgcgccatggctggcaaagcacacaggctgagcgctgaggagagggaccagctgctgccaaacctgagggctgtggggtggaatgagctggaaggccgtgatgccatcttcaagcagtttcatttcaaagacttcaacagggcctttgggttcatgacaagagtggccctgcaggctgagaaactggaccaccatcctgaatggtttaacgtgtacaacaaggtccacatcacgctgagcacccatgagtgtgccggcctttcagaacgggacataaacctggccagcttcatcgaacaagtagcagtgtccatgacatagaccctgcccttcctctttgaattcttccgggggaaggggtgactgaactgggagtccagggagggagctgaggagcccttaccctcccaccactcccctcccaagacccagccgccgccgttgagggctgagtccttgctgtgggatgtgccagtgtccccaccaacaccaggaatttagaccttttccctgcaccactctcttcatcctgggggctctgttacactaatttgaataaactctcccctttctttgcaacttcccagcaacaataatgattttcttgccaggccgtctcttgctccctaattcatttcccaggaagctgtgatacagggtgaaataaagtcttgtcttagaaaccaggaccctaaaccccacactatgtaatagaaacacatgtgtttttatgtctcaaataaaactattatatcacttggaaaaaaaaaaaaaaaaaaa

SEQ ID NO: 2509 - protein, 104 aa, Homo sapiens
MAGKAHRLSAEERDQLLPNLRAVGWNELEGRDAIFKQFHFKDFNRAFGFMTRVALQAEKLDHHPEWFNVYNKVHITLSTHECAGLSERDINLASFIEQVAVSMT

SEQ ID NO: 2510 - DNA, 3935 bp, Homo sapiens
cccacgcgtccgggctagggcgccggagccgcacgcagccgcggggctccgagaggcgcgcactggggctgggactgcgcggcgccgccgctgcgagcgccactgagcggtcgcgcaacttcggaggcacagcgccggagccaggcgagcgctcagagacccggagccagaggggcgcgccggagcctcgttcgagagccggcgccaggcacccaccgcgctccgagtgccaggcggccctccgcgcagcgtggcttccgctgcccccacggaaggcacgggctggcgctgccgggcgccggggaggacggcgaggaggaggcggcggcggcggagacggcggcggcgagactggggccagggagacagccctgggggagaggcgcccgaaccaggccgcgggagcatgggggcccggagcggagctcggggcgcgctgctgctggcactgctgctctgctgggacccgaggctgagccaagcaggcactgattctggcagcgaggtgctccctgactccttcccgtcagcgccagcagagccgctgccctacttcctgcaggagccacaggacgcctacattgtgaagaacaagcctgtggagctccgctgccgcgccttccccgccacacagatctacttcaagtgcaacggcgagtgggtcagccagaacgaccacgtcacacaggaaggcctggatgaggccaccggcctgcgggtgcgcgaggtgcagatcgaggtgtcgcggcagcaggtggaggagctctttgggctggaggattactggtgccagtgcgtggcctggagctccgcgggcaccaccaagagtcgccgagcctacgtccgcatcgcctacctgcgcaagaacttcgatcaggagcctctgggcaaggaggtgcccctggaccatgaggttctcctgcagtgccgcccgccggagggggtgcctgtggccgaggtggaatggctcaagaatgaggatgtcatcgaccccacccaggacaccaacttcctgctcaccatcgaccacaacctcatcatccgccaggcccgcctgtcggacactgccaactatacctgcgtggccaagaacatcgtggccaaacgccggagcaccactgccaccgtcatcgtctacgtgaatggcggctggtccagctgggcagagtggtcaccctgctccaaccgctgtggccgaggctggcagaagcgcacccggacctgcaccaaccccgctccactcaacggaggggccttctgcgagggccaggcattccagaagaccgcctgcaccaccatctgcccagtcgatggggcgtggacggagtggagcaagtggtcagcctgcagcactgagtgtgcccactggcgtagccgcgagtgcatggcgcccccaccccagaacggaggccgtgactgcagcgggacgctgctcgactctaagaactgcacagatgggctgtgcatgcaaaataagaaaactctaagcgaccccaacagccacctgctggaggcctcaggggatgcggcgctgtatgcggggctcgtggtggccatcttcgtggtcgtggcaatcctcatggcggtgggggtggtggtgtaccgccgcaactgccgtgacttcgacacagacatcactgactcatctgctgccctgactggtggtttccaccccgtcaactttaagacggcaaggcccagcaacccgcagctcctacacccctctgtgcctcctgacctgacagccagcgccggcatctaccgcggacccgtgtatgccctgcaggactccaccgacaaaatccccatgaccaactctcctctgctggaccccttacccagccttaaggtcaaggtctacagctccagcaccacgggctctgggccaggcctggcagacggggctgacctgctgggggtcttgccgcctggcacataccctagcgatttcgcccgggacacccacttcctgcacctgcgcagcgccagcctcggttcccagcagctcttgggcctgccccgagacccagggagcagcgtcagcggcacctttggctgcctgggtgggaggctcagcatccccggcacaggggtcagcttgctggtgcccaatggagccattccccagggcaagttctacgagatgtatctactcatcaacaaggcagaaagtaccctcccgctttcagaagggacccagacagtattgagcccctcggtgacctgtggacccacaggcctcctgctgtgccgccccgtcatcctcaccatgccccactgtgccgaagtcagtgcccgtgactggatctttcagctcaagacccaggcccaccagggccactgggaggaggtggtgaccctggatgaggagaccctgaacacaccctgctactgccagctggagcccagggcctgtcacatcctgctggaccagctgggcacctacgtgttcacgggcgagtcctattcccgctcagcagtcaagcggctccagctggccgtcttcgcccccgccctctgcacctccctggagtacagcctccgggtctactgcctggaggacacgcctgtagcactgaaggaggtgctggagctggagcggactctgggcggatacttggtggaggagccgaaaccgctaatgttcaaggacagttaccacaacctgcgcctctccctccatgacctcccccatgcccattggaggagcaagctgctggccaaataccaggagatccccttctatcacatttggagtggcagccagaaggccctccactgcactttcaccctggagaggcacagcttggcctccacagagctcacctgcaagatctgcgtgcggcaagtggaaggggagggccagatattccagctgcataccactctggcagagacacctgctggctccctggacactctctgctctgcccctggcagcactgtcaccacccagctgggaccttatgccttcaagatcccactgtccatccgccagaagatatgcaacagcctagatgcccccaactcacggggcaatgactggcggatgttagcacagaagctctctatggaccggtacctgaattactttgccaccaaagcgagccccacgggtgtgatcctggacctctgggaagctctgcagcaggacgatggggacctcaacagcctggcgagtgccttggaggagatgggcaagagtgagatgctggtggctgtggccaccgacggggactgctgagcctcctgggacagcgggctggcagggactggcaggaggcaggtgcagggaggcctggggcagcctcctgatggggatgtttggcctctgcttcctcccagttcacagccagagttgcctctcctcctcctcttccccaacccccagaccatgaccagccttagaaaatccatgtactctgttgttagagggcccagagttccttctccacccccgctctctctctcttggcctgagatctctgtgcaggaaccaagatggggctgaagcctctggaggcagttggttgggggcgggcaggcaggaggccctccctccacccccccaccctcagcccggcaacttctgggttccatgggttttagttccgttctcgttttcttcctccgttattgatttctcctttctccctaagcccccttctgcttccacgcccttttcctctttgaagagtcaagtacaattcagacaaactgctttctcctgtccaaaagcaaaaaggcaaaggaaagaaagaaagcttcagaccgctagtaaggctcaaagaagaagaaaaacaccaaaaccacaagggaaaagaaaaacccagtttcttaggaaacgcaaacgatttattatccagattatttggataagtcctttttaagaaaaaaaaaagaaaatgaaaaacaacacaaaaaaaaaaaaaaaa

SEQ ID NO: 2511 - protein, 945 aa, Homo sapiens
MGARSGARGALLLALLLCWDPRLSQAGTDSGSEVLPDSFPSAPAEPLPYFLQEPQDAYIVKNKPVELRCRAFPATQIYFKCNGEWVSQNDHVTQEGLDEATGLRVREVQIEVSRQQVEELFGLEDYWCQCVAWSSAGTTKSRRAYVRIAYLRKNFDQEPLGKEVPLDHEVLLQCRPPEGVPVAEVEWLKNEDVIDPTQDTNFLLTIDHNLIIRQARLSDTANYTCVAKNIVAKRRSTTATVIVYVNGGWSSWAEWSPCSNRCGRGWQKRTRTCTNPAPLNGGAFCEGQAFQKTACTTICPVDGAWTEWSKWSACSTECAHWRSRECMAPPPQNGGRDCSGTLLDSKNCTDGLCMQNKKTLSDPNSHLLEASGDAALYAGLVVAIFVVVAILMAVGVVVYRRNCRDFDTDITDSSAALTGGFHPVNFKTARPSNPQLLHPSVPPDLTASAGIYRGPVYALQDSTDKIPMTNSPLLDPLPSLKVKVYSSSTTGSGPGLADGADLLGVLPPGTYPSDFARDTHFLHLRSASLGSQQLLGLPRDPGSSVSGTFGCLGGRLSIPGTGVSLLVPNGAIPQGKFYEMYLLINKAESTLPLSEGTQTVLSPSVTCGPTGLLLCRPVILTMPHCAEVSARDWIFQLKTQAHQGHWEEVVTLDEETLNTPCYCQLEPRACHILLDQLGTYVFTGESYSRSAVKRLQLAVFAPALCTSLEYSLRVYCLEDTPVALKEVLELERTLGGYLVEEPKPLMFKDSYHNLRLSLHDLPHAHWRSKLLAKYQEIPFYHIWSGSQKALHCTFTLERHSLASTELTCKICVRQVEGEGQIFQLHTTLAETPAGSLDTLCSAPGSTVTTQLGPYAFKIPLSIRQKICNSLDAPNSRGNDWRMLAQKLSMDRYLNYFATKASPTGVILDLWEALQQDDGDLNSLASALEEMGKSEMLVAVATDGDC

SEQ ID NO: 2512 - DNA, 5316 bp, Homo sapiens
cggacgcgtgggaacgaagccacccattacggtatgatgatgtcaaacgtgatgctgatgctacagttacagcccctgctggcgcagcctctctgattctctctccctctccgcgtccagtgctgggctttttcagacaagtgcatctcctaaccaggtcacatttcagccgcgacccactctccgccagtcaccggaggcagaccgcgggaggagagctgaggacagccgcgtgcgcttcgccagcagcggggtgggaggaaggacattaaaatactgcagaagtcaagaccccccaggtcgaacccagaccacgatgcgcgccccgggctgcgggcggctggtgctgccgctgctgctcctggccgcggcagccctggccgaaggcgacgccaaggggctcaaggagggcgagacccccggcaatttcatggaggacgagcaatggctgtcgtccatctcgcagtacagcggcaagatcaagcactggaaccgcttccgagacgaagtggaggatgactatatcaagagctgggaggacaatcagcaaggagatgaagccctggataccaccaaggacccctgccagaaggtgaagtgcagccgccacaaggtgtgcattgcccagggctaccagcgggccatgtgcatcagtcgcaagaagctggagcacaggatcaagcagccgaccgtgaaactccatggaaacaaagactccatctgcaagccctgccacatggcccagcttgcctctgtctgcggctcagatggccacacttacagctctgtgtgtaagctggagcaacaggcgtgcctgagcagcaagcagctggcggtgcgatgcgagggcccctgcccctgccccacggagcaggctgccacctccaccgccgatggcaaaccagagacttgcaccggtcaggacctggctgacctgggagatcggctgcgggactggttccagctccttcatgagaactccaagcagaatggctcagccagcagtgtagccggcccggccagcgggctggacaagagcctgggggccagctgcaaggactccattggctggatgttctccaagctggacaccagtgctgacctcttcctggaccagacggagctggccgccatcaacctggacaagtacgaggtctgcatccgtcccttcttcaactcctgtgacacctacaaggatggccgggtctctactgctgagtggtgcttctgcttctggagggagaagcccccctgcctggcagagctggagcgcatccagatccaggaggccgccaagaagaagccaggcatcttcatcccgagctgcgacgaggatggctactaccggaagatgcagtgtgaccagagcagcggtgactgctggtgtgtggaccagctgggcctggagctgactggcacgcgcacgcatgggagccccgactgcgatgacatcgtgggcttctcgggggactttggaagcggtgtcggctgggaggatgaggaggagaaggagacggaggaagcaggcgaggaggccgaggaggaggagggcgaggcaggcgaggctgacgacgggggctacatctggtagacgccctcagaagccggctgccgggggggactcaacagcagagctctgagcagcagcaggcaacttcgagaacggatccagaaatgcagtcagaaggaccctgctccacctggggggactgggagtgtgagtgtgcatggcatgtgtgtggcacagatggctgggacgggtgacagtgtgagtgcatgtgtgcatgcatgtgtgtatgtgtgtgtgtgtgtggcatgcgctgacaaatgtgtccttgatccacactgctcctggcagagtgagtaacccaaaggccccttcggcctccttgtagctgttttctttccttttgttgttggttttaaaatacattcacacacaaatacaaattgacaggtcaaaatccatgaaatgagatcccccagccgtgtcctccagcccagccctgaccccttggtttctaccctggctccccttggtttctaccctggctcaaccgacccctgtctgcccttctccctcctgcttctgaggtcaagctctggcctgcgagcctgtccccattgcaaaggggagggaggggcagggagctgtctaccagctgaggtcctcccaaaactgggccgatgtggtgtgacatccccaccagcctcagatgagacgggccaggacgcccagccacagcaagccctgtccctttgccggatccccaaacactagagaagctctcctaacccaaggcggagaatgaaggtggtggcggcagaggaggagggcagcagctgagaggccagggacagggtgcctcgccaagctgtctgaggtctgtcccaggtggcccaggtggtgcaggtagaacagggtgaggagagggggtcggctcaacaggaggaggctgtggctgcagagcctggaggagcttttaggtgttgagatggggcagctctgaatcctagaccctggaatagcctgtcccttttctctgggtctcgtggtggagccatgatctgggctgctctcttggggacactgggtggtggttacacagttgacctctgcctggctcccccttggtgcaactcctgcctccatcccccttgctggggtcccctcatccacttgagggcgcctgagggccaggagcagcaggcaaggagcctgggtctaggctaagggggtgtgtgcccacctcctccctgacccttaacactcctgtcctgcccagaccaacagagagagctgtccctgagaccccggagagaagcagctgccgaaagctgcagcctttccgcactctgagaccatgatcttcctcctgccaggggagagccacccacaggccatgtccagccccacttccctcagcccccagggcttccttctggcccctctgaggattccctagggctgccccgcagaggggcttccccaagctctgttttgaagcctgcaatgtggaaaagtgagaagtcagagggaacaggacaggtgcagccgggctctgaggccacacctcacacctcgctgttccccaacatcccctgagcagtgtgagctcatctcaccagatgagaagaggccctgtgcatttcttttgtttgtttgttgctgttttcccccacccatccagttctcctcagcaaagcaaattccttaacacctttggtggagaatttcttacccagacttggggctgtgatgcccttcagtgcgtggtgagtgcagcgtgtgtgcgtgtgcctgtgtgtgaacctgggggccatcctggtggcctgggagcgtgaggagaggccccctgtgtgctgggtgagtggtgggtgtggggtcaatgcagtgaggctctctgggtgaggctcccaacctggcagtccccagcctcccagcatctgtgagcgtctgttggactttacagaagagcctcatcccgtctgcccctcactctgccctggaatcaacatcttccgagtccttcttgggggaaatagcagagccccacttaactccataaactgcttcccattccgcagcccagttctgattgttgaggtgtcgcgtcgttccaggtcccccagtcccctctttctcctgtcctctctctgtccttcacctccccactccagccccggctcagttcagggaaatgctgttccatatcagccctctgctctctgaggcagccgcgcctctgactcggagctacttgaaacttctgctcttgctaggattggagtctacctatctcttccatttgtcccagctggagttctggaactttcctcctcggggtgggggtgggggttgttaaggatgctggggggcctggggaaggaaggagttcagaggaagggtgtcccctgtcctcttgatgtcaccctccgctcctgggacacgtgctctctctgtctctgggtcttctggctgtgcacgtttgtgtgtccttgtaaatatgttttaggaagaaagcaaaagggactgaactagcctctggtaggattgcaggggtccagccttgcctgtttccgaagcccccacactgcctttcgccccactgagactggtcccctcaaaaggtagacaaaacagcagctccctgtggagctgaagggcggcctcaaagtggctttttgttagacaaggttaaggtttcctcatgagcaaggttgcagatcggtccttcctcagctccttgatttgtgaccttgaccaaggggcctgccacccagcccctccagtgccctctcctcgatgcctcgctccttcctgcccccactcccctggcttaggcaggtaggggaattagggccatgctggaagaagcttaaccatgtgttcaaagaacggtttcttgcttgcttggtcctggaactccccttggctgccccaggcctccttggcccatgggtgctgggggaggtggatgtcagatctggtaggttgcagcagagaaaataaatgtgccttgagagaccactcagagagggtccaagggtgatggagaaggaagcatggcctgggagcttggaagggaggggtggtgggtggcggcatcttgactgccccctgttgtcccacacgtggggggtggtcaccccccttcactccagcccgcctgccttcagccttccatgagcttcacctgcttccaacttcactttggagggggtggggtccgttggcatcaacacggggaccctctgcttcaccaaagcccgagccctcagcccctggggagaacaaatggctgagctttgatacctggggtcgtcgagaggctgcgggctggcggcagtcccaggggagagacaccacagaaggagacccagacatcccgaggaagttcccagcagagcaaactgctttccagcctgaagcctgcttaaactgtgtgatgtgcaataactgagcttagagttaggaattgtgttcaagtgcttggatttccgtctgtagatttaactgctgaaattgtatctctcagtaattttagatgtcttttaaaaaattgaaaaacaaagtgttagactgtgtgcgtgtgcgttgatgggcactcaagagtcccgtgagtcatccagccctgcctttcccctgcgcccccatcctctcacgtcccgccctgcctccacttggggaccctgcctcgtgtcgtctttatctgcctattactcagcctaaggaaacaagtacactccacacatgcataaaggaaatcaaatgttatttttaagaaaatggaaaataaaaactttataaacacc

SEQ ID NO: 2513 - protein, 424 aa, Homo sapiens
MRAPGCGRLVLPLLLLAAAALAEGDAKGLKEGETPGNFMEDEQWLSSISQYSGKIKHWNRFRDEVEDDYIKSWEDNQQGDEALDTTKDPCQKVKCSRHKVCIAQGYQRAMCISRKKLEHRIKQPTVKLHGNKDSICKPCHMAQLASVCGSDGHTYSSVCKLEQQACLSSKQLAVRCEGPCPCPTEQAATSTADGKPETCTGQDLADLGDRLRDWFQLLHENSKQNGSASSVAGPASGLDKSLGASCKDSIGWMFSKLDTSADLFLDQTELAAINLDKYEVCIRPFFNSCDTYKDGRVSTAEWCFCFWREKPPCLAELERIQIQEAAKKKPGIFIPSCDEDGYYRKMQCDQSSGDCWCVDQLGLELTGTRTHGSPDCDDIVGFSGDFGSGVGWEDEEEKETEEAGEEAEEEEGEAGEADDGGYIW

SEQ ID NO: 2514 - DNA, 2090 bp, Homo sapiens
ggaattccgggtcctcctcctcgccctaccttggtttacctgcagccgcctagtcctcttctccttctctttgatgattcagggcctcggcttccctcacgatattgcagaaagacacagctttcctcttcctctccaaaccacctcgaagcaggggcataattggaatatcatttggagaaagtgtcatggaagttctgcgtccacagcttataagaattgatggccggaattacaggaagaatccagtccaagaacagacctatcaacatgaagaagatgaagaggacttctatcaaggctccatggagtgtgctgatgagccctgtgatgcctacgaggtggagcagaccccacaaggattccggtctactttgagggcccccagcttgctctataagcatatagttggaaagagaggggacactaggaagaaaatagaaatggagaccaaaacttctattagcattcctaaacctggacaagacggggaaattgtaatcactggccagcatcgaaatggtgtaatttcagcccgaacacggattgatgttcttttggacacttttcgaagaaagcagcccttcactcacttccttgcctttttcctcaatgaagttgaggttcaggaaggattcctgagattccaggaggaagtactggcgaagtgctccatggatcatggggttgacagcagcattttccagaatcctaaaaagcttcatctaactattgggatgttggtgcttttgagtgaggaagagatccagcagacatgtgagatgctacagcagtgtaaagaggaattcattaatgatatttctgggggtaaacccctagaagtggagatggcagggatagaatacatgaatgatgatcctggcatggtggatgttctttacgccaaagtccatatgaaagatggctccaacaggctacaagaattagttgatcgagtgctggaacgttttcaggcatctggactaatagtgaaagagtggaatagtgtgaaactgcatgctacagttatgaatacactattcaggaaagaccccaatgctgaaggcaggtacaatctctacacagcggaaggcaaatatatcttcaaggaaagagaatcatttgatggccgaaatattttaaagttgtttgagaacttctactttggctccctaaagctgaattcaattcacatctctcagaggttcaccgtagacagctttggaaactacgcttcctgtggacaaattgacttctcctgaggtggatcttggaaagcactagaaactaaacatcttcaccaggtgctgaagaaaagtgtcttcgttttaattgccaagcagggatgtggacatttggatggtgactttcctgggtggttccccatagattcaccattgcctctaatggtgtctacacccgtcatactaccagctgagatggtggtgggcataaggagaatttgtgcctataacccttagtgtgttctggttttttttcttttaatttttaaattgtcgtaaaatactcataaaacatactgtcttcaccatttttaagtgcacagttcagtaacgttaactgttaatacattcataatgctgtgtggccgtcaccgccgtccatctccataggcttctcagcttgtaaaatggaaactgtacccattaaacagtaattcccactcctcccagcccccgcagccaccattctgctttctgtctctctggttttgactattctcagtatctcatataagtggaatcatacagtgacttgtctttttgtgactggcttatttcacttagcataatgtcctcaaggttcatccatgttgtgtcaggtgacaggatttccttcctgtattatacatataatggaatgttccgttacatgtgcgtaccacactctgttcctccatcagtgaacacttggcttgcttcctcttgactattgggagtagtgctaatacagacacgggggtgcaaatatctctttgagactctgcctttaattcctttaccacccagagttttatctttagcaaaataaccattaaagttgtttgccttttacgaaaaaaaaaaaaa

SEQ ID NO: 2515 - protein, 357 aa, Homo sapiens
MEVLRPQLIRIDGRNYRKNPVQEQTYQHEEDEEDFYQGSMECADEPCDAYEVEQTPQGFRSTLRAPSLLYKHIVGKRGDTRKKIEMETKTSISIPKPGQDGEIVITGQHRNGVISARTRIDVLLDTFRRKQPFTHFLAFFLNEVEVQEGFLRFQEEVLAKCSMDHGVDSSIFQNPKKLHLTIGMLVLLSEEEIQQTCEMLQQCKEEFINDISGGKPLEVEMAGIEYMNDDPGMVDVLYAKVHMKDGSNRLQELVDRVLERFQASGLIVKEWNSVKLHATVMNTLFRKDPNAEGRYNLYTAEGKYIFKERESFDGRNILKLFENFYFGSLKLNSIHISQRFTVDSFGNYASCGQIDFS

SEQ ID NO: 2516 - DNA, 3277 bp, Homo sapiens
cgaacacgccgcggtcctcgtcgtggtgagcgcagccactcaggctggtcctgggggtggggctgtaggggaaagtgctaaagccgctgagtgaagtaagaactctgctagagaggaaatggctgcttcatcatcatcctcctcagctggtggggtcagtggaagttctgtcactggatctggtttcagtgtctcagaccttgccccaccacggaaagcccttttcacctaccccaaaggagctggagagatgttagaagatggctctgagagattcctctgcgaatctgtttttagctatcaagtggcatccacgcttaaacaggtgaaacatgatcagcaagttgctcggatggaaaaactagctggtttggtagaagagctggaggctgacgagtggcggtttaagcccatcgagcagctgctgggattcaccccctcttcaggttgatactgcctggatggtcacctctggtgcgcagcaagtgcaaagccagtgggggactttctcacagcttacatagccatccagagatccacagctacgtcactgaattgttaatgcacatttgtacttggtttctctgtatctattcacaggcaacaaatacttatatgtgtgatctttcagggaatgttttgtttatttgtttttaaaagtattgggaatcagattaagacaatcagtttcagagaaccaggaggtttggggttaagagatactcaaaaattttcacaagccaagtagggcatatatcagatttggccaactgaatggcgtctgtcctgtcatccatatggtgcctggaaatatttaccagtcaaggtcaaggtcagcatctgtggttaaaaatatagcattctgacctaaaaaagttattttgcagatgaatgtgttttcaactcaggacctatccaaatgaggaatttttaaatattcttttttttttcctatttttagacatcaattctatagattctgactttttctaacctcttatagacatgccaaatgctggcaaaaagaagtgctttttggatatggcagcacttgtaaaaataaagcagtaagcaaaatccttttaaacacagaaatcctgagttcttctcattggtggactcaagcaattctgtagcaaataaatcctttgaaagagctccaaattggtggcattatcctttcaaaatctcagggatttgggatgaagtgaagaggtcaaattactttttagaagaagggaatctaaaaaccatctctcctaaacaaatggtagactggctttacttaagggatatttgtctttataggagtacataaatttatcttaatgatatttaagtagtttttttttttttttgggacgaagttttgctcttgttgcccaggctgtatcgcaatggcgcggtctctgctcactgcagcatccgcctcccgggttcgggcggttctcctgcctcagcctcccgagtagctgggattacaggcgcccgccaccacacccagctaattttttgtatatttggtagagacggggtttcaccgtgttgaccaggctggtctcgagcttctggcctcaggtgatccacctgcctcagcctcccaaattgctgggattgcaggcgtgagccaccttgcccagccaatttttttttaaagagacatggtcttgctatgttgcccaggttggtcttgaactcctggcctcaagagatccccccaaccttggcctccaaagtgctgggattacaggcatgagccaccgcgcctggcctcaagtaagtttttataccatgataggggaaaacctggaaggctaagagatgtgctgttttccttcatgggaccccactttccacagtaaacaactggtataatcatttattacgttgtatgcaaattttgccttagacaacatttgtctggttccttattaataacttgcatctgatctgcttagagttgcttaattataagtaaatataatcccagtagcatttagccttaatctcaagagttcaaaatgtttaacacattctacctgacgggaggtggtgacctcattcagtcggttaagagcctgagccctgtgaagttaaacacctgctcatggtcacatagcccaggcagaagaaaatctcggacttggaatagatcccagttgcctgataattcatctcattattgcctctaaagcaaattggagactgggcacagtggctcccacctttaatcccagcacctggggaggctgaggtgagtggatcactagaggtcaggagttcaagaccagtctggccgacatggtgaaactcagtctctattgaaaatacaaaaattagctcagtgtggtggcacacacttgtaatcccagctactcaggaggctgaggcatgagaatcgcttaaacccaggaggcggaggttgcagtgagctgagatcacaccattgcactctagtctgggtgacagagcgagactctgtctcaaaaaaaaaaaaataaagccgggcgtggtggctcacgcctgtaatcccggcactttgggaggctgaggcaggcggattgcctgagatcgggagttcgagaccagcctggccaacatggtgaaaccttgtctctactaaaactacaaaaaaaattggccaggcgtggtggcgggcgcctgtaatcccagctactcgggaggctgaggcagcagaatcgtttgaacccgggaggcggaggttgcagtgagtggagatcgtgcctgtgtgctccagcctgagcaacaagagcgaaactgtctcaaaaaaaagaagaaaataaataaataaaaatcagagcacaagaagtaccagtccaccaactcacattttctatattaataattcttaactaaaagaagttccatattcgacagcattttagttttttaatagtacttattagcatcaaccatcttgataatcaccaagggaaaaattaaaaatacctagactgcaataaacctttaaattggattttcagtgagaatttagaagcaatcactacctttctcgtttcatttgtgtaaccatgcagcataggcactgtgttacatcatctttacgctttggtatttgaacttattacagaattttttctctaaattggatgtttctttatatgaccttggaaactgaagtgatcttagcattaaacaaaaatgctttttgaaaaaaaaaaaaaaaaaaaaaaaaaaaaaaaaaaaaaaaaaaaaaaaaaaaaaaaaaaaaaaaaaaaaaaaaaaaaaaaaaaaa

SEQ ID NO: 2517 - protein, 110 aa, Homo sapiens
MAASSSSSSAGGVSGSSVTGSGFSVSDLAPPRKALFTYPKGAGEMLEDGSERFLCESVFSYQVASTLKQVKHDQQVARMEKLAGLVEELEADEWRFKPIEQLLGFTPSSG

SEQ ID NO: 2518 - DNA, 1752 bp, Homo sapiens
agggcgcagcaggccaagggggaggtgcgagcgtggacctgggacgggtctgggcggctctcggtggttggcacgggttcgcacacccattcaagcggcaggacgcacttgtcttagcagttctcgctgaccgcgctagctgcggcttctacgctccggcactctgagttcatcagcaaacgccctggcgtctgtcctcaccatgcctagcctttgggaccgcttctcgtcgtcgtccacctcctcttcgccctcgtccttgccccgaactcccaccccagatcggccgccgcgctcagcctgggggtcggcgacccgggaggaggggtttgaccgctccacgagcctggagagctcggactgcgagtccctggacagcagcaacagtggcttcgggccggaggaagacacggcttacctggatggggtgtcgttgcccgacttcgagctgctcagtgaccctgaggatgaacacttgtgtgccaacctgatgcagctgctgcaggagagcctggcccaggcgcggctgggctctcgacgccctgcgcgcctgctgatgcctagccagttggtaagccaggtgggcaaagaactactgcgcctggcctacagcgagccgtgcggcctgcggggggcgctgctggacgtctgcgtggagcagggcaagagctgccacagcgtgggccagctggcactcgaccccagcctggtgcccaccttccagctgaccctcgtgctgcgcctggactcacgactctggcccaagatccaggggctgtttagctccgccaactctcccttcctccctggcttcagccagtccctgacgctgagcactggcttccgagtcatcaagaagaagctgtacagctcggaacagctgctcattgaggagtgttgaacttcaacctgagggggccgacagtgccctccaagacagagacgactgaacttttggggtggagactagaggcaggagctgagggactgattcctgtggttggaaaactgaggcagccacctaaggtggaggtgggggaatagtgtttcccaggaagctcattgagttgtgtgcgggtggctgtgcattggggacacatacccctcagtactgtagcatgaaacaaaggcttaggggccaacaaggcttccagctggatgtgtgtgtagcatgtaccttattatttttgttactgacagttaacagtggtgtgacatccagagagcagctgggctgctcccgccccagcccggcccagggtgaaggaagaggcacgtgctcctcagagcagccggagggaggggggaggtcggaggtcgtggaggtggtttgtgtatcttactggtctgaagggaccaagtgtgtttgttgtttgttttgtatcttgtttttctgatcggagcatcactactgacctgttgtaggcagctatcttacagacgcatgaatgtaagagtaggaaggggtgggtgtcagggatcacttgggatctttgacacttgaaaaattacacctggcagctgcgtttaagccttcccccatcgtgtactgcagagttgagctggcaggggaggggctgagagggtgggggctggaacccctccccgggaggagtgccatctgggtcttccatctagaactgtttacatgaagataagatactcactgttcatgaatacacttgatgttcaagtattaagacctatgcaatattttttacttttctaataaacatgtttgttaaaacagtt

SEQ ID NO: 2519 - protein, 232 aa, Homo sapiens
MPSLWDRFSSSSTSSSPSSLPRTPTPDRPPRSAWGSATREEGFDRSTSLESSDCESLDSSNSGFGPEEDTAYLDGVSLPDFELLSDPEDEHLCANLMQLLQESLAQARLGSRRPARLLMPSQLVSQVGKELLRLAYSEPCGLRGALLDVCVEQGKSCHSVGQLALDPSLVPTFQLTLVLRLDSRLWPKIQGLFSSANSPFLPGFSQSLTLSTGFRVIKKKLYSSEQLLIEEC

SEQ ID NO: 2520 - DNA, 4342 bp, Homo sapiens
aatctgggcgtgcaccattattgacacctacaccagccgtccctttcttagaagacatacggtagcacttccaccctcgctcaaaactcgggaaaggaggggcggagggtggatgtcatcactccgcgcccggctgcccgcgacgcgccggcgggtggcgcagcccttcgctcgcccggcctccccctccctggttccgcgttctggttccgccatggaatccaacaaggatgaagctgagcgctgtatcagcatcgccctcaaggccatccagagcaaccagcccgaccgggcgctccgcttcctggagaaggcacagcggctgtatccgacgccgcgagttcgcgccctgattgagtccctcaaccagaaaccacagactgccggtgaccaacccccacccacagacacaacccatgccacccacaggaaagcaggtgggaccgatgccccctcggccaacggtgaagctggaggagagagcaccaaaggctacactgcagaacaggttgcagctgtgaaaagggtcaagcaatgtaaagattactatgagatcctgggggtgagcagaggggcctcggatgaggacctgaagaaggcctaccgcagactggccctcaaattccacccagacaagaaccacgcacctggtgccactgaagccttcaaagccattggcacagcatatgcggtactcagcaacccggagaagaggaagcagtatgaccagttcggcgatgacaagagccaggcggcccggcacggccatgggcatggggatttccaccgtggctttgaggccgacatctcccctgaagacctcttcaacatgttctttggcggcggcttcccttctagtaacgtccacgtctacagcaacggccgcatgcgctatacctaccagcaaaggcaggaccgcagggacaaccagggtgatggcgggctaggggtgtttgtgcagctgatgcctatcctcatcctgattctcgtgtcagctctcagccagctcatggtctccagtccaccctacagtctgagtccaagaccgtccgtgggccacatccacaggcgagtcactgaccacctgggtgtcgtctactatgtgggagacactttctccgaagagtacacaggctccagcctcaaaacagtcgagcggaatgtggaagatgattatatcgccaacctccggaacaactgctggaaggagaagcagcagaaggaaggcttgctgtaccgggcacgctactttggcgacacagatatgtaccacagagcacagaagatgggcacccccagctgcagccgactgtcagaggtgcaggcctccctgcatggatagtcctgggccagccacaccaccgaggtccaagtatgagccagggctgcctccaccctgcaactcctggcagctttggccctggtcatgagcagaggagggagggggagaaagggaggaagcctggtgattgtggcaaagactcctgtccccagcctgacctccagcctccagagaccgagcagctgtggggcctgctgggaaaccaaggtcggtttccgccctctagcgatgctgtcctccccactcctccgctctgctccctggctccaggggtgtgggggaccccagaaccaggcagagtgggaacttgaaactgttgctgagggccacccggggcttcttggtccactccagccatcagtcagcacggccctttctccagcacagcagactattgtccgtgccctggtatttaggccatcacatatggtggggcccaagagagccccatatgcacactgcctgcctgataccaggaagaaccatgtgggaataggtgggccaagagccctcccctttctccatccctccagctaggaggaaatggagcaagatgaacaggcagccacgaggtgggtgggagctggcagtcttggtggcggcaggggccgcgggccctgaccacccccctctggtgggatctgaggcactctctcgaatgccgtcacacctggcagcctggaagccacaggcatccggccttgcccaggcatctcgcctgcggtctgaggaagggaacagaaggtcatgagttcagggtcagacgcagccgctcagcacaggaggggtggaggggaaatgagagttgctggtagcaggctccctccttctgcagcccggcgaatgggggcgctgggctctgttcccagcgtttgccagaggtggccacttcagccaagcccggagaagtgtgggcagaagcagtgaaggttcttctctgtgtgggtgccctgcccaccccctcctttgcctgtgtcctcccggcctggatccatggctgactctgcctggaggccatttgtgcctgcctctgtgctgccgcaggagggcaggccgcaagtggggttggtgggggtcgagcgggcagcacggtgcagcggtgcagtggcaaggggggctacttgtgtggcataagctagaggagccggtgccgcctgaatgccgagctaactgttgccactctcctccccagactatgaaatccctggagaatttttggtgacatgcactgagccaaggtgatggactgtatatttgaggaaagacaaacaaagaaacaaaattaaaatggaattggaggccgaacgctgcacagctgccctctctctcacccagtaaatgcagaaagctcttaggacagacagaaaacctgccatggggctgcttccctccctcgcagggctggcggaggctccgcatcgcctctctcctaggatacagaaaccatggcaacgaaagtagaatgtaaaactcgcagcagatatcagtgggaagggctgggggagggggcacccagctgcctttcctccctcacaggagccaccaccagccacctctcaggagaagccagaggccctggccaaagataggaggaagaaagagaactctccatagaatgtaatttatagatgcgtgtatatgtatatatatctatttatatgtaaataggcatatatgaagatatatatatatatagtctactttttaaactctgcagggatttggttaagttgttgagctgatttcttccatgttttagaaaatgaggcctgtttggggaaggtaccctggtgatgtttttgctagacattagctgtagctgacagcataaggagagtcgcatcagagcttttcacagccccccgaaaccccagcctggttttgatggcagcagtaatcatgatagtgtgaacccgcgaaggcctcaggattatggttaacctggagaggagcaggccatggaggcaggtgccaggtcagtattgagtcacagtagaggccccacaaggacctgcttgggtgagaccacctctcccctctcagcagcgctggtgggctctttgtcctggtgcccaggagccctccagccccctgcccacagaagggaaggcctgcagagggggccaggatctacctaaccatttccccacccctaagtccctcagtgggctttgccttataggtgccacagggcacagctccatcattgccactggtttttcctaagtcatgcaccaaggacttcagaaagttcttcctccgagtcagtcagtggtgccgggaccccagggcagcctcctcgactcctgaagaaaaggcagtgcccgtggctgcctctgtcttcactcgctgttgatgtgaccgccaggcctcctctcgtaccttggacaaaggatacacctgaaccagaatagttttcttaccctcacattgaaatgaggattttgcttaaaacagcacttgccgccagtgggaggagggaggttttatttattcccacagtttctcctgggccttctggaatgaccatgttttcctgtggcggtgggtgtgtcattgcgcccgccgtcttccaaagccttacttccccaagctgccagccaggaggtgataaccaccctcccagagtttctctcggctctttttttaaaagtcccccaacaaataggattcttgctgggaaaggaagttcggtaaggaaatgtcaaatctggtttttaaacaaggtccaaccctgcaatgaagcagccacttcagcccagagagattataagaactgatgtggccagagtgcctacccactgtggccccggtgctctgcccccacgccccgaccatctggtcttggtagatgtccctagacgggctgagccatgtgcaataagaacatagatcctaaaggatcctctggaagctgtatttcttgaattagaattctcaaattgtacatctgttaatatatgtttattatgtgactggcaaaaaaaaaaaaaaaaaaaa

SEQ ID NO: 2521 - protein, 375 aa, Homo sapiens
MESNKDEAERCISIALKAIQSNQPDRALRFLEKAQRLYPTPRVRALIESLNQKPQTAGDQPPPTDTTHATHRKAGGTDAPSANGEAGGESTKGYTAEQVAAVKRVKQCKDYYEILGVSRGASDEDLKKAYRRLALKFHPDKNHAPGATEAFKAIGTAYAVLSNPEKRKQYDQFGDDKSQAARHGHGHGDFHRGFEADISPEDLFNMFFGGGFPSSNVHVYSNGRMRYTYQQRQDRRDNQGDGGLGVFVQLMPILILILVSALSQLMVSSPPYSLSPRPSVGHIHRRVTDHLGVVYYVGDTFSEEYTGSSLKTVERNVEDDYIANLRNNCWKEKQQKEGLLYRARYFGDTDMYHRAQKMGTPSCSRLSEVQASLHG

SEQ ID NO: 2522 - DNA, 3180 bp, Homo sapiens
aatctgggcgtgcaccattattgacacctacaccagccgtccctttcttagaagacatacggtagcacttccaccctcgctcaaaactcgggaaaggaggggcggagggtggatgtcatcactccgcgcccggctgcccgcgacgcgccggcgggtggcgcagcccttcgctcgcccggcctccccctccctggttccgcgttctggttccgccatggaatccaacaaggatgaagctgagcgctgtatcagcatcgccctcaaggccatccagagcaaccagcccgaccgggcgctccgcttcctggagaaggcacagcggctgtatccgacgccgcgagttcgcgccctgattgagtccctcaaccagaaaccacagactgccggtgaccaacccccacccacagacacaacccatgccacccacaggaaagcaggtgggaccgatgccccctcggccaacggtgaagctggaggagagagcaccaaaggctacactgcagaacaggttgcagctgtgaaaagggtcaagcaatgtaaagattactatgagatcctgggggtgagcagaggggcctcggatgaggacctgaagaaggcctaccgcagactggccctcaaattccacccagacaagaaccacgcacctggtgccactgaagccttcaaagccattggcacagcatatgcggtactcagcaacccggagaagaggaagcagtatgaccagttcggcgatgacaagagccaggcggcccggcacggccatgggcatggggatttccaccgtggctttgaggccgacatctcccctgaagacctcttcaacatgttctttggcggcggcttcccttctagtaacgtccacgtctacagcaacggccgcatgcgctatacctaccagcaaaggcaggaccgcagggacaaccagggtgatggcgggctaggggtgtttgtgcagctgatgcctatcctcatcctgattctcgtgtcagctctcagccagctcatggtctccagtccaccctacagtctgagtccaagaccgtccgtgggccacatccacaggcgagtcactgaccacctgggtgtcgtctactatgtgggagacactttctccgaagagtacacaggctccagcctcaaaacagtcgagcggaatgtggaagatgattatatcgccaacctccggaacaactgctggaaggagaagcagcagaaggaaggcttgctgtaccgggcacgctactttggcgacacagatatgtaccacagagcacagaagatgggcacccccagctgcagccgactgtcagaggtgcaggcctccctgcatggatagtcctgggccagccacaccaccgaggtccaaactatgaaatccctggagaatttttggtgacatgcactgagccaaggtgatggactgtatatttgaggaaagacaaacaaagaaacaaaattaaaatggaattggaggccgaacgctgcacagctgccctctctctcacccagtaaatgcagaaagctcttaggacagacagaaaacctgccatggggctgcttccctccctcgcagggctggcggaggctccgcatcgcctctctcctaggatacagaaaccatggcaacgaaagtagaatgtaaaactcgcagcagatatcagtgggaagggctgggggagggggcacccagctgcctttcctccctcacaggagccaccaccagccacctctcaggagaagccagaggccctggccaaagataggaggaagaaagagaactctccatagaatgtaatttatagatgcgtgtatatgtatatatatctatttatatgtaaataggcatatatgaagatatatatatatatagtctactttttaaactctgcagggatttggttaagttgttgagctgatttcttccatgttttagaaaatgaggcctgtttggggaaggtaccctggtgatgtttttgctagacattagctgtagctgacagcataaggagagtcgcatcagagcttttcacagccccccgaaaccccagcctggttttgatggcagcagtaatcatgatagtgtgaacccgcgaaggcctcaggattatggttaacctggagaggagcaggccatggaggcaggtgccaggtcagtattgagtcacagtagaggccccacaaggacctgcttgggtgagaccacctctcccctctcagcagcgctggtgggctctttgtcctggtgcccaggagccctccagccccctgcccacagaagggaaggcctgcagagggggccaggatctacctaaccatttccccacccctaagtccctcagtgggctttgccttataggtgccacagggcacagctccatcattgccactggtttttcctaagtcatgcaccaaggacttcagaaagttcttcctccgagtcagtcagtggtgccgggaccccagggcagcctcctcgactcctgaagaaaaggcagtgcccgtggctgcctctgtcttcactcgctgttgatgtgaccgccaggcctcctctcgtaccttggacaaaggatacacctgaaccagaatagttttcttaccctcacattgaaatgaggattttgcttaaaacagcacttgccgccagtgggaggagggaggttttatttattcccacagtttctcctgggccttctggaatgaccatgttttcctgtggcggtgggtgtgtcattgcgcccgccgtcttccaaagccttacttccccaagctgccagccaggaggtgataaccaccctcccagagtttctctcggctctttttttaaaagtcccccaacaaataggattcttgctgggaaaggaagttcggtaaggaaatgtcaaatctggtttttaaacaaggtccaaccctgcaatgaagcagccacttcagcccagagagattataagaactgatgtggccagagtgcctacccactgtggccccggtgctctgcccccacgccccgaccatctggtcttggtagatgtccctagacgggctgagccatgtgcaataagaacatagatcctaaaggatcctctggaagctgtatttcttgaattagaattctcaaattgtacatctgttaatatatgtttattatgtgactggcaaaaaaaaaaaaaaaaaaaa

SEQ ID NO: 2523 - protein, 375 aa, Homo sapiens; identical to SEQ ID NO: 2521

SEQ ID NO: 2524 - DNA, 2387 bp, Homo sapiens
ggggtttcatctctatggctgtcagaggtgggcggctttgaccgagaggctgctggagctcgtgtttggacgcgatgtttcgtctgaactcactttctgctttggcagaactggctgtgggttctcgatggtaccatggaggatcacagcccatccagatccggcgaagactaatgatggtggctttcctgggagcatctgcagtaactgcaagtactggtcttttgtggaagggggcccatgcagaatctccaccatgtgtagacaacctaaaaagtgacatcggtgataaagggaagaataaagatgaaggggatgtttgtaaccatgagaaaaagactgcagatcttgcccctcacccagaagagaaaaagaagaaacgttctggattcagagacagaaaagtgatggaatatgagaataggattcgagcctactccacgccagacaaaatcttccgatattttgccaccttgaaagtcatcagtgagcctggtgaagcagaagtgtttatgacaccagaagattttgtgcgatccataacacccaatgaaaaacaaccagaacacttgggtctggatcaatatataataaaacgctttgatggaaagacagagaaaatttcccaggaacgagaaaaatttgctgatgaaggcagtatattttacacccttggagaatgtgggctcatatccttttcagattacattttcctcacaactgttctttccactcctcagagaaattttgaaattgccttcaagatgtttgatttgaatggagatggagaagtagatatggaagaatttgaacaggttcagagcatcattcgctcccaaaccagtatgggtatgcgccacagagatcgtccaactactggcaacaccctcaagtctggcttgtgttcagccctcacaacctacttttttggagctgatctgaagggaaagctgacaatcaaaaacttcctcgaatttcagcgtaaactgcagcatgatgttctgaagcttgagtttgaacgccatgaccctgtggatgggagaattactgagaggcagtttggtggcatgctacttgcctacagtggggtgcagtccaagaagctgaccgccatgcagaggcagctcaagaagcacttcaaagaaggaaagggtctgacatttcaggaggtggagaacttctttactttcctaaagaacattaatgatgtggacactgcattgagtttttaccatatggctggagcatctcttgataaagtgaccatgcagcaggtggccaggacagtggctaaagtggagctctcagaccacgtgtgtgatgtggtgtttgcactctttgactgtgatggcaatggcgaactgagcaataaggaatttgtttccatcatgaagcaacggctgatgagaggcctggaaaagcccaaagacatgggtttcactcgcctcatgcaggccatgtggaaatgtgcacaggaaactgcctgggacttcgctttacccaaacagtaaccccacactgcaagaggggacccctccacccccagtaccctggaccccctccgcagagtctcggcagagccctttgtgctgctgcttctggaagtagtctcccttcctcccgggatgacctcaggactctgtcggtttcccctctttacccttccccgtccccgtgttctgctgggctctgattctgcccaatgagtatccccataggttctcaaaaacatgaacaagtctgtaaagctcagacatttgtcagcctcaacagcaccacccattcaagcatcctgtggataaagaattcagggaaccatccacacacctgccaaccctgggaagcatccagttctcaaatcgtttttgctatggatttatactaacaagaacattccttgacttccctcctgctggtgttttaaagccacaagtagggaagatatctggcaggcagaaagaagtctgtgatgataaacaatgatgaggatgacctaggcaccctacgctagtgtgagaagcctgcgccccaggaaggatctgtgttagtccctgggatggctccaaggcctgctctaggaaggcagcatgctcagtgggaacacagcaagattcagaatttaaagtagttgcttcatggctctgtgcactcccttttcttcctcgcagcctccctaagatgactccagtgtgaccctgtgcttagtgagcaatagtgattgagctcatgttccctgcaagtgccatttcctctccaggatgggcctctaaagctgaggcctggctcagagcctgtttgccctctgtcttaaacaattgtaaatatcacttaaattataaccatttgcaataaacatccccaaagttaaaaaaaaaaaaaaaaaaaaa

SEQ ID NO: 2525 - protein, 478 aa, Homo sapiens
MFRLNSLSALAELAVGSRWYHGGSQPIQIRRRLMMVAFLGASAVTASTGLLWKGAHAESPPCVDNLKSDIGDKGKNKDEGDVCNHEKKTADLAPHPEEKKKKRSGFRDRKVMEYENRIRAYSTPDKIFRYFATLKVISEPGEAEVFMTPEDFVRSITPNEKQPEHLGLDQYIIKRFDGKTEKISQEREKFADEGSIFYTLGECGLISFSDYIFLTTVLSTPQRNFEIAFKMFDLNGDGEVDMEEFEQVQSIIRSQTSMGMRHRDRPTTGNTLKSGLCSALTTYFFGADLKGKLTIKNFLEFQRKLQHDVLKLEFERHDPVDGRITERQFGGMLLAYSGVQSKKLTAMQRQLKKHFKEGKGLTFQEVENFFTFLKNINDVDTALSFYHMAGASLDKVTMQQVARTVAKVELSDHVCDVVFALFDCDGNGELSNKEFVSIMKQRLMRGLEKPKDMGFTRLMQAMWKCAQETAWDFALPKQ

SEQ ID NO: 2526 - DNA, 2978 bp, Homo sapiens
ggcggcgtttccagttgagagatggcggccgccgcaggtagatcgctcctgctgctcctctcctctcggggcggcggcggcgggggcgccggcggctgcggggcgctgactgccggctgcttccctgggctgggcgtcagccgccaccggcagcagcagcaccaccggacggtacaccagaggatcgcttcctggcagaatttgggagctgtttattgcagcactgttgtgccctctgatgatgttacagtggtttatcaaaatgggttacctgtgatatctgtgaggctaccatcccggcgtgaacgctgtcagttcacactcaagcctatctctgactctgttggtgtatttttacgacaactgcaagaagaggatcggggaattgacagagttgctatctattcaccagatggtgttcgcgttgctgcttcaacaggaatagacctcctcctccttgatgactttaagctggtcattaatgacttaacataccacgtacgaccaccaaaaagagacctcttaagtcatgaaaatgcagcaacgctgaatgatgtaaagacattggtccagcaactatacaccacactgtgcattgagcagcaccagttaaacaaggaaagggagcttattgaaagactagaggatctcaaagagcagctggctcccctggaaaaggtacgaattgagattagcagaaaagctgagaagaggaccactttggtgctatggggtggccttgcctacatggccacacagtttggcattttggcccggcttacctggtgggaatattcctgggacatcatggagccagtaacatacttcatcacttatggaagtgccatggcaatgtatgcatattttgtaatgacacgccaggaatatgtttatccagaagccagagacagacaatacttactatttttccataaaggagccaaaaagtcacgttttgacctagagaaatacaatcaactcaaggatgcaattgctcaggcagaaatggaccttaagagactgagagacccattacaagtacatctgcctctccgacaaattggtgaaaaagattgatctgcaaaaagcctctgaatcctggcagaaggaacacctgtttgcctttttaattaaagcattgcaggtggaagctgggagccatgtggggggtagagcgtttttacctttaattataaaacaaaaacagaaaggatctgagggaagaagggaatgttaaaacctgaggatcaggcattgtggaatataagctcaaagggcttagtgaatattgtcttaaccaagtatctcagtttctggatgaaaatgatgcagttatatagttgagagattcataaagagaaaacaatgctgggggtgttcgtttcttgcatcttctttgcagagtcagcaaaagagtaacacaccagcaccccactcgactctatttgtttttaatttaactgtccctatttttgacataggagtaaataaatatactagaaaagcaaattctcatgatatgctaaaatatcattagcatttattttaaattggacccagtctctgcagagttaccaggaatctttccttccagcatccctttactgtccacctacctgtacctcttggttacactcattttttccatttgataattggaaccaacttataactgtttaataattgacactttagattatctcttaataccttcttaaatgtctatatatcccagtgctctggatcagtgtctaaaaatcactggcaacactgcatgaggttgttggttttgttttgttttattaattagtctttcacaggaggaataattgccctcctttatatacttatctattgataatcccctctccctccagaacacaaatcagagggaaagggggtgttcagctgtactaccaaatcaggaagatgtaaggtttacaaattggctaagaatcatggctctgtagccatttcaaccagaataattttattgctaatctgctttgtgtgacagcattccaggccagccagatgggactgccttgtctggaggctttgttcatctcgaaggacacacacttccacactgtttgtgagccctcccacctccacaacttcagttgtaaatcaagtgtgtggatctcaaagggtgcaatttatctttatataggaatacatttctagggcttccttcaagcccactctcttcaccctattttttcttatcttaaattgagagaaagagaattaatcttatactttgtcaaaacattttctaccatatttccagatgacatctgcgcttgaagagtcaaaggaatctgtgtctaatatcctgtttttaactgctgtaggggcaggatggaaaggatgatgggggctgccacaccactgattggccttttctttcacgtgattcatccttcctcattgtggcaaggagtttctttctctttttcttcctcctttgggatcattgtgtatgaaaagaaaaactttaaatgacaaacccagactccaggtgccttgcaaaggttgaaggccagccaggattgctgctgctgctgctactcctgccaacacccctttcattggcatgacggaatgaaaggatgcatgtctccacttcctgaccctccgcccacttccttctccctccaccacccccagtcgtcagctccttccctcatttatttttgttaagttgtgtgaattatttttaacccatttatcctgtttgtgcatagggtttttaagaagaaacagcacagtgcaacgagcaaatctttttggggtgtgtgggaagcaagggagggaggacatggagaaaagttctttaaacaaatagcaaactattgaacatgtgtaaaatcctgtatcatttatgaaatatgtataaaaagcaatgtaccttctggaacaataaatacttattcaatttttgaaaaaaaaaaaaaaaaaaaaaaaaaaaaaaa

SEQ ID NO: 2527 - protein, 351 aa, Homo sapiens
MAAAAGRSLLLLLSSRGGGGGGAGGCGALTAGCFPGLGVSRHRQQQHHRTVHQRIASWQNLGAVYCSTVVPSDDVTVVYQNGLPVISVRLPSRRERCQFTLKPISDSVGVFLRQLQEEDRGIDRVAIYSPDGVRVAASTGIDLLLLDDFKLVINDLTYHVRPPKRDLLSHENAATLNDVKTLVQQLYTTLCIEQHQLNKERELIERLEDLKEQLAPLEKVRIEISRKAEKRTTLVLWGGLAYMATQFGILARLTWWEYSWDIMEPVTYFITYGSAMAMYAYFVMTRQEYVYPEARDRQYLLFFHKGAKKSRFDLEKYNQLKDAIAQAEMDLKRLRDPLQVHLPLRQIGEKD

SEQ ID NO: 2528 - DNA, 2361 bp, Homo sapiens
aaagcagtgcttctctctggggccaaggccagagctgtggacaccttatcccactcatcctcatcctcttcctctgataaagcccctaccagtgctgataaagtctttctcgtgagagcctagaggccttaaaaaaaaaagtgcttgaaagagaaggggacaaaggaacaccagtattaagaggattttccagtgtttctggcagttggtccagaaggatgcctccattcctgcttctcacctgcctcttcatcacaggcacctccgtgtcacccgtggccctagatccttgttctgcttacatcagcctgaatgagccctggaggaacactgaccaccagttggatgagtctcaaggtcctcctctatgtgacaaccatgtgaatggggagtggtaccacttcacgggcatggcgggagatgccatgcctaccttctgcataccagaaaaccactgtggaacccacgcacctgtctggctcaatggcagccaccccctagaaggcgacggcattgtgcaacgccaggcttgtgccagcttcaatgggaactgctgtctctggaacaccacggtggaagtcaaggcttgccctggaggctactatgtgtatcgtctgaccaagcccagcgtctgcttccacgtctactgtggtcatttttatgacatctgcgacgaggactgccatggcagctgctcagataccagcgagtgcacatgcgctccaggaactgtgctaggccctgacaggcagacatgctttgatgaaaatgaatgtgagcaaaacaacggtggctgcagtgagatctgtgtgaacctcaaaaactcctaccgctgtgagtgtggggttggccgtgtgctaagaagtgatggcaagacttgtgaagacgttgaaggatgccacaataacaatggtggctgcagccactcttgccttggatctgagaaaggctaccagtgtgaatgtccccggggcctggtgctgtctgaggataaccacacttgccaagtccctgtgttgtgcaaatcaaatgccattgaagtgaacatccccagggagctggttggtggcctggagctcttcctgaccaacacctcctgccgaggagtgtccaacggcacccatgtcaacatcctcttctctctcaagacatgtggtacagtggtcgatgtggtgaatgacaagattgtggccagcaacctcgtgacaggtctacccaagcagaccccggggagcagcggggacttcatcatccgaaccagcaagctgctgatcccggtgacctgcgagtttccacgcctgtacaccatttctgaaggatacgttcccaaccttcgaaactccccactggaaatcatgagccgaaatcatgggatcttcccattcactctggagatcttcaaggacaatgagtttgaagagccttaccgggaagctctgcccaccctcaagcttcgtgactccctctactttggcattgagcccgtggtgcacgtgagcggcttggaaagcttggtggagagctgctttgccacccccacctccaagatcgacgaggtcctgaaatactacctcatccgggatggctgtgtttcagatgactcggtaaagcagtacacgtcccgggatcacctagcaaagcacttccaggtccctgtcttcaagtttgtgggcaaagaccacaaggaagtgtttctgcactgccgggttcttgtctgtggagtgttggacgagcgttcccgctgtgcccagggttgccaccggcgaatgcgtcgtggggcaggaggagaggactcagccggtctacagggccagacgctaacaggcggcccgatccgcatcgactgggaggactagttcgtagccatacctcgagtccctgcattggacggctctgctctttggagcttctccccccaccgccctctaagaacatctgccaacagctgggttcagacttcacactgtgagttcagactcccagcaccaactcactctgatcctggtccattcagtgggcacaggtcacagcactgctgaacaatgtggcctgggtggggtttcatctttctagggttgaaaactaaactgtccacccagaaagacactcaccccatttccctcatttctttcctacacttaaatacctcgtgtatggtgcaatcagaccacaaaatcagaagctgggtataatatttcaagttacaaaccctagaaaaattaaacagttactgaaattatgacttaaatacccaatgactccttaaatatgtaaattatagttataccttgaaatttcaattcaaatgcagactaattatagggaatttggaagtgtatcaataaaacagtatataatttt

SEQ ID NO: 2529 - protein, 545 aa, Homo sapiens
MPPFLLLTCLFITGTSVSPVALDPCSAYISLNEPWRNTDHQLDESQGPPLCDNHVNGEWYHFTGMAGDAMPTFCIPENHCGTHAPVWLNGSHPLEGDGIVQRQACASFNGNCCLWNTTVEVKACPGGYYVYRLTKPSVCFHVYCGHFYDICDEDCHGSCSDTSECTCAPGTVLGPDRQTCFDENECEQNNGGCSEICVNLKNSYRCECGVGRVLRSDGKTCEDVEGCHNNNGGCSHSCLGSEKGYQCECPRGLVLSEDNHTCQVPVLCKSNAIEVNIPRELVGGLELFLTNTSCRGVSNGTHVNILFSLKTCGTVVDVVNDKIVASNLVTGLPKQTPGSSGDFIIRTSKLLIPVTCEFPRLYTISEGYVPNLRNSPLEIMSRNHGIFPFTLEIFKDNEFEEPYREALPTLKLRDSLYFGIEPVVHVSGLESLVESCFATPTSKIDEVLKYYLIRDGCVSDDSVKQYTSRDHLAKHFQVPVFKFVGKDHKEVFLHCRVLVCGVLDERSRCAQGCHRRMRRGAGGEDSAGLQGQTLTGGPIRIDWED

SEQ ID NO: 2530 - DNA, 1092 bp, Homo sapiens
tgtccctggaattctgggacactggctggggtttgaggagagaagccagtacctacctggctgcaggatgaagctggccagtggcttcttggttttgtggctcagccttgggggtggcctggctcagagcgacacgagccctgacacggaggagtcctattcagactggggccttcggcacctccggggaagctttgaatccgtcaatagctacttcgattcttttctggagctgctgggagggaagaatggagtctgtcagtacaggtgccgatatggaaaggcaccaatgcccagacctggctacaagccccaagagcccaatggctgcggctcctatttcctgggtctcaaggtaccagaaagtatggacttgggcattccagcaatgacaaagtgctgcaaccagctggatgtctgttatgacacttgcggtgccaacaaatatcgctgtgatgcaaaattccgatggtgtctccactcgatctgctctgaccttaagcggagtctgggctttgtctccaaagtggaagcagcctgtgattccctggttgacactgtgttcaacaccgtgtggaccttgggctgccgcccctttatgaatagtcagcgggcagcttgcatctgtgcagaggaggagaaggaagagttatgaggaagaagtgattccttcctggttttgagtgacaccacagctgtcagccttcaagatgtcaagtcttcgagtcagcgtgactcattcattcttccaacagtttggacaccacaaagcaggagaaagggaacatttttctacagctggaaagtgagtcctatcctttgaggaaatttgaaaaaagacatggagtggtttgaaagctactcttcatttaagactgctctccccaaccaagacacatttgcctggaaattcagttcttagcttaaagactaaaatgcaagcaaaccctgcaattcctggacctgatagttatattcatgagtgaaattgtggggagtccagccatttgggaggcaatgactttctgctggcccatgtttcagttgccagtaagcttctcacatttaataaagtgtactttttagaacatt

SEQ ID NO: 2531 - protein, 195 aa, Homo sapiens
MKLASGFLVLWLSLGGGLAQSDTSPDTEESYSDWGLRHLRGSFESVNSYFDSFLELLGGKNGVCQYRCRYGKAPMPRPGYKPQEPNGCGSYFLGLKVPESMDLGIPAMTKCCNQLDVCYDTCGANKYRCDAKFRWCLHSICSDLKRSLGFVSKVEAACDSLVDTVFNTVWTLGCRPFMNSQRAACICAEEEKEEL

SEQ ID NO: 2532 - DNA, 2752 bp, Homo sapiens
gcccagtcgcgccgccagcgggctgagggtaggaagtagccgctccgagtggaggcgactgggggctgaagagcgcgccgccctctcgtcccactttccaggtgtgtgatcctgtaaaattaaatcttccaagatgatctggtatatattaattataggaattctgcttccccagtctttggctcatccaggcttttttacttcaattggtcagatgactgatttgatccatactgagaaagatctggtgacttctctgaaagattatattaaggcagaagaggacaagttagaacaaataaaaaaatgggcagagaagttagatcggctaactagtacagcgacaaaagatccagaaggatttgttgggcatccagtaaatgcattcaaattaatgaaacgtctgaatactgagtggagtgagttggagaatctggtccttaaggatatgtcagatggctttatctctaacctaaccattcagagacagtactttcctaatgatgaagatcaggttggggcagccaaagctctgttacgtctccaggatacctacaatttggatacagataccatctcaaagggtaatcttccaggagtgaaacacaaatcttttctaacggctgaggactgctttgagttgggcaaagtggcctatacagaagcagattattaccatacggaactgtggatggaacaagccctaaggcaactggatgaaggcgagatttctaccatagataaagtctctgttctagattatttgagctatgcggtatatcagcagggagacctggataaggcacttttgctcacaaagaagcttcttgaactagatcctgaacatcagagagctaatggtaacttaaaatattttgagtatataatggctaaagaaaaagatgtcaataagtctgcttcagatgaccaatctgatcagaaaactacaccaaagaaaaaaggggttgctgtggattacctgccagagagacagaagtacgaaatgctgtgccgtggggagggtatcaaaatgacccctcggagacagaaaaaactcttttgccgctaccatgatggaaaccgtaatcctaaatttattctggctccagctaaacaggaggatgaatgggacaagcctcgtattattcgcttccatgatattatttctgatgcagaaattgaaatcgtcaaagacctagcaaaaccaaggctgagccgagctacagtacatgaccctgagactggaaaattgaccacagcacagtacagagtatctaagagtgcctggctctctggctatgaaaatcctgtggtgtctcgaattaatatgagaatacaagatctaacaggactagatgtttccacagcagaggaattacaggtagcaaattatggagttggaggacagtatgaaccccattttgactttgcacggaaagatgagccagatgctttcaaagagctggggacaggaaatagaattgctacatggctgttttatatgagtgatgtgtctgcaggaggagccactgtttttcctgaagttggagctagtgtttggcccaaaaaaggaactgctgttttctggtataatctgtttgccagtggagaaggagattatagtacacggcatgcagcctgtccagtgctagttggcaacaaatgggtatccaataaatggctccatgaacgtggacaagaatttcgaagaccttgtacgttgtcagaattggaatgacaaacaggcttccctttttctcctattgttgtactcttatgtgtctgatatacacatttcctagtcttaactttcaggagtttacaattgactaacactccatgattgattcagtcatgaacctcatcccatgtttcatctgtggacaattgcttactttgtgggttcttttaaaagtaacacgaaatcatcatattgcataaaaccttaaagttctgttggtatcacagaagacaaggcagagtttaaagtgaggaattttatatttaaagaactttttggttggataaaaacataatttgagcatccagttttagtatttcactacatctcagttggtgggtgttaagctagaatgggctgtgtgataggaaacaaatgccttacagatgtgcctaggtgttctgtttacctagtgtcttactctgttttctggatctgaagactagtaataaactaggacactaactgggttccatgtgattgccctttcatatgatcttctaagttgatttttttcctcccaagtcttttttaaagaaagtatactgtattttaccaaccccctctcttttcttttagctcctctgtggtgaattaaacgtacttgagttaaaatatttcgattttttttttttttttaatggaaagtcctgcataacaacactgggccttcttaactaaaatgctcaccacttagcctgtttttttatcccttttttaaaatgacagatgattttgttcaggaattttgctgtttttcttagtgctaataccttgcctcttattcctgctacagcagggtggtaatattggcattctgattaaatactgtgccttaggagactggaagtttaaaaatgtacaagtcctttcagtgatgagggaattgattttttttaaaagtctttttcttagaaagccaaaatgtttgtttttttaagattctgaaatgtgttgtgacaacaatgacctatttatgatcttaaatcttttttaaaaaaaaaaaaaaaa

SEQ ID NO: 2533 - protein, 534 aa, Homo sapiens
MIWYILIIGILLPQSLAHPGFFTSIGQMTDLIHTEKDLVTSLKDYIKAEEDKLEQIKKWAEKLDRLTSTATKDPEGFVGHPVNAFKLMKRLNTEWSELENLVLKDMSDGFISNLTIQRQYFPNDEDQVGAAKALLRLQDTYNLDTDTISKGNLPGVKHKSFLTAEDCFELGKVAYTEADYYHTELWMEQALRQLDEGEISTIDKVSVLDYLSYAVYQQGDLDKALLLTKKLLELDPEHQRANGNLKYFEYIMAKEKDVNKSASDDQSDQKTTPKKKGVAVDYLPERQKYEMLCRGEGIKMTPRRQKKLFCRYHDGNRNPKFILAPAKQEDEWDKPRIIRFHDIISDAEIEIVKDLAKPRLSRATVHDPETGKLTTAQYRVSKSAWLSGYENPVVSRINMRIQDLTGLDVSTAEELQVANYGVGGQYEPHFDFARKDEPDAFKELGTGNRIATWLFYMSDVSAGGATVFPEVGASVWPKKGTAVFWYNLFASGEGDYSTRHAACPVLVGNKWVSNKWLHERGQEFRRPCTLSELE

SEQ ID NO: 2534 - DNA, 2752 bp, Homo sapiens
gcccagtcgcgccgccagcgggctgagggtaggaagtagccgctccgagtggaggcgactgggggctgaagagcgcgccgccctctcgtcccactttccaggtgtgtgatcctgtaaaattaaatcttccaagatgatctggtatatattaattataggaattctgcttccccagtctttggctcatccaggcttttttacttcaattggtcagatgactgatttgatccatactgagaaagatctggtgacttctctgaaagattatattaaggcagaagaggacaagttagaacaaataaaaaaatgggcagagaagttagatcggctaactagtacagcgacaaaagatccagaaggatttgttgggcatccagtaaatgcattcaaattaatgaaacgtctgaatactgagtggagtgagttggagaatctggtccttaaggatatgtcagatggctttatctctaacctaaccattcagagacagtactttcctaatgatgaagatcaggttggggcagccaaagctctgttacgtctccaggatacctacaatttggatacagataccatctcaaagggtaatcttccaggagtgaaacacaaatcttttctaacggctgaggactgctttgagttgggcaaagtggcctatacagaagcagattattaccatacggaactgtggatggaacaagccctaaggcaactggatgaaggcgagatttctaccatagataaagtctctgttctagattatttgagctatgcggtatatcagcagggagacctggataaggcacttttgctcacaaagaagcttcttgaactagatcctgaacatcagagagctaatggtaacttaaaatattttgagtatataatggctaaagaaaaagatgtcaataagtctgcttcagatgaccaatctgatcagaaaactacaccaaagaaaaaaggggttgctgtggattacctgccagagagacagaagtacgaaatgctgtgccgtggggagggtatcaaaatgacccctcggagacagaaaaaactcttttgccgctaccatgatggaaaccgtaatcctaaatttattctggctccagctaaacaggaggatgaatgggacaagcctcgtattattcgcttccatgatattatttctgatgcagaaattgaaatcgtcaaagacctagcaaaaccaaggctgaggcgagccaccatttcaaacccaataacaggagacttggagacggtacattacagaattagcaaaagtgcctggctctctggctatgaaaatcctgtggtgtctcgaattaatatgagaatacaagatctaacaggactagatgtttccacagcagaggaattacaggtagcaaattatggagttggaggacagtatgaaccccattttgactttgcacggaaagatgagccagatgctttcaaagagctggggacaggaaatagaattgctacatggctgttttatatgagtgatgtgtctgcaggaggagccactgtttttcctgaagttggagctagtgtttggcccaaaaaaggaactgctgttttctggtataatctgtttgccagtggagaaggagattatagtacacggcatgcagcctgtccagtgctagttggcaacaaatgggtatccaataaatggctccatgaacgtggacaagaatttcgaagaccttgtacgttgtcagaattggaatgacaaacaggcttccctttttctcctattgttgtactcttatgtgtctgatatacacatttcctagtcttaactttcaggagtttacaattgactaacactccatgattgattcagtcatgaacctcatcccatgtttcatctgtggacaattgcttactttgtgggttcttttaaaagtaacacgaaatcatcatattgcataaaaccttaaagttctgttggtatcacagaagacaaggcagagtttaaagtgaggaattttatatttaaagaactttttggttggataaaaacataatttgagcatccagttttagtatttcactacatctcagttggtgggtgttaagctagaatgggctgtgtgataggaaacaaatgccttacagatgtgcctaggtgttctgtttacctagtgtcttactctgttttctggatctgaagactagtaataaactaggacactaactgggttccatgtgattgccctttcatatgatcttctaagttgatttttttcctcccaagtcttttttaaagaaagtatactgtattttaccaaccccctctcttttcttttagctcctctgtggtgaattaaacgtacttgagttaaaatatttcgattttttttttttttttaatggaaagtcctgcataacaacactgggccttcttaactaaaatgctcaccacttagcctgtttttttatcccttttttaaaatgacagatgattttgttcaggaattttgctgtttttcttagtgctaataccttgcctcttattcctgctacagcagggtggtaatattggcattctgattaaatactgtgccttaggagactggaagtttaaaaatgtacaagtcctttcagtgatgagggaattgattttttttaaaagtctttttcttagaaagccaaaatgtttgtttttttaagattctgaaatgtgttgtgacaacaatgacctatttatgatcttaaatcttttttaaaaaaaaaaaaaaaa

SEQ ID NO: 2535 - protein, 534 aa, Homo sapiens
MIWYILIIGILLPQSLAHPGFFTSIGQMTDLIHTEKDLVTSLKDYIKAEEDKLEQIKKWAEKLDRLTSTATKDPEGFVGHPVNAFKLMKRLNTEWSELENLVLKDMSDGFISNLTIQRQYFPNDEDQVGAAKALLRLQDTYNLDTDTISKGNLPGVKHKSFLTAEDCFELGKVAYTEADYYHTELWMEQALRQLDEGEISTIDKVSVLDYLSYAVYQQGDLDKALLLTKKLLELDPEHQRANGNLKYFEYIMAKEKDVNKSASDDQSDQKTTPKKKGVAVDYLPERQKYEMLCRGEGIKMTPRRQKKLFCRYHDGNRNPKFILAPAKQEDEWDKPRIIRFHDIISDAEIEIVKDLAKPRLRRATISNPITGDLETVHYRISKSAWLSGYENPVVSRINMRIQDLTGLDVSTAEELQVANYGVGGQYEPHFDFARKDEPDAFKELGTGNRIATWLFYMSDVSAGGATVFPEVGASVWPKKGTAVFWYNLFASGEGDYSTRHAACPVLVGNKWVSNKWLHERGQEFRRPCTLSELE

SEQ ID NO: 2536 - DNA, 2120 bp, Homo sapiens
ggcagaagcagcaatggtccctccagggaacggaagccgttgaacgtgaacatttggagtttcctcttttgtgctgattcctgaggactaggaaggtgccccgaaaagaattcagagacctgacaatgtccctgtattgtggaatagcttgcaggagaaaatttttttggtgctataggctgctgtcaacctatgttactaagacacggtatttatttgaactgaaggaagatgatgatgcatgtaaaaaagcccagcaaacaggagcgttttacctctttcatagtctggctcctctgcttcagacttcagcacatcaatacctggccccccggcacagcctgttagagttggaaaggctcctgggtaaatttggacaggatgcacaaagaatagaagattctgtgctgattggatgctctgagcagcaggaagcatggtttgctctggatctaggtctggatagctccttttccataagtgcctccttacacaaacctgaaatggagacagagctcaaggggtctttcattgagctgagaaaggcactctttcaactcaatgcaagggatgcctccttgctgtccacggctcaagctcttctccgctggcatgatgctcatcagttctgcagcagaagtgggcagcccaccaagaagaacgtggctggcagcaagcgtgtgtgcccttccaataatataatctattatccacagatggctcctgtggcgatcacgctggtgtcagatgggacccgatgcctgcttgcccgccaaagctcctttcccaagggaatgtattctgccttggcaggtttttgtgatataggtgaaagtgtggaagagaccatccgccgagaagttgcagaagaggtgggattggaggtggaaagcctgcagtactatgcatcccagcattggcccttccctagtggctcactcatgattgcttgccatgcaactgtgaaaccagggcagacagaaatccaggtgaacttgagagaattagagacagctgcctggttcagtcatgatgaggtagccacagccctgaagagaaagggcccctatactcagcaacagaatgggactttcccattctggctgccccctaagttagccatctcccaccaactgattaaggagtgggtggaaaaacagacctgttcttccctgcctgcttagcccggatcaagtcacttagatcgctccttggtattcctgagggacaaactagagatcagttgacaaaggagaagtgacaaaagataagctgcagaaggacctcagaagggcagagcaaagggtgagcctacagtaagacacttctatcagcagtgttaatggaagaaattcctaccaatgggcaatcaaaaaagccagtgtgagaagaaaactgatgagctgtcaactgtcaaaaatcagggggaagggggaagcattagtttggatgtaggcccttgttcagtcattttctctaaggccttggaagcaaacatcttctggcatatggcttgttaatgttgtgtttacactaactgccaaaatgtgcctgttgtaagtttggttaaaacttttatcttagtattgaaaatatatagcaagttttaagtcattactgagttacttgttacccttacagaattaagaaaaatagcacagtatgacattttaaaattcatgtacaggtgcattctagttacatgaacatgctagttaaataaaagtcacaattaagtcattatgactcagagtactttataataaatcagatgccctgaggctctgttgaggaagtagaatcccaatgggactccagacagtaaatctttttcgctgttttcagctctgtcacatgctcagtttgtgacccagggaaaagactattgctttgccatgcctgttttcctaaataaaacagttgctggcatttgcacatccacaacgtgttgattaacaaagggattggtggagataaacagatgccaaacctgacctatttcttaaactttatggaataaactaaatttaggatttctcatcattcatatatgatgccataagggagaagagtttatttggggaaaataaaagaaatttccacaaaaaaaaaaaaaaaaa

SEQ ID NO: 2537 - protein, 352 aa, Homo sapiens
MSLYCGIACRRKFFWCYRLLSTYVTKTRYLFELKEDDDACKKAQQTGAFYLFHSLAPLLQTSAHQYLAPRHSLLELERLLGKFGQDAQRIEDSVLIGCSEQQEAWFALDLGLDSSFSISASLHKPEMETELKGSFIELRKALFQLNARDASLLSTAQALLRWHDAHQFCSRSGQPTKKNVAGSKRVCPSNNIIYYPQMAPVAITLVSDGTRCLLARQSSFPKGMYSALAGFCDIGESVEETIRREVAEEVGLEVESLQYYASQHWPFPSGSLMIACHATVKPGQTEIQVNLRELETAAWFSHDEVATALKRKGPYTQQQNGTFPFWLPPKLAISHQLIKEWVEKQTCSSLPA

SEQ ID NO: 2538 - DNA, 2200 bp, Homo sapiens
caaggtttcggggactgagtgggtttcagactttctctcaggatttccgctggcttcaggttccggtcaggcgtcgggacagagcctgatccaggcttcggcggccggtggcagctctcgatcagctctcgcagtcggagaggcggctaaggaaaggtgccacagcagagacgcgaaggagaggccctagaaccttttcaaagaagaatggaagaaaccatgaagcttgctacgatggaagacacagtggagtactgcctgttcctgataccagatgagtcaagggactcagataaacataaagagattcttcagaagtacattgagagaataatcactcggtttgcacctatgctggtcccctacatctggcagaatcagcctttcaatcttaaatataaacctgggaaaggaggtgttcctgctcatatgtttggcgtgacaaagtttggggataacattgaggatgaatggtttattgtttatgtaataaagcagatcacaaaggaatttccagagttagtagcaaggattgaagacaatgatggtgaattcttgttaatagaagctgctgactttctccctaaatggctggatcctgaaaatagcaccaatagggtatttttctgccatggggaattgtgtattatccctgcaccaagaaaatctggagcagaatcttggttacccaccacacccccaacaattccacaagcattgaatataatcacagcacattcagaaaaaatacttgcttcagaatctatacgagctgctgtgaataggcgcatcagagggtacccagaaaaaattcaggcctcacttcatcgagcacactgcttccttccagctggcattgtggcagtgctaaagcagcgccccagattggtggctgcagcagtccaggcattttacctacgagaccctattgacctgcgagcttgtcgtgttttcaagacattcttgcctgaaacacgaataatgacatcggtcacattcactaaatgtctatatgcacaattggtgcaacaaaggtttgtgccagaccggcggagtggatacaggctgcctcctccatctgatccccagtaccgagcccatgaattgggcatgaaattggctcatggatttgagatcttatgctccaaatgtagcccacatttttctgactgcaagaaatcccttgtgactgcctcaccactctgggccagtttccttgaaagtctgaaaaagaatgattactttaagggactgatagaaggttctgctcagtaccgggaaaggctagaaatggcagagaattacttccagctctcagtagactggccagaaagttctcttgctatgagccctggtgaagaaatcttaaccttattacagacaataccatttgatatagaagaccttaagaaagaagcagctaatcttcccccagaggatgatgaccagtggttagatctctcaccagatcagctggaccagctgctgcaggaagctgttggcaaaaaagaatccgagtctgtttccaaggaggagaaggagcagaactatgacttaactgaagtctcagagagcatgaaagctttcatatccaaagtctcaacccacaagggagcagagctgcctcgagaaccttctgaggctccaatcacttttgatgcagattcttttcttaattattttgataagattttagggccaaggcctaatgagtcagattctgatgatctggatgatgaagactttgaatgtttagatagtgatgatgacttggactttgaaacacacgaacctggcgaagaggcttccctgaaaggaacacttgataatctcaagtcatacatggcccagatggaccaggaactagcacacacctgcatcagcaaaagtttcaccactaggaaccaagtggaacctgtatcccagactaccgataacaattcagatgaggaagattctggtacgggagaatctgttatggcaccagtagatgtagacctgaacctggtttcaaatatattggaatcctatagctcccaagctggactggcaggacctgcttccaatcttttacaaagcatgggagtgcagctgcctgacaacaccgatcacagaccaacaagtaagccaacaaaaaattaaccagcacatttagcttctcttttttctttttaaataaatattgaatatgattctgttc

SEQ ID NO: 2539 - protein, 644 aa, Homo sapiens
MEETMKLATMEDTVEYCLFLIPDESRDSDKHKEILQKYIERIITRFAPMLVPYIWQNQPFNLKYKPGKGGVPAHMFGVTKFGDNIEDEWFIVYVIKQITKEFPELVARIEDNDGEFLLIEAADFLPKWLDPENSTNRVFFCHGELCIIPAPRKSGAESWLPTTPPTIPQALNIITAHSEKILASESIRAAVNRRIRGYPEKIQASLHRAHCFLPAGIVAVLKQRPRLVAAAVQAFYLRDPIDLRACRVFKTFLPETRIMTSVTFTKCLYAQLVQQRFVPDRRSGYRLPPPSDPQYRAHELGMKLAHGFEILCSKCSPHFSDCKKSLVTASPLWASFLESLKKNDYFKGLIEGSAQYRERLEMAENYFQLSVDWPESSLAMSPGEEILTLLQTIPFDIEDLKKEAANLPPEDDDQWLDLSPDQLDQLLQEAVGKKESESVSKEEKEQNYDLTEVSESMKAFISKVSTHKGAELPREPSEAPITFDADSFLNYFDKILGPRPNESDSDDLDDEDFECLDSDDDLDFETHEPGEEASLKGTLDNLKSYMAQMDQELAHTCISKSFTTRNQVEPVSQTTDNNSDEEDSGTGESVMAPVDVDLNLVSNILESYSSQAGLAGPASNLLQSMGVQLPDNTDHRPTSKPTKN

SEQ ID NO: 2540 - DNA, 1450 bp, Homo sapiens
cgaaaaagaagcagtcctgggctgtacccggcgcagctgggagcggctgcttcctccggggtcgtatctccgcccggcatggggctgctggacctttgcgaggaagtgttcggcaccgccgacctttaccgggtgctgggcgtgcgacgcgaggcctccgacggcgaggtccgacgaggctaccacaaggtgtccctgcaggtacacccggaccgggtgggcgagggcgacaaggaggacgccacccgccgcttccagatcctgggaaaagtctattccgttctcagtgacagagaacagagagcagtgtacgatgagcagggaacagtggacgaggactctcctgtgctcacccaagaccgagactgggaggcgtattggcggctactctttaaaaagatatctttagaggacattcaagcttttgaaaagacatacaaaggttcggaagaagagctggctgatattaagcaggcctatctggacttcaagggtgacatggatcagatcatggagtctgtgctttgcgtgcagtacacagaggaacccaggataaggaatatcattcagcaagctattgacgccggagaggtcccatcctataatgcctttgtcaaagaatcgaaacaaaagatgaatgcaaggaaaaggagggctcaggaagaggccaaagaagcagaaatgagcagaaaggagttggggcttgatgaaggcgtggatagcctgaaggcagccattcagagcagacaaaaggatcggcaaaaggaaatggacaattttctggctcagatggaagcaaagtactgcaaatcttccaaaggaggagggaaaaaatctgctctcaagaaagaaaagaaataatggaatttttctcttcaaaggtccttaggtgtaaattgatgccatcgtaggcaaggtgcaggcaagatttgaaggcaaaagtcaattcagctcttgagaaaaggtgtctttccagcctgaatttttcagattgactagaccaagcagaatctctcaacctgatcttagtatttcctagaaagcacttgacattgtgtgaggtctcacctgaaggaacttggtggtgacatttgggagggtggagggaggcagtgtccttcctgacagcacttgcctccatggatcttctgtacacagaactcttatctaggatgtggttctgttcatgctgctttctgcgatgtgcgtgtctgttagaataggctctctacccagctagaacaccttccagacacttgctggacagctatcttccacatacttcccagtttacatttggtcttaatgatcttgaatagatcctctcttcattttactcagccaggttttgtactgatgtacaggtgttaaattacttcaagcatttttgtaagaggtgtatataattcaataaaaaaggtaagacatgatgattaaaaaaaaaaaaaaa

SEQ ID NO: 2541 - protein, 260 aa, Homo sapiens
MGLLDLCEEVFGTADLYRVLGVRREASDGEVRRGYHKVSLQVHPDRVGEGDKEDATRRFQILGKVYSVLSDREQRAVYDEQGTVDEDSPVLTQDRDWEAYWRLLFKKISLEDIQAFEKTYKGSEEELADIKQAYLDFKGDMDQIMESVLCVQYTEEPRIRNIIQQAIDAGEVPSYNAFVKESKQKMNARKRRAQEEAKEAEMSRKELGLDEGVDSLKAAIQSRQKDRQKEMDNFLAQMEAKYCKSSKGGGKKSALKKEKK

SEQ ID NO: 2542 - DNA, 2651 bp, Homo sapiens
attgtgggaagtatagggcggcaagcggaggaggcgtggcgagcggatcatccgcttccggagtcgaggttttcgggcttgtaccgcttggcggtgcggcctggtgtcggcttgcaggttctttctgtgtttgttctctgccctgccaaggccgtagagctggtgcgtgcgggtagcggggctctccgaggagccgcacgccggcggcaccatggtccacctcactactctcctctgcaaggcctaccgtgggggccacttaaccatccgccttgccctgggtggctgcaccaatcggccgttctaccgcattgtggctgctcacaacaagtgtcccagggatggccgtttcgtagagcagctgggctcctatgatccattgcccaacagtcatggagaaaaactcgttgccctcaacctagacaggatccgtcattggattggctgcggggcccacctctctaagcctatggaaaagcttctgggtcttgctggctttttccctctgcatcctatgatgatcacaaatgctgagagactgcgaaggaaacgggcacgtgaagtcctgttagcttctcagaaaacagatgcagaagctacagatacagaggctacagaaacataaatgagctgactttagtgagcatagcagtgggaacaaggtcaaggtccttttgaaacactgcagcgatcttaattttgttagatttggagttcaataaatggagtatcctgagttgcccttgctcttctggcctggcctgcacagggcccagggagagatttgttcttgtgtgacttagagctgggtgtgggtactaattagcttttttcgactttgtcttgggatagacagtggctatgggaggattggacttttgagttgggctctgggtctcttggacaactttacaatttactggcttccaagacttcctgcttcaaaacccccagccagactattcatggcccattcagatcttcatgttcatcccacaagtgcaagaacagttaacctttcttaattgatttttgtaattggaggtttatattgtcttgcctaatgcatattctctttttttttttttttttgagacggagtcttgttctgttgccaggctggagtgcggtggtgcaatctcagctcactgcaatctccacctcctgggttcaagaggttctcctgcctcagcctcctgagtagccggggagctacaagcatgcaccaccacacccagctaattttttttttttttttgagaggagtctcgctctgtcgcccaggcttgagtgcagtggcgcgatctcggctcactgcaagctctgtctcctgggttcatgccattctcctgcttcagcctcccgagtagtcccaggagtagctgggactacaggtgcccaccaccacacccagctaatttttttgtatttttagtagagatggggtttcaccatgttatccaggatggttttgatctcctgacctcgtgatccgcccgccttggcctcccaaaagtgctgggattataggcgtgagccaccgcccgggcaaatttttgtatttttagtagagatggggtttcaccgtgttggccaggatggtctcaatctgaccttgtgatctgcccacctcggcctcccaaagtgctaggattactggcgtgagccaccactcctagccttaatgcatattcttaaatatacaaaggtagatttgttatgaaaattgctttggggctctaataacctaccttttaagaatgagaaactgctgggcttaagggagttcagtatgaatcaagattgaaccattcaaatgtggctgtgatttctgcatatatcatagatgggatccttctgagaatactggaatagggaattaggacaccaagccaattcagctgtgaaccttattcttgtacttttctttcttgctggtaattttatggagcaggttaagaaggctgctctgtgttaggataaactgtataccaataatgttgacaacctgtaatgagtgttgcattttacttcttgtatcttttccttcctaccttgatgccagtaatctataagggatctttatagtttgaatgtatttgaataacttcagtatactttagttctacttttttatttgactcacaaccattcttaggtctcaagtattcccatgtgttttaaaagcctgaagtcagtgagatgaaattcaacatcaagaatttgaagtaacttgtaaggaaaaataatataaagataccattggggcagtggctcacacctgtaatctcagcactttgggaggctgaggtggaaggatcacttgaagccagagtttgagaccagcctgtgcaacacagcaagaccccgtctctacaaaaacttaaaaaattagctggctgtggtgttgctcacccatagttccagctactcgggaagctgaggcagtaagatcacttgagcccaggaggccgatgctgcagtgaactgtgattgttccactacagtccagcctgggtgacagagaaaagaaaaagaaaacattacataatttggctagagcataataatttgattttctggtttttgaaaatttgagttgcaataaaaggatatttcagtgtgcgatttcaaaaaaaaaaaaaaaaaaa

SEQ ID NO: 2543 - protein, 137 aa, Homo sapiens
MVHLTTLLCKAYRGGHLTIRLALGGCTNRPFYRIVAAHNKCPRDGRFVEQLGSYDPLPNSHGEKLVALNLDRIRHWIGCGAHLSKPMEKLLGLAGFFPLHPMMITNAERLRRKRAREVLLASQKTDAEATDTEATET

SEQ ID NO: 2544 - DNA, 3707 bp, Homo sapiens
agcgtctcgctccctgctcccggccccagagggttatcgcgagtcttggaataaacttgctcgtgcgatggccaaaaagaccaaagaaaacagagggacttttcccagttggtgatatggagcaagtgccatcagcaggcagactcgtgcagatcaccgtgacagagggatatgatttgaaaggttttaaaggagatactccagttacctttattcgagcagaattcaatcaagtggttctgggagactctgcaaaaattactgtttctccagaaggaagtgcaaaatacaacttcactagcagttttgagtttaatcctgaaggaggaatcacttcagatgacctcgctcacaaacctgtgttcttaactgtgactgaagttttaccaaaggaaaagaaacagaaagaagagaagaccttaattcttggtcaggctgtggtggaccttcttcccttactggaaggacagagttcatttcaaacaacagttccattgcaccctgtgcaaggctcacccttagaaactcctagatcaagtgctaagcagtgcagtcttgaagttaaagtattagtggcagagcctttactgaccacagcccagatctcagggggcaatctactgaaggtcacgttggaggctgcttactctgtgcctgaatccttcattccaacaggtcctgggcagaactacatggtcggtctgcaagttccatcacttggagagaaggactatcccattttatttaagaatggaactctgaagcttggaggggaaagggaacctgttccccggcccaaaaagtggccaattgccaacattctggctccaggagctaataacattcctgatgcattcattgttggtggtccctatgaagaagaagaaggagaactcaaccatcctgaggacagcgaatttaggaatcaagcagagtgcataaagaaaaggattatttgggacttggaaagtcgctgctaccttgatccttctgcagtggtcagttttcagaagcgaattgccgattgccggctttggcctgtagagatcacaagagttcctctggtcactatacccaaagggaaagctggcaaaactgaaaagactgatgaagaagctcagctttcgtttcatggtgtggcttatgttaatatggtcccattgttgtatccaggtgtgaagagaattcggggagcttttcatgtttacccttacctagacagtgtagtccatgaaaagaccaaatgtttattgagcttgttccgggatattggccatcacttgattcataataataaaataggaggaattaattctctgctgtccaaacaagctgtttctaagaatctgaaagaagataaaccagtgaaagaaaaggatatagatggaaggcctaggcctggggatgtgcaggcacctagtataaaatctcagagctcagatactcctttggaaggtgaaccccctctaagtcacaatcctgaaggacagcaatatgtagaagcagggacatacattgtgttggaaattcagttggacaaagccttggttccaaagcgaatgccagaggagctagccagaagggtcaaggaaatgattcctccaaggcctcctcttacccgtcggacaggaggagctcagaaggcagtgagtgactaccacatacagatcaagaatatttctagagccattctagatgaatactacagaatgtttggaaaacaggtggccaaactggagagtgatatggatagtgaaaccttggaggagcagaagtgccagctcagctatgaacttaattgctctggaaaatactttgctttcaaagaacaactcaagcatgctgtggtaaagattgtgagagataaatacttgaagacaacatcatttgaaagccaggaggaacttcagacatttatcagtgagctctatgtgttcttagtagatcagatgcatgtagccctaaaccagaccatgccagatgatgtccaaggcactgttgcaaccatttatacaagcagtgaacagcttcaactctttgcatttgaagcagaagtcaatgagaactttgagatggcagcagcatattataaagagagattggtccgtgagccccagaatctggatcactggttggactatggtgccttctgcctcctaactgaagacaacatcaaagcacaagagtgttttcagaaagccctttccctcaaccagagtcatatccacagcttgttgctgtgtggtgtcctggctgtcctgttggagaactatgagcaagcagaaattttctttgaggatgctacttgcttggaaccaactaatgttgtagcctggactttacttggtttgtactatgaaattcaaaacaatgatattcgaatggaaatggcatttcatgaggcctccaaacagcttcaggcacggatgcttcaggcacaagtaacaaagcaaaagagcactggtgtagaagacactgaggaaagagggaagagagaatctagtttaggcccttggggaatcacaaatggttctgcaacagcaatcaaggtggaagccccagcaggaccaggagctgcattatctattctagacaaatttcttgaagaatcctccaaactgcagtctgattcacaagaacccattttgactacacaaacttgggatccaagtataagccaaaaaccatctaacacatttatcaaggagataccaacaaagaaagaagcatcaaaatgtcaagattcatcagctcttctgcatcccggccttcattatggtgtttctcaaactaccaccatcttcatggagaccatacatttcttgatgaaagtcaaggctgtgcagtatgtgcacagagtgcttgcacatgagctgttatgccctcaaggaggccccagctgtgaatattacttggtgctggcccaaacacacattcttaagaagaactttgccaaggcagaggaataccttcaacaagcagcccagatggactacctgaaccccaatgtctggggcctgaagggccatctctattttctgagtggaaatcattctgaggccaaggcatgctatgaacgaaccattagctttgtagtggatgcttctgagatgcacttcatcttcctgagactggggctcatctatctggaagagaaagagtatgaaaaggcaaagaaaacctatatgcaagcctgtaagagatcaccttcatgccttacctggctaggactgggaatcgcctgctatcggctggaggagctcacagaggctgaggatgctctttctgaagccaatgcattgaacaactacaatgctgaagtatgggcatatctggctctggtctgcctgaaagttggacggcaattagaagctgagcaggcctacaagtacatgatcaagctgaaattgaaagatgaggctctgcttgcagagatccacacactacaggaaacagttggctttggaaatccatctttctgatacccctccagctgaacaattttctgcatgggactctgagttcctttccttcccagagagttttaccgtatgaagcctggagctggagaacgaaagaatcttcactataaacagagacccattcatttatttccattggctgtgttactggatgttttactggttgacgagaaactgggtcacaataaaaaaatggagatatgaaactcaaaaaaaaaaaaaaaa

SEQ ID NO: 2545 - protein, 1121 aa, Homo sapiens
MEQVPSAGRLVQITVTEGYDLKGFKGDTPVTFIRAEFNQVVLGDSAKITVSPEGSAKYNFTSSFEFNPEGGITSDDLAHKPVFLTVTEVLPKEKKQKEEKTLILGQAVVDLLPLLEGQSSFQTTVPLHPVQGSPLETPRSSAKQCSLEVKVLVAEPLLTTAQISGGNLLKVTLEAAYSVPESFIPTGPGQNYMVGLQVPSLGEKDYPILFKNGTLKLGGEREPVPRPKKWPIANILAPGANNIPDAFIVGGPYEEEEGELNHPEDSEFRNQAECIKKRIIWDLESRCYLDPSAVVSFQKRIADCRLWPVEITRVPLVTIPKGKAGKTEKTDEEAQLSFHGVAYVNMVPLLYPGVKRIRGAFHVYPYLDSVVHEKTKCLLSLFRDIGHHLIHNNKIGGINSLLSKQAVSKNLKEDKPVKEKDIDGRPRPGDVQAPSIKSQSSDTPLEGEPPLSHNPEGQQYVEAGTYIVLEIQLDKALVPKRMPEELARRVKEMIPPRPPLTRRTGGAQKAVSDYHIQIKNISRAILDEYYRMFGKQVAKLESDMDSETLEEQKCQLSYELNCSGKYFAFKEQLKHAVVKIVRDKYLKTTSFESQEELQTFISELYVFLVDQMHVALNQTMPDDVQGTVATIYTSSEQLQLFAFEAEVNENFEMAAAYYKERLVREPQNLDHWLDYGAFCLLTEDNIKAQECFQKALSLNQSHIHSLLLCGVLAVLLENYEQAEIFFEDATCLEPTNVVAWTLLGLYYEIQNNDIRMEMAFHEASKQLQARMLQAQVTKQKSTGVEDTEERGKRESSLGPWGITNGSATAIKVEAPAGPGAALSILDKFLEESSKLQSDSQEPILTTQTWDPSISQKPSNTFIKEIPTKKEASKCQDSSALLHPGLHYGVSQTTTIFMETIHFLMKVKAVQYVHRVLAHELLCPQGGPSCEYYLVLAQTHILKKNFAKAEEYLQQAAQMDYLNPNVWGLKGHLYFLSGNHSEAKACYERTISFVVDASEMHFIFLRLGLIYLEEKEYEKAKKTYMQACKRSPSCLTWLGLGIACYRLEELTEAEDALSEANALNNYNAEVWAYLALVCLKVGRQLEAEQAYKYMIKLKLKDEALLAEIHTLQETVGFGNPSF

SEQ ID NO: 2546 - DNA, 2110 bp, Homo sapiens
gaacccggtctcccgcaagatggagccgggttgggctgtgacgctgctgctggggtcagaatgtcatacccaggctatcccccaacaggctacccacctttccctggatatcctcctgcaggtcaggagtcatcttttcccccttctggtcagtatccttatcctagtggctttcctccaatgggaggaggtgcctacccacaagtgccaagtagtggctacccaggagctggaggctaccctgcgcctggaggttatccagcccctggaggctatcctggtgccccacagccagggggagctccatcctatcccggagttcctccaggccaaggatttggagtcccaccaggtggagcaggcttttctgggtatccacagccaccttcacagtcttatggaggtggtccagcacaggttccactacctggtggctttcctggaggacagatgccttctcagtatcctggaggacaacctacttaccctagtcagcctgccacagtgactcaggtcactcaaggaactatccgaccagctgccaacttcgatgctataagagatgcagaaattcttcgtaaggcaatgaagggttttgggacagatgagcaggcaattgtggatgtggtggccaaccgttccaatgatcagaggcaaaaaattaaagcagcatttaagacctcctatggcaaggatttaatcaaagatctcaaatcagagttaagtggaaatatggaagaactgatcctggccctcttcatgcctcctacgtattacgatgcctggagcttacggaaagcaatgcagggagcaggaactcaggaacgtgtattgattgagattttgtgcacaagaacaaatcaggaaatccgagaaattgtcagatgttatcagtcagaatttggacgagaccttgaaaaggacattaggtcagatacatcaggacattttgaacgtttacttgtgtccatgtgccagggaaatcgtgatgagaaccagagtataaaccaccaaatggctcaggaagatgctcagcgtctctatcaagctggtgaggggagactagggaccgatgaatcttgctttaacatgatccttgccacaagaagctttcctcagctgagagctaccatggaggcttattctaggatggctaatcgagacttgttaagcagtgtgagccgtgagttttccggatatgtagaaagtggtttgaagaccatcttgcagtgtgccctgaaccgccctgccttctttgctgagaggctctactatgctatgaaaggtgctggcacagatgactccaccctggtccggattgtggtcactcgaagtgagattgaccttgtacaaataaaacagatgttcgctcagatgtatcagaagactctgggcacaatgattgcaggtgacacgagtggagattaccgaagacttcttctggctattgtgggccagtaggagggatttttttttttttaatgaaaaaaaaatttctattcatagcttatccttcagagcaatgacctgcatgcagcaatatcaaacatcagctaaccgaaagagctttctgtcaaggaccgtatcagggtaatgtgcttggtttgcacatgttgttattgccttaattctaattttattttgttctctacatacaatcaatgtaaagccatatcacaatgatacagtaatattgcaatgtttgtaaaccttcattcttactagtttcattctaatcaagatgtcaaattgaataaaaatcacagcaatctctgattctgtgtaataatattgaataattttttagaaggttactgaaagctctgccttccggaatccctctaagtctgcttgatagagtggatagtatgttaaaactgtgtactttaaaaaaaaattcaacctttacatctagaataatttgcatctcattttgcctaaattggttctgtattcataaacactttccacatagaaaatagattagtattacctgtggcaccttttaagaaagggtcaaatgtttatatgcttaagatacatagcctccctttttttcgcgttgtttcctttttttaaattgagttatgacaaataaaaaattgcatat

SEQ ID NO: 2547 - protein, 466 aa, Homo sapiens
MSYPGYPPTGYPPFPGYPPAGQESSFPPSGQYPYPSGFPPMGGGAYPQVPSSGYPGAGGYPAPGGYPAPGGYPGAPQPGGAPSYPGVPPGQGFGVPPGGAGFSGYPQPPSQSYGGGPAQVPLPGGFPGGQMPSQYPGGQPTYPSQPATVTQVTQGTIRPAANFDAIRDAEILRKAMKGFGTDEQAIVDVVANRSNDQRQKIKAAFKTSYGKDLIKDLKSELSGNMEELILALFMPPTYYDAWSLRKAMQGAGTQERVLIEILCTRTNQEIREIVRCYQSEFGRDLEKDIRSDTSGHFERLLVSMCQGNRDENQSINHQMAQEDAQRLYQAGEGRLGTDESCFNMILATRSFPQLRATMEAYSRMANRDLLSSVSREFSGYVESGLKTILQCALNRPAFFAERLYYAMKGAGTDDSTLVRIVVTRSEIDLVQIKQMFAQMYQKTLGTMIAGDTSGDYRRLLLAIVGQ

SEQ ID NO: 2548 - DNA, 2176 bp, Homo sapiens
gaacccggtctcccgcaagatggagccgggttgggctgtgacgctgctgctggggtcagaatgtcatacccaggctatcccccaacaggctacccacctttccctggatatcctcctgcaggtcaggagtcatcttttcccccttctggtcagtatccttatcctagtggctttcctccaatgggaggaggtgcctacccacaagtgccaagtagtggctacccaggagctggaggctaccctgcgcctggaggttatccagcccctggaggctatcctggtgccccacagccagggggagctccatcctatcccggagttcctccaggccaaggatttggagtcccaccaggtggagcaggcttttctgggtatccacagccaccttcacagtcttatggaggtggtccagcacaggttccactacctggtggctttcctggaggacagatgccttctcagtatcctggaggacaacctacttaccctagtcagatcaatacagattctttttcttcctatcctgttttctctcctgtttctttggattatagcagtgaacctgccacagtgactcaggtcactcaaggaactatccgaccagctgccaacttcgatgctataagagatgcagaaattcttcgtaaggcaatgaagggttttgggacagatgagcaggcaattgtggatgtggtggccaaccgttccaatgatcagaggcaaaaaattaaagcagcatttaagacctcctatggcaaggatttaatcaaagatctcaaatcagagttaagtggaaatatggaagaactgatcctggccctcttcatgcctcctacgtattacgatgcctggagcttacggaaagcaatgcagggagcaggaactcaggaacgtgtattgattgagattttgtgcacaagaacaaatcaggaaatccgagaaattgtcagatgttatcagtcagaatttggacgagaccttgaaaaggacattaggtcagatacatcaggacattttgaacgtttacttgtgtccatgtgccagggaaatcgtgatgagaaccagagtataaaccaccaaatggctcaggaagatgctcagcgtctctatcaagctggtgaggggagactagggaccgatgaatcttgctttaacatgatccttgccacaagaagctttcctcagctgagagctaccatggaggcttattctaggatggctaatcgagacttgttaagcagtgtgagccgtgagttttccggatatgtagaaagtggtttgaagaccatcttgcagtgtgccctgaaccgccctgccttctttgctgagaggctctactatgctatgaaaggtgctggcacagatgactccaccctggtccggattgtggtcactcgaagtgagattgaccttgtacaaataaaacagatgttcgctcagatgtatcagaagactctgggcacaatgattgcaggtgacacgagtggagattaccgaagacttcttctggctattgtgggccagtaggagggatttttttttttttaatgaaaaaaaaatttctattcatagcttatccttcagagcaatgacctgcatgcagcaatatcaaacatcagctaaccgaaagagctttctgtcaaggaccgtatcagggtaatgtgcttggtttgcacatgttgttattgccttaattctaattttattttgttctctacatacaatcaatgtaaagccatatcacaatgatacagtaatattgcaatgtttgtaaaccttcattcttactagtttcattctaatcaagatgtcaaattgaataaaaatcacagcaatctctgattctgtgtaataatattgaataattttttagaaggttactgaaagctctgccttccggaatccctctaagtctgcttgatagagtggatagtatgttaaaactgtgtactttaaaaaaaaattcaacctttacatctagaataatttgcatctcattttgcctaaattggttctgtattcataaacactttccacatagaaaatagattagtattacctgtggcaccttttaagaaagggtcaaatgtttatatgcttaagatacatagcctccctttttttcgcgttgtttcctttttttaaattgagttatgacaaataaaaaattgcatat

SEQ ID NO: 2549 - protein, 488 aa, Homo sapiens
MSYPGYPPTGYPPFPGYPPAGQESSFPPSGQYPYPSGFPPMGGGAYPQVPSSGYPGAGGYPAPGGYPAPGGYPGAPQPGGAPSYPGVPPGQGFGVPPGGAGFSGYPQPPSQSYGGGPAQVPLPGGFPGGQMPSQYPGGQPTYPSQINTDSFSSYPVFSPVSLDYSSEPATVTQVTQGTIRPAANFDAIRDAEILRKAMKGFGTDEQAIVDVVANRSNDQRQKIKAAFKTSYGKDLIKDLKSELSGNMEELILALFMPPTYYDAWSLRKAMQGAGTQERVLIEILCTRTNQEIREIVRCYQSEFGRDLEKDIRSDTSGHFERLLVSMCQGNRDENQSINHQMAQEDAQRLYQAGEGRLGTDESCFNMILATRSFPQLRATMEAYSRMANRDLLSSVSREFSGYVESGLKTILQCALNRPAFFAERLYYAMKGAGTDDSTLVRIVVTRSEIDLVQIKQMFAQMYQKTLGTMIAGDTSGDYRRLLLAIVGQ

SEQ ID NO: 2550 - DNA, 2433 bp, Homo sapiens
atttcacttggaggaaagagagaaggaaggaagctgaggacttagcagggtatcactggacaggccatggctccacggtcccggcgacgaaggcacaagaaacctccctcatcagtggctcccatcatcatggccccaaccacaattgtgacccctgtgcctctgaccccctcaaaacctggccctagcattgacacacttggcttcttctccttggatgataatgttcctggcctatcgcagctgatccttcaaaagctgaacatgaaaagctatgaagaatataagttggtggtagatgggggtacccccgtatcaggctttggatttcgatgtcctcaagaaatgttccagaggatggaagacacatttcgattctgtgctcactgtagagcactccctagtgggctttcagactccaaggttctccggcactgtaagaggtgcagaaatgtctattactgtggtccagagtgccagaagtcagactggcccgcacacaggagggtttgtcaagagcttcgtcttgtggctgtggaccgtctcatggaatggcttctggtcacaggtgattttgttctaccctcaggaccttggccatggccacctgaagctgtacaggactgggactcctggttttctatgaaggggttacacctagatgctacattggatgctgtgctagttagtcatgctgtgaccaccttatgggccagtgtaggacggccaaggccagacccggatgtcctgcagggatctttgaagcggctgctgacagatgtcctgtcacggcccttgactctaggcctaggacttagggccttggggatagatgttaggaggactgggggaagcacagtgcatgtggttggtgcttcccatgtggagacatttcttactcgcccaggggactatgatgagcttggttacatgtttcctgggcaccttggactccgtgtggtcatggtgggtgtagatgtagctactggcttttcacagagcacctcaacttcacccctggaacctggcacaattcagcttagtgcccacaggggcctctaccatgacttctgggaggagcaagtagagaccgggcagacacaccatccagatttggtggcggcattccatccaggttttcattcctccccagacttgatggaggcttggctgcccaccctgctgctacttcgtgactataagattcctacattgattactgtttacagccatcaggagttggtatcctctttgcagattctggtggaactggatacacacatcactgcctttgggtctaatcctttcatgtccctcaaacctgaacaggtctattccagtcccaacaagcagccagtatactgcagtgcatactatatcatgtttcttggaagctcctgtcagctggataataggcaattagaagagaaagtggacggcgggatttaaatagatcataactggacatctggaaaacggggagtttgtgatgaaattaccctgctaatgccaggttcttgcaaactttgaaaaacattatattctaaacctcatttactgtttgggtaaaaattctaagctgaatgagagtttctgtataacataactggtttctttctttttttgagatggagtcttgctctgttgcccaggctggagtgcagcggcatgatctcgactcactgcagcctccgcctcctgggttcaagtggttctcctgcctcagcctccctagtagctgggattacaggtgcacaccaccacacctggctaatttttgtatttttagcagacagggtttcaccatgttggccaggctcgtatcaaacccttgaccccaggtgatctgcctgcctcagcctcccaaagttctgggattacaggcatgagccaccatgcccagccaatgtaactggtttctaagagtttagccacagtagcttctagagataggaaattagatttagtgggtgggaagaggccctgatgctggtctttccagagcttatagttgctaacacttttctttgtaaagaagtttaccttttgactggaaccagatggcactgagaaaaagaatgagaaccaccttattcttctgaaaaagactttcttctcatccagtaatttgggctaaaaaatggaaagatgttgatgacttgaagtgatgcaagaatggacaagtcagggaagtcattgggaacatggatgaggttgtaagcattggtacagtgtcctgtttcctgacttttttgagagaaatgtctacttttcctgttttctcttggggacttttgaccctagagtagccctggtgttatattttagatatcccaagctatatcagactttacctgaatatactggagttacttattatcccccattctataccccaataaactcagtttggggcttcttaaaaaaaaaaaa

SEQ ID NO: 2551 - protein, 460 aa, Homo sapiens
MAPRSRRRRHKKPPSSVAPIIMAPTTIVTPVPLTPSKPGPSIDTLGFFSLDDNVPGLSQLILQKLNMKSYEEYKLVVDGGTPVSGFGFRCPQEMFQRMEDTFRFCAHCRALPSGLSDSKVLRHCKRCRNVYYCGPECQKSDWPAHRRVCQELRLVAVDRLMEWLLVTGDFVLPSGPWPWPPEAVQDWDSWFSMKGLHLDATLDAVLVSHAVTTLWASVGRPRPDPDVLQGSLKRLLTDVLSRPLTLGLGLRALGIDVRRTGGSTVHVVGASHVETFLTRPGDYDELGYMFPGHLGLRVVMVGVDVATGFSQSTSTSPLEPGTIQLSAHRGLYHDFWEEQVETGQTHHPDLVAAFHPGFHSSPDLMEAWLPTLLLLRDYKIPTLITVYSHQELVSSLQILVELDTHITAFGSNPFMSLKPEQVYSSPNKQPVYCSAYYIMFLGSSCQLDNRQLEEKVDGGI

SEQ ID NO: 2552 - DNA, 3079 bp, Homo sapiens
gggccctacagagggtccgccatgttccccggcggcgccgccgcttggctctggtagccgccgcccccgcccccaaccccgcccggcccagagcctagccgagccccgggcccagcatggccgccccggagccggcccgggctgcaccgcccccacccccgcccccgccgccccctcccggggctgaccgcgtcgtcaaagctgtccctttccccccaacacatcgcttgacatctgaagaagtatttgatttggatgggatacccagggttgatgttctgaagaaccacttggtgaaagaaggtcgagtagatgaagaaattgcgcttagaattatcaatgagggtgctgccatccttcggagagagaaaaccatgatagaagtagaagctccaatcacagtgtgtggtgacatccatggccaattttttgatctgatgaaactttttgaagtaggaggatcacctgctaatacacgatacctttttcttggcgattatgtggacagaggttattttagtatagagtgtgtcttatatttatgggttctgaagattctatacccaagcacattatttcttctgagaggcaaccatgaatgcagacaccttactgaatattttacctttaagcaggaatgtaaaattaagtattcggaaagagtctatgaagcttgtatggaagcttttgatagtttgcctcttgctgcacttttaaaccaacagtttctttgtgttcatggtggactttcaccagaaatacacacactggatgatattaggagattagatagattcaaagagccacctgcatttggaccaatgtgtgacttgttatggtccgatccttctgaagattttggaaatgaaaaatcacaggaacattttagtcacaatacagttcgaggatgttcttatttttataactatccagcagtgtgtgaatttttgcaaaacaataatttgttatcgattattagagctcatgaagctcaagatgcaggctatagaatgtacagaaaaagtcaaactacagggttcccttcattaataacaattttttcggcacctaattacttagatgtctacaataataaagctgctgtattaaagtatgaaaataatgtgatgaatattcgacagtttaactgttctccacatccttactggttgcctaattttatggatgtcttcacgtggtctttaccgtttgttggagaaaaagtgacagaaatgttggtaaatgttctgagtatttgctctgatgatgaactaatgactgaaggtgaagaccagtttgatggttcagctgcagcccggaaagaaatcataagaaacaaaattcgagcaattggcaagatggcaagagtcttctctgttctcagggaggagagtgaaagtgtgctgacactcaagggcctgactcccacagggatgttgcctagtggagtgttagctggaggacggcagaccctgcaaagtgccacagttgaggctattgaggctgaaaaagcaatacgaggattctctccaccacatagaatctgcagttttgaagaggcaaagggtttggataggatcaatgagagaatgccacctcggaaagatgctgtacagcaagatggtttcaattctctgaacaccgcacatgccactgagaaccacgggacgggcaaccatactgcccagtgacccactacttcccagggactctcacatctcgggccccaaatggacagatcacccgaggagctggaggggtcggccaagctgactgtaaatttcacagtctctctgaagaaaccattgtgcttctgagaccctagcccccttcctggatggaggcttgagggccctgggacatgtgctatctgataagattgggtcatcgctgccaaggtggagagcagtgagcaaggggcttggggcaatttccagtggagggcatccacacctccattttatgcttgtggttcacacatttaagtttacaaatcagatttcttttccccttcagtagaattagattttgtttttcaatcatgatttcaaatgcaatcctaagagctaatgtggacttttctttttccatgaaatgtctttaaaggatgaattagcatggtcttaaaatacatttctgaggttactagctgtattttgaattgtgagcaaaatgccgagaaacccagttggcatttatacaaaatgttgacctcaggtctatagttcttaaatgtggctaattctgtaacatagtcttggtattttttaattatgaatgcatatcctatttccaggcaggctctcttacttgaacacaaatccaaaaactaatttagagtcttttttgcccagatcttttaagacttacaccccagagatttaagaagaaaacctctaaatttcaaaattatgaagaattacagaattactcatttaaggtactttaaaagaagtttgtacattgtcaaagtaaattttaattcaaatcatgtctgtaaaacttgacgtattttgtgtatgcatgttttcattttgcaaatatttaatatatagacctatgatgtacaggtacgacatgtataggttacctagatgttatgagaaattttagtttattgtgagtactcaagttgcttagagagccaccagggtgatttgctgctggctttctatcatttttatgttttaatgcaaaggaaattttaaaatgttctggaagtgtttttgattaagcaatgcagcctagaagcaatggttctgttcaatcattcagatgttagtggaagcataaaagtcaagactgcatgttgaaacctttcttttgatagttactgaactgcttggttaaactaaatggaaccatgtgctaatttttcacaattattgacctgtattgattgccactgtagtttggtatttccctttactttggtggcctgcttccctcatgccctggaatacaactcagagctccaggcagcggaaccatctattgttttgtttgccagaaagtgcaccctgtatggtctcctgtctaagttggaaatattatgcatgtgcaggactattcgagtatt

SEQ ID NO: 2553 - protein, 524 aa, Homo sapiens
MAAPEPARAAPPPPPPPPPPPGADRVVKAVPFPPTHRLTSEEVFDLDGIPRVDVLKNHLVKEGRVDEEIALRIINEGAAILRREKTMIEVEAPITVCGDIHGQFFDLMKLFEVGGSPANTRYLFLGDYVDRGYFSIECVLYLWVLKILYPSTLFLLRGNHECRHLTEYFTFKQECKIKYSERVYEACMEAFDSLPLAALLNQQFLCVHGGLSPEIHTLDDIRRLDRFKEPPAFGPMCDLLWSDPSEDFGNEKSQEHFSHNTVRGCSYFYNYPAVCEFLQNNNLLSIIRAHEAQDAGYRMYRKSQTTGFPSLITIFSAPNYLDVYNNKAAVLKYENNVMNIRQFNCSPHPYWLPNFMDVFTWSLPFVGEKVTEMLVNVLSICSDDELMTEGEDQFDGSAAARKEIIRNKIRAIGKMARVFSVLREESESVLTLKGLTPTGMLPSGVLAGGRQTLQSATVEAIEAEKAIRGFSPPHRICSFEEAKGLDRINERMPPRKDAVQQDGFNSLNTAHATENHGTGNHTAQ

SEQ ID NO: 2554 - DNA, 4773 bp, Homo sapiens
taacaatagcagagcaagactgacaacaataattaaaataagagaataaagaagatgtagtcagaggccattctgaatgcattcagattctcagtgtgtatgaggaaggctgcctgtaattaagagggaatctttaaccagtttcagtgtagtagtgaaaaagtgcttccatctgacactctccgcagtgctctggcaaagactttccaggatgaacaacgtttccagctgggaattatggatgatgctgcagagtgctttgaaaacctcctgatgagaattcacttccacattgctgatgaaaccaaagaggatatatgtactgcccaacactgcatttcccatcagaaatttgcaatgacattgtttgagcagtgtgtatgtactagctgtggtgccacttctgatccgctgcctttcatccagatggtacattatatctccaccacttccctttgcaatcaggctatttgtatgctggaaagacgagagaaaccttcaccaagcatgtttggtgagctgctgcagaatgccagcaccatgggggatctgcggaactgtccaagcaactgtggagagaggatcaggattcgccgtgtgttgatgaatgctccacagattatcacgattgggctggtatgggactcagaccactcagacttagcagaagatgttatccacagcctgggaacctgccttaagctgggtgatctgtttttcagagtgacggatgaccgggccaagcaatctgaactgtacttagttggaatgatctgttactatggcaaacattattctacattcttttttcaaacaaagattcgcaaatggatgtattttgatgatgctcatgtcaaggagattgggcccaaatggaaggatgtggtgaccaaatgcatcaaggggcattatcagcccctgctgctgctttatgcagatccccagggtaccccagtttccacccaggacctgcctccccaagctgagttccagtcatacagcaggacatgctacgacagtgaagattcaggacacctgactgatagtgaatgtaatcagaaacacacatccaagaaagggtcactgatagagcgcaagaggagctctggtcgggttaggaggaaaggcgatgagccccaggcctcgggataccacagtgaaggagaaacactgaaagagaagcaggctcctagaaatgcctccaaaccatccagcagcaccaacaggctgagagattttaaagagacagtcagcaatatgatccataacagaccatccctggcttctcagaccaatgtaggctctcactgcaggggcagaggaggagaccagcctgacaaaaaacctcctaggaccctgcctttacactctcgtgactgggaaatagagagtaccagcagtgagtcaaaatccagttcttccagcaagtatcgtcccacatggagacccaaacgagaatctctgaatattgacagtatctttagtaaggacaaaaggaagcactgtggctatacccagcttagccccttttctgaggattcagctaaagaatttataccagatgaaccaagcaagccaccttcttacgacattaaatttggtggaccaagcccccagtacaagcgctggggcccagcacggccaggctctcaccttttagagcagcacccccgactaatccagcgaatggaatctggctatgaaagcagtgagaggaacagcagcagccctgtcagcctggatgcagccctgcctgagagctcaaatgtctacagggatccaagtgctaagagatcagctgggttggttccttcctggcgtcatatcccaaagtcgcacagcagtagcatcctggaggtagactccacagcatccatgggtggctggacaaagagtcagcctttctctggtgaggagatatcttctaaaagtgaactggatgaattgcaggaagaggtggccaggagggcgcaggaacaggaacttcgaagaaaacgggagaaggagttagaggcagcgaaagggtttaaccctcatcctagccgcttcatggacttggatgaactgcagaatcaggtgagcagcctatcccgctccaagtattgttaagccaagaggcccaactggaatccggcatggatacagagtttggggccagttctttcttccattcacctgcttcctgccatgagtcacactcatcactatctccagagtcatctgccccacagcacagctcccccagtagatctgccttgaagcttctgacttcggttgaagtagacaacattgaaccctctgcattccacaggcaaggtttacctaaagcaccagggtggactgagaagaattctcatcatagttgggagccattggatgccccagagggtaagctgcaaggctctaggtgtgacaacagcagttgcagcaagctccctccacaagaaggaagaggcattgctcaagaacagctgttccaagaaaagaaggatcctgctaacccctccccggtgatgcctggaatagccacctctgagaggggtgatgaacacagcctaggctgtagtccttcaaattcatcagctcagcccagccttcccctgtatagaacctgccaccccataatgcctgttgcttcttcatttgtgcttcactgtcctgatcctgtgcagaaaactaaccaatgcctccaaggccaaagcctcaaaacttcattgactttaaaagtggacagaggcagtgaggagacctataggccagagtttcccagcacaaaggggcttgtccgttctctggctgagcagttccagaggatgcagggtgtctccatgagggatagtacaggtttcaaggatagaagtttgtcaggtagtctaaggaagaactcttccccttctgattctaagcctcctttctcacagggtcaagagaaaggccactggccatgggcaaagcaacaatcctctctggagggtggggatagaccactttcctgggaagagtccactgaacattcttctcttgccttaaactctgggctgcctaatggtgaaacttctagcggaggacagcccaggttggcagagccagacatataccaagagaagctgtcccaagtgagagatgttaggtctaaggatctgggcagcagtactgacttggggacttccttgcctttggattcctgggtgaatatcacaaggttctgtgattctcagcttaagcatggggcacctaggccaggaatgaagtcctcccctcatgattcccatacgtgtgtaacctatccagagagaaatcacatccttttgcatccacattggaaccaagacacagagcaggagacctcagaattggagtctctgtatcaggccagtcttcaggcttctcaagctggctgttctggatgggggcagcaggataccgcctggcacccacttagccaaacaggctctgcagatggcatggggaggaggttgcactcagcccatgatcctggtctctcaaagacttcaacagcagaaatggagcatggtctccatgaagccagaacagctacaccttgccgaggcctcagcagggagtgtggggaggatgagcagtacagtgcagagaatttacgtcgcatctcacgcagtctcagtggcaccgttgtctcagagagggaggaagctccggtttcttcccacagttttgattcatcaaacgtgaggaagcctttggaaaccgggcaccgttgttccagctcctcttccctccctgtcatccatgacccttctgtgtttctcctcggtccccaactctaccttccccaaccacagttcctgtccccagatgtcctgatgcccaccatggcaggggagcccaatagactcccaggaacttcaaggagtgtccagcagtttctggctatgtgtgacaggggtgaaacttcccaaggggccaagtacacaggaaggactttgaactaccagagcctcccccatcgctccagaacagacaactcctgggcaccctggtcagagaccaaccagcatattgggaccagattcctgactactccagggtgcaatcctcaactaacctacactgccacactaccagaaagaagcaagggccttcaggttcctcacactcagtcctggagtgatcttttccattcaccctcccaccctcccattgttcatcctgtgtacccaccatctagcagtcttcatgtacccctgaggtcagcttggaattcagatcctgttccagggtcccgaacccctggtcctcgaagagtagatatgcccccagatgatgactggaggcaaagcagttatgcctcccactctggacacaggagaacagtgggagaggggtttctgtttgttctatcagatgctcccagaagagagcagatcagggctagagtcctgcagcacagtcaatggtaaaggttattcctttcctttcctggagctacacctttctttgtaaaactgtactgtgggccgggcgcggtggctcacacctgtaatcccagcgctttgggaggctgaggcgggtggatcacgaggtcaggagattgagaccatcctggccaacatggtgaaaccccgtctctaccaaaatacaaaaaattagccaggcgtgacggtgcgtgcctgtagtcccaactactcggaaggctgaggcaggagaattgcttgaacccgggaggcagaggttgcagtgagccgagatcgcaccactgcactccagcttggcaatagagtgagactccatctc

SEQ ID NO: 2555 - protein, 767 aa, Homo sapiens
MDTEFGASSFFHSPASCHESHSSLSPESSAPQHSSPSRSALKLLTSVEVDNIEPSAFHRQGLPKAPGWTEKNSHHSWEPLDAPEGKLQGSRCDNSSCSKLPPQEGRGIAQEQLFQEKKDPANPSPVMPGIATSERGDEHSLGCSPSNSSAQPSLPLYRTCHPIMPVASSFVLHCPDPVQKTNQCLQGQSLKTSLTLKVDRGSEETYRPEFPSTKGLVRSLAEQFQRMQGVSMRDSTGFKDRSLSGSLRKNSSPSDSKPPFSQGQEKGHWPWAKQQSSLEGGDRPLSWEESTEHSSLALNSGLPNGETSSGGQPRLAEPDIYQEKLSQVRDVRSKDLGSSTDLGTSLPLDSWVNITRFCDSQLKHGAPRPGMKSSPHDSHTCVTYPERNHILLHPHWNQDTEQETSELESLYQASLQASQAGCSGWGQQDTAWHPLSQTGSADGMGRRLHSAHDPGLSKTSTAEMEHGLHEARTATPCRGLSRECGEDEQYSAENLRRISRSLSGTVVSEREEAPVSSHSFDSSNVRKPLETGHRCSSSSSLPVIHDPSVFLLGPQLYLPQPQFLSPDVLMPTMAGEPNRLPGTSRSVQQFLAMCDRGETSQGAKYTGRTLNYQSLPHRSRTDNSWAPWSETNQHIGTRFLTTPGCNPQLTYTATLPERSKGLQVPHTQSWSDLFHSPSHPPIVHPVYPPSSSLHVPLRSAWNSDPVPGSRTPGPRRVDMPPDDDWRQSSYASHSGHRRTVGEGFLFVLSDAPRREQIRARVLQHSQW

SEQ ID NO: 2556 - DNA, 1661 bp, Homo sapiens
gtttctccctaagtgcttctttggatctcaggctctaggtgcaatgtgaaggggagtccctgggcagactgatccctggctcagacagttcagtgggagaatcccaaaggccttttccctccttcctgagcctccgggcaaggagggagggatcttggttccagggtctcagtaccccctgtgccatttgagctgcttgcgctcatcatctctattaataaccaacttccctcccccactgccagtgctgcccccacgcctgcccagctcgtgttctccggtcacagcagctcagtcctccaaagctgctggaccccagggagagctgaccactgcccgagcagccggctgaatccacctccacaatgccgctctcaggaaccccggcccctaataagaagaggaaatccagcaagctgatcatggaactcactggaggtggacaggagagctcaggcttgaacctgggcaaaaagatcagtgtcccaagggatgtgatgttggaggaactgtcgctgcttaccaaccggggctccaagatgttcaaactgcggcagatgagggtggagaagtttatttatgagaaccaccctgatgttttctctgacagctcaatggatcacttccagaagttccttccaacagtggggggacagctgggcacagctggtcagggattctcatacagcaagagcaacggcagaggcggcagccaggcagggggcagtggctctgccggacagtatggctctgatcagcagcaccatctgggctctgggtctggagctgggggtacaggtggtcccgcgggccaggctggcagaggaggagctgctggcacagcaggggttggtgagacaggatcaggagaccaggcaggcggagaaggaaaacatatcactgtgttcaagacctatatttccccatgggagcgagccatgggggttgacccccagcaaaaaatggaacttggcattgacctgctggcctatggggccaaagctgaacttcccaaatataagtccttcaacaggacggcaatgccctatggtggatatgagaaggcctccaaacgcatgaccttccagatgcccaagtttgacctggggcccttgctgagtgaacccctggtcctctacaaccaaaacctctccaacaggccttctttcaatcgaacccctattccctggctgagctctggggagcctgtagactacaacgtggatattggcatccccttggatggagaaacagaggagctgtgaggtgtttcctcctctgatttgcatcatttcccctctctggctccaatttggagagggaatgctgagcagatagcccccattgttaatccagtatccttatgggaatggagggaaaaaggagagatctacctttccatcctttactccaagtccccactccacgcatccttcctcaccaactcagagctccccttctacttgctccatatggaacctgctcgtttatggaatttgctctgccaccagtaacagtcaataaacttcaaggaaaatgaaaaaaaaaaaaaaaaaaaaaaaaaaaaaaaaaaaaaaaaaaaaaaaaaaaaaaaaaaaaaaaaaaaaaaaaaaaaaaaaaaaaaaaaaaaaaaaaaaaaaaaaaaaaaaaaaaaaaaaaaa

SEQ ID NO: 2557 - protein, 299 aa, Homo sapiens
MPLSGTPAPNKKRKSSKLIMELTGGGQESSGLNLGKKISVPRDVMLEELSLLTNRGSKMFKLRQMRVEKFIYENHPDVFSDSSMDHFQKFLPTVGGQLGTAGQGFSYSKSNGRGGSQAGGSGSAGQYGSDQQHHLGSGSGAGGTGGPAGQAGRGGAAGTAGVGETGSGDQAGGEGKHITVFKTYISPWERAMGVDPQQKMELGIDLLAYGAKAELPKYKSFNRTAMPYGGYEKASKRMTFQMPKFDLGPLLSEPLVLYNQNLSNRPSFNRTPIPWLSSGEPVDYNVDIGIPLDGETEEL

SEQ ID NO: 2558 - DNA, 3470 bp, Homo sapiens
agccaacaccgcctttctcagcatggagacctttgagcccatcagccaagagcccctcagccaagccagctatgacaaagccccagacccagttcctgagctccaagactcgttctatgcagaactgcaacgtgcagagagcctccaagagaagagcataaaagaggccaagaccaaatgcaggacaattgcatccctgctcactgcagcccccaacccccactccaaaggggtacttatgtttaagaaacggcggcagagagccaagaagtacaccctggtgagcttcggggctgctgctgggacaggcgctgaggaggaggacggcgttccccccacgagtgagtccgagctggacgaagaagccttctctgacgcccgcagcctcaccaatcaatctgactgggacagtccctatctggacatggagcttgccagggcgggctcaagagcatcagagggccagggctctgggctgggagggcagctgagtgaggtctctgggcgaggggtgcagctctttgaacagcagcgccagcgcgcagactccagcacccaggaactggcacgggtcgaaccagcagccatgctcaacggggaaggcctgcagtcaccacctcgggcccagagtgctcccccagaggcagctgtgctcccacccagccccttgccggcgcctgtagccagccccagacccttccaaccaggtggtggagccccgaccccagctccaagcatctttaaccggtcagccaggccctttaccccgggcctacaagggcagcggccaactaccacctcggttattttccggcctttagcccccaaaagggcgaacgacagcctggggggcctcagccccgccccaccccccttcttgtcttcgcaggggcccacccctctgcccagcttcacttcaggggttcccagccacgcgccagtctctggttcccccagcaccccacgctcctcgggccctgtgacagccaccagctccctgtacatcccagcccctagtcggcctgtcaccccaggtggagctccagagccccccgctcctcctagcgcagctgccatgacctccaccgcttctatcttcctatctgcgcctttgcgaccctctgcgcgcccagaggcgcctgccccaggcccaggggctcctgagccccccagcgctcgcgagcagcgcatctctgtgccagctgcccgcacgggtatcctgcaggaggcccggcgccgggggacccggaagcagatgttccggccgggaaaggaggagacgaagaactcgcccaaccccgagctgctatcgctggtacagaacctggatgaaaagcctcgggccgggggtgcagaatctggtcctgaagaagatgctctgagcctcggggctgaagcctgcaacttcatgcagccagtaggggccaggagttacaagaccctgcctcacgtgacacctaagaccccccctccaatggctcccaagaccccgccccctatgactcctaagactccacccccagtggctcctaagcccccatctcgagggctccttgatgggctcgtgaatggggcagcctcttcggctggaatccctgagccaccaaggctgcagggcaggggtggggagctgtttgctaagcggcagagccgtgcggacaggtatgtggtggaaggtacacctggtcctggtcttggccctcggcctagaagtccttctcctaccccgtctctgcccccttcctggaaatattcacccaacatccgtgccccgcctcctattgcttacaacccactgctctctccctttttcccccaggcggcccgaactctccctaaggcccaatcccaggggcctcgggcaacacccaagcagggcatcaaggctctagattttatgcggcatcagccctatcaacttaaaactgccatgttctgttttgatgaggttcccccgactcctggccctatcgcctcagggtcccccaaaactgcccgagtccaggagattcgccggttttccactccggcaccccagcccactgcagaacccctggctcccactgtgcttgccccccgagcagccactacactggatgagcccatctggagaacagaactggcctcagcccctgttcctagcccagcccctcctccagaggctcccaggggccttggggcttctcccagctcctgcggtttccaggtagccaggccccgattttcagccaccagaacaggattgcaagctcatgtgtggaggcctggggcagggcaccagtgaacaggcacaggtcccaggaccaaggagaggtggaacatccagttcctaaagttgcttctcctaccctatcccatcccctgtcacgcatctggaagctaaattgcctcctgccagagatggtttccaagttgatgtccccttcccccaccttcctcctcactctctacctccctgccgctttccaaccaagtatgtctgctttggtatctttgcctctctttgtctctgcatttcctttcctggatctctgtctttatttccaggcttctccacccatattcctccacagatctctcttccttgacatttgtgcttttctccctgggcctcattttaatgttcagtgagaagtaaacagagcagaagtgaccactgggacttcaggcaagaagctcaccaccaggcacacagcaaagggactgaactgacccctgtttgcactaagccacccccaccccccactctgctttcccaagcttgactggcatatacctaggcctgtgtgtgtgtgtgtgtgtgtgtgtgtgtgtgtgtgtgtgctcttccgtctaaggcatgaataagaggggaggtcaaaataaagacccaatctgaggccgggcacggtggctcacgccggtaatcccagcactttgggaggccgaggcgggcggatcacgaggtcaggagatcgagaccatcctggctaacacggtgaaaccccatttccactaaaaatacaaaaaattagctgggcgtggtggcgagcgcctgtagtcccagctactcgggaggctgaggcaggagaatggcatgaacctggaaggcggagcttgcagtgagctgagattgcgccactgcactccagcctgggcgacggagcgagactctgtctcaaaacaaacaaacaaacaaaagacccaatctgagtcttatcgttgtactgatagaagggtcagatatccccacatggagttgagtgggagaaagagattcactagagaataactccttagagaccaatgtctgtagcaggtgtacagcatcttgtgaaagttatggagcatgaaaagactgaagggccaggacagtttgcatgggctgagttataccagctagaccaggaatagaacaaagaattctatacctcaggatttcaaaaagttagcaacttgagaggccagtgctgagcaacccagtacccagg

SEQ ID NO: 2559 - protein, 753 aa, Homo sapiens
METFEPISQEPLSQASYDKAPDPVPELQDSFYAELQRAESLQEKSIKEAKTKCRTIASLLTAAPNPHSKGVLMFKKRRQRAKKYTLVSFGAAAGTGAEEEDGVPPTSESELDEEAFSDARSLTNQSDWDSPYLDMELARAGSRASEGQGSGLGGQLSEVSGRGVQLFEQQRQRADSSTQELARVEPAAMLNGEGLQSPPRAQSAPPEAAVLPPSPLPAPVASPRPFQPGGGAPTPAPSIFNRSARPFTPGLQGQRPTTTSVIFRPLAPKRANDSLGGLSPAPPPFLSSQGPTPLPSFTSGVPSHAPVSGSPSTPRSSGPVTATSSLYIPAPSRPVTPGGAPEPPAPPSAAAMTSTASIFLSAPLRPSARPEAPAPGPGAPEPPSAREQRISVPAARTGILQEARRRGTRKQMFRPGKEETKNSPNPELLSLVQNLDEKPRAGGAESGPEEDALSLGAEACNFMQPVGARSYKTLPHVTPKTPPPMAPKTPPPMTPKTPPPVAPKPPSRGLLDGLVNGAASSAGIPEPPRLQGRGGELFAKRQSRADRYVVEGTPGPGLGPRPRSPSPTPSLPPSWKYSPNIRAPPPIAYNPLLSPFFPQAARTLPKAQSQGPRATPKQGIKALDFMRHQPYQLKTAMFCFDEVPPTPGPIASGSPKTARVQEIRRFSTPAPQPTAEPLAPTVLAPRAATTLDEPIWRTELASAPVPSPAPPPEAPRGLGASPSSCGFQVARPRFSATRTGLQAHVWRPGAGHQ

SEQ ID NO: 2560 - DNA, 3263 bp, Homo sapiens
gtcgggggccgaagcgcctcccgcagggagtccccgtgaggccgcgctgccgcgttacccgcagcggccgggggtccggggagtgcggggctccgagacagagccaggcgccccccagcggtcggcgcgggccccatggctgggccgggcggagcggaaccggtgaggtgaagccccggggccggcagccggaggcgcgtggccggggcgccggctccatgggcagcggcacacggcggcgcgatgatggacgttaacagcagcggccgcccggacctctacgggcacctccgctctttccttctgccagaagtggggcgcgggctgcccgacttgagccccgacggtggcgccgacccggtcgcgggctcctgggcgccgcacctgctgagcgaggtgacagccagcccggcgcccacctgggacgcgcccccggacaatgcctccggctgtggggaacagatcaactacggcagagtcgagaaagttgtgatcggctccatcctgacgctcatcacgctgctgacgatcgcgggcaactgcctggtggtgatctccgtgtgcttcgtcaagaagctccgccagccctccaactacctgatcgtgtccctggcgctggccgacctctcggtggctgtggcggtcatgcccttcgtcagcgtcaccgacctcatcgggggcaagtggatctttggacactttttctgtaatgtcttcatcgccatggacgtcatgtgctgcacggcctcgatcatgaccctgtgcgtgatcagcattgacaggtaccttgggatcacaaggcccctcacataccctgtgaggcagaatgggaaatgcatggcgaagatgattctctccgtctggcttctctccgcctccatcaccttacctccactctttggatgggctcagaatgtaaatgatgataaggtgtgcttgatcagccaggactttggctatacgatttactctaccgcagtggcattttatatccccatgtccgtcatgcttttcatgtactaccagatttacaaggctgccaggaagagtgctgccaaacacaagtttcctggcttccctcgagtggagccagacagcgtcatcgccctgaatggcatagtgaagctccagaaggaggtggaagagtgtgcaaacctttcgagactcctcaagcatgaaaggaaaaacatctccatctttaagcgagaacagaaagcagccaccaccctggggatcatcgtcggggcctttaccgtgtgctggctgccatttttcctcctctcgacagccagacccttcatctgtggcacttcctgcagctgcatcccactgtgggtggagaggacatttctgtggctaggctatgcaaactctctcattaacccttttatatatgccttcttcaaccgggacctgaggaccacctatcgcagcctgctccagtgccagtaccggaatatcaaccggaagctctcagctgcaggcatgcatgaagccctgaagcttgctgagaggccagagagacctgagtttgtgctacaaaatgctgactactgtagaaaaaaaggtcatgattcatgattgaaagcagaacaatggagaaggaagtcatttgctgagtctgcagaatggaatgcagcttctgtcctttcttgggatgtctaaaacatgacaaacagggtgatctgttgtacacactatcttatgagggagatggtgacttctcctttttttctgtggatcagtgctattgtgtgttctcagtttaagatagcagatcatctcagcagtaagcacaccaacagaactgagttccagaaaggaagcagtttctggtgctttgcatatgtccaaatccatgcaagtgggagaaagttccagtgcacacttcccatgcttctgagtctaggcgttgtggtgaatatgcaggaatcattcatgagacagaatgtattttgttgtatgacagaaggcttttccaagcaaactgcggtgagcgtagtgttgaatatgttgcatgtccatgttagaaaacagaatccagtcatcagctaatacaaatgatttcccagagcagtgtttgtttcaagcttctgtcaaatagtttggcttttctgcagggtctctgtgatttccccacctatgtacttttctgtgttaactcacttattatggtataactcaggaacaggtctcaggatggagagaagcatacaacatgagcaaagctttttctcgtgctctgaagggtcttgagaggggagtgggatgccttctgtgaggatttttatcgcagtgaagctcaagtggtacccaactgcgttgtaattaacatgattattggcatgtttttgactctcattttctacaaggctgcagtgggcccacccatgggctggcccataactgtatgttatgtggaagaagtgtgggaatgatgggttttccatgaaatgtgatgcttctggagatggggcataaacatgttcattcttgttgagctgcattgtgttaaaccaaattgtgtgaagcgaggtcacctggaccactcttgggaaatgcttcagaacaccagtctgttccttctagagaatttgtttttgtgttctatgtatcttaaatcaaatgtgtgcctaagcaattctgtcctctgattcccacccctacccaccaaaaaatggtagacatgaaaggcaggtgaggaaacagaaaaggtctctttgcagatatatattttttaaatggcactatgtagtaattaagagctaaggagacagaaagacagtagatgagaatagaagagtacctgtacctacaaggggaaaaatgaatgcaattctttatttgataagagtgaactgaaagagaatattattttcctacaataaagcaagctgtcctctcacaggataaagtggaattctgacatggattatggacttcttctaactcccattgacattgcttcttaccagacatggggaaaagctacctttcctgaaaggggaggagggcactgtcctttcagacaaagcttgtacaaattcctgaaccgcaaatttgctgaagtgaccgtatatattatattcataatttaaatgattatttatggtcagatacatattgttaaacttgaaaatgttttattacattacatcaaataaagtttatttgtagctgaaataaagcaacgtaagtaacaatttttaattaaaaaaaaaaaaaaaaaaaaaaaaaaaaaaaaaaaaaaaaaaaaaaaaaaa

SEQ ID NO: 2561 - protein, 445 aa, Homo sapiens
MMDVNSSGRPDLYGHLRSFLLPEVGRGLPDLSPDGGADPVAGSWAPHLLSEVTASPAPTWDAPPDNASGCGEQINYGRVEKVVIGSILTLITLLTIAGNCLVVISVCFVKKLRQPSNYLIVSLALADLSVAVAVMPFVSVTDLIGGKWIFGHFFCNVFIAMDVMCCTASIMTLCVISIDRYLGITRPLTYPVRQNGKCMAKMILSVWLLSASITLPPLFGWAQNVNDDKVCLISQDFGYTIYSTAVAFYIPMSVMLFMYYQIYKAARKSAAKHKFPGFPRVEPDSVIALNGIVKLQKEVEECANLSRLLKHERKNISIFKREQKAATTLGIIVGAFTVCWLPFFLLSTARPFICGTSCSCIPLWVERTFLWLGYANSLINPFIYAFFNRDLRTTYRSLLQCQYRNINRKLSAAGMHEALKLAERPERPEFVLQNADYCRKKGHDS

SEQ ID NO: 2562 - DNA, 3396 bp, Homo sapiens
gtcgggggccgaagcgcctcccgcagggagtccccgtgaggccgcgctgccgcgttacccgcagcggccgggggtccggggagtgcggggctccgagacagagccaggcgccccccagcggtcggcgcgggccccatggctgggccgggcggagcggaaccggtgaggtgaagccccggggccggcagccggaggcgcgtggccggggcgccggctccatgggcagcggcacacggcggcgcgatgatggacgttaacagcagcggccgcccggacctctacgggcacctccgctctttccttctgccagaagtggggcgcgggctgcccgacttgagccccgacggtggcgccgacccggtcgcgggctcctgggcgccgcacctgctgagcgaggtgacagccagcccggcgcccacctgggacgcgcccccggacaatgcctccggctgtggggaacagatcaactacggcagagtcgagaaagttgtgatcggctccatcctgacgctcatcacgctgctgacgatcgcgggcaactgcctggtggtgatctccgtgtgcttcgtcaagaagctccgccagccctccaactacctgatcgtgtccctggcgctggccgacctctcggtggctgtggcggtcatgcccttcgtcagcgtcaccgacctcatcgggggcaagtggatctttggacactttttctgtaatgtcttcatcgccatggacgtcatgtgctgcacggcctcgatcatgaccctgtgcgtgatcagcattgacaggtaccttgggatcacaaggcccctcacataccctgtgaggcagaatgggaaatgcatggcgaagatgattctctccgtctggcttctctccgcctccatcaccttacctccactctttggatgggctcagaatgtaaatgatgataaggtgtgcttgatcagccaggactttggctatacgatttactctaccgcagtggcattttatatccccatgtccgtcatgcttttcatgtactaccagatttacaaggctgccaggaagagtgctgccaaacacaagtttcctggcttccctcgagtggagccagacagcgtcatcgccctgaatggcatagtgaagctccagaaggaggtggaagagtgtgcaaacctttcgagactcctcaagcatgaaaggaaaaacatctccatctttaagcgagaacagaaagcagccaccaccctggggatcatcgtcggggcctttaccgtgtgctggctgccatttttcctcctctcgacagccagacccttcatctgtggcacttcctgcagctgcatcccactgtgggtggagaggacatttctgtggctaggctatgcaaactctctcattaacccttttatatatgccttcttcaaccgggacctgaggaccacctatcgcagcctgctccagtgccagtaccggaatatcaaccggaagctctcagctgcaggcatgcatgaagccctgaagcttgctgagaggccagagagacctgagtttgtgctgagggcctgcacaaggagggtgctgttgagaccagaaaagaggccaccggtatctgtgtgggtgctacaatctccagaccatcacaattggttagcagacaaaatgctgactactgtagaaaaaaaggtcatgattcatgattgaaagcagaacaatggagatgaaataaacaaggcaaaatagaggtggaaacagaaggaagtcatttgctgagtctgcagaatggaatgcagcttctgtcctttcttgggatgtctaaaacatgacaaacagggtgatctgttgtacacactatcttatgagggagatggtgacttctcctttttttctgtggatcagtgctattgtgtgttctcagtttaagatagcagatcatctcagcagtaagcacaccaacagaactgagttccagaaaggaagcagtttctggtgctttgcatatgtccaaatccatgcaagtgggagaaagttccagtgcacacttcccatgcttctgagtctaggcgttgtggtgaatatgcaggaatcattcatgagacagaatgtattttgttgtatgacagaaggcttttccaagcaaactgcggtgagcgtagtgttgaatatgttgcatgtccatgttagaaaacagaatccagtcatcagctaatacaaatgatttcccagagcagtgtttgtttcaagcttctgtcaaatagtttggcttttctgcagggtctctgtgatttccccacctatgtacttttctgtgttaactcacttattatggtataactcaggaacaggtctcaggatggagagaagcatacaacatgagcaaagctttttctcgtgctctgaagggtcttgagaggggagtgggatgccttctgtgaggatttttatcgcagtgaagctcaagtggtacccaactgcgttgtaattaacatgattattggcatgtttttgactctcattttctacaaggctgcagtgggcccacccatgggctggcccataactgtatgttatgtggaagaagtgtgggaatgatgggttttccatgaaatgtgatgcttctggagatggggcataaacatgttcattcttgttgagctgcattgtgttaaaccaaattgtgtgaagcgaggtcacctggaccactcttgggaaatgcttcagaacaccagtctgttccttctagagaatttgtttttgtgttctatgtatcttaaatcaaatgtgtgcctaagcaattctgtcctctgattcccacccctacccaccaaaaaatggtagacatgaaaggcaggtgaggaaacagaaaaggtctctttgcagatatatattttttaaatggcactatgtagtaattaagagctaaggagacagaaagacagtagatgagaatagaagagtacctgtacctacaaggggaaaaatgaatgcaattctttatttgataagagtgaactgaaagagaatattattttcctacaataaagcaagctgtcctctcacaggataaagtggaattctgacatggattatggacttcttctaactcccattgacattgcttcttaccagacatggggaaaagctacctttcctgaaaggggaggagggcactgtcctttcagacaaagcttgtacaaattcctgaaccgcaaatttgctgaagtgaccgtatatattatattcataatttaaatgattatttatggtcagatacatattgttaaacttgaaaatgttttattacattacatcaaataaagtttatttgtagctgaaataaagcaacgtaagtaacaatttttaattaaaaaaaaaaaaaaaaaaaaaaaaaaaaaaaaaaaaaaaaaaaaaaaaaaa

SEQ ID NO: 2563 - protein, 479 aa, Homo sapiens
MMDVNSSGRPDLYGHLRSFLLPEVGRGLPDLSPDGGADPVAGSWAPHLLSEVTASPAPTWDAPPDNASGCGEQINYGRVEKVVIGSILTLITLLTIAGNCLVVISVCFVKKLRQPSNYLIVSLALADLSVAVAVMPFVSVTDLIGGKWIFGHFFCNVFIAMDVMCCTASIMTLCVISIDRYLGITRPLTYPVRQNGKCMAKMILSVWLLSASITLPPLFGWAQNVNDDKVCLISQDFGYTIYSTAVAFYIPMSVMLFMYYQIYKAARKSAAKHKFPGFPRVEPDSVIALNGIVKLQKEVEECANLSRLLKHERKNISIFKREQKAATTLGIIVGAFTVCWLPFFLLSTARPFICGTSCSCIPLWVERTFLWLGYANSLINPFIYAFFNRDLRTTYRSLLQCQYRNINRKLSAAGMHEALKLAERPERPEFVLRACTRRVLLRPEKRPPVSVWVLQSPDHHNWLADKMLTTVEKKVMIHD

SEQ ID NO: 2564 - DNA, 3303 bp, Homo sapiens
gtcgggggccgaagcgcctcccgcagggagtccccgtgaggccgcgctgccgcgttacccgcagcggccgggggtccggggagtgcggggctccgagacagagccaggcgccccccagcggtcggcgcgggccccatggctgggccgggcggagcggaaccggtgaggtgaagccccggggccggcagccggaggcgcgtggccggggcgccggctccatgggcagcggcacacggcggcgcgatgatggacgttaacagcagcggccgcccggacctctacgggcacctccgctctttccttctgccagaagtggggcgcgggctgcccgacttgagccccgacggtggcgccgacccggtcgcgggctcctgggcgccgcacctgctgagcgaggtgacagccagcccggcgcccacctgggacgcgcccccggacaatgcctccggctgtggggaacagatcaactacggcagagtcgagaaagttgtgatcggctccatcctgacgctcatcacgctgctgacgatcgcgggcaactgcctggtggtgatctccgtgtgcttcgtcaagaagctccgccagccctccaactacctgatcgtgtccctggcgctggccgacctctcggtggctgtggcggtcatgcccttcgtcagcgtcaccgacctcatcgggggcaagtggatctttggacactttttctgtaatgtcttcatcgccatggacgtcatgtgctgcacggcctcgatcatgaccctgtgcgtgatcagcattgacaggtaccttgggatcacaaggcccctcacataccctgtgaggcagaatgggaaatgcatggcgaagatgattctctccgtctggcttctctccgcctccatcaccttacctccactctttggatgggctcagaatgtaaatgatgataaggtgtgcttgatcagccaggactttggctatacgatttactctaccgcagtggcattttatatccccatgtccgtcatgcttttcatgtactaccagatttacaaggctgccaggaagagtgctgccaaacacaagtttcctggcttccctcgagtggagccagacagcgtcatcgccctgaatggcatagtgaagctccagaaggaggtggaagagtgtgcaaacctttcgagactcctcaagcatgaaaggaaaaacatctccatctttaagcgagaacagaaagcagccaccaccctggggatcatcgtcggggcctttaccgtgtgctggctgccatttttcctcctctcgacagccagacccttcatctgtggcacttcctgcagctgcatcccactgtgggtggagaggacatttctgtggctaggctatgcaaactctctcattaacccttttatatatgccttcttcaaccgggacctgaggaccacctatcgcagcctgctccagtgccagtaccggaatatcaaccggaagctctcagctgcaggcatgcatgaagccctgaagcttgctgagaggccagagagacctgagtttgtgctgtaagacaaaatgctgactactgtagaaaaaaaggtcatgattcatgattgaaagcagaacaatggagatgaaataaacaaggcaaaatagaggtggaaacagaaggaagtcatttgctgagtctgcagaatggaatgcagcttctgtcctttcttgggatgtctaaaacatgacaaacagggtgatctgttgtacacactatcttatgagggagatggtgacttctcctttttttctgtggatcagtgctattgtgtgttctcagtttaagatagcagatcatctcagcagtaagcacaccaacagaactgagttccagaaaggaagcagtttctggtgctttgcatatgtccaaatccatgcaagtgggagaaagttccagtgcacacttcccatgcttctgagtctaggcgttgtggtgaatatgcaggaatcattcatgagacagaatgtattttgttgtatgacagaaggcttttccaagcaaactgcggtgagcgtagtgttgaatatgttgcatgtccatgttagaaaacagaatccagtcatcagctaatacaaatgatttcccagagcagtgtttgtttcaagcttctgtcaaatagtttggcttttctgcagggtctctgtgatttccccacctatgtacttttctgtgttaactcacttattatggtataactcaggaacaggtctcaggatggagagaagcatacaacatgagcaaagctttttctcgtgctctgaagggtcttgagaggggagtgggatgccttctgtgaggatttttatcgcagtgaagctcaagtggtacccaactgcgttgtaattaacatgattattggcatgtttttgactctcattttctacaaggctgcagtgggcccacccatgggctggcccataactgtatgttatgtggaagaagtgtgggaatgatgggttttccatgaaatgtgatgcttctggagatggggcataaacatgttcattcttgttgagctgcattgtgttaaaccaaattgtgtgaagcgaggtcacctggaccactcttgggaaatgcttcagaacaccagtctgttccttctagagaatttgtttttgtgttctatgtatcttaaatcaaatgtgtgcctaagcaattctgtcctctgattcccacccctacccaccaaaaaatggtagacatgaaaggcaggtgaggaaacagaaaaggtctctttgcagatatatattttttaaatggcactatgtagtaattaagagctaaggagacagaaagacagtagatgagaatagaagagtacctgtacctacaaggggaaaaatgaatgcaattctttatttgataagagtgaactgaaagagaatattattttcctacaataaagcaagctgtcctctcacaggataaagtggaattctgacatggattatggacttcttctaactcccattgacattgcttcttaccagacatggggaaaagctacctttcctgaaaggggaggagggcactgtcctttcagacaaagcttgtacaaattcctgaaccgcaaatttgctgaagtgaccgtatatattatattcataatttaaatgattatttatggtcagatacatattgttaaacttgaaaatgttttattacattacatcaaataaagtttatttgtagctgaaataaagcaacgtaagtaacaatttttaattaaaaaaaaaaaaaaaaaaaaaaaaaaaaaaaaaaaaaaaaaaaaaaaaaaa

SEQ ID NO: 2565 - protein, 432 aa, Homo sapiens
MMDVNSSGRPDLYGHLRSFLLPEVGRGLPDLSPDGGADPVAGSWAPHLLSEVTASPAPTWDAPPDNASGCGEQINYGRVEKVVIGSILTLITLLTIAGNCLVVISVCFVKKLRQPSNYLIVSLALADLSVAVAVMPFVSVTDLIGGKWIFGHFFCNVFIAMDVMCCTASIMTLCVISIDRYLGITRPLTYPVRQNGKCMAKMILSVWLLSASITLPPLFGWAQNVNDDKVCLISQDFGYTIYSTAVAFYIPMSVMLFMYYQIYKAARKSAAKHKFPGFPRVEPDSVIALNGIVKLQKEVEECANLSRLLKHERKNISIFKREQKAATTLGIIVGAFTVCWLPFFLLSTARPFICGTSCSCIPLWVERTFLWLGYANSLINPFIYAFFNRDLRTTYRSLLQCQYRNINRKLSAAGMHEALKLAERPERPEFVL

SEQ ID NO: 2566 - DNA, 2643 bp, Homo sapiens
acacacacaaacgccttcttcccggagtattgaatagttgggaattggaacccctccagggggaaccaaacattgtcgttcagaagaagacaaagagagattgaaatgaagctgttgatttcaacacacaaattctggtggtagatgaaagcaaagcaagtaagtttctccgaatccctagtcaactggaggtagagacggactgcgcaggttaactacagctcccagcatgcctgaggggcgggctcagcggctgcgcagactggcgcgcgcggacggtcatgggacttcagcatggcggtgtttgcagatttggacctgcgagcgggttctgacctgaaggctctgcgcggacttgtggagacagccgctcaccttggctattcagttgttgctatcaatcatatcgttgactttaaggaaaagaaacaggaaattgaaaaaccagtagctgtttctgaactcttcacaactttgccaattgtacagggaaaatcaagaccaattaaaattttaactagattaacaattattgtctcggatccatctcactgcaatgttttgagagcaacttcttcaagggcccggctctatgatgttgttgcagtttttccaaagacagaaaagctttttcatattgcttgcacacatttagatgtggatttagtctgcataactgtaacagagaaactaccattttacttcaaaagacctcctattaatgtggcgattgaccgaggcctggcttttgaacttgtctatagccctgctatcaaagactccacaatgagaaggtatacaatttccagtgccctcaatttgatgcaaatctgcaaaggaaagaatgtaattatatctagtgctgcagaaaggcctttagaaataagagggccatatgacgtggcaaatctaggcttgctgtttgggctctctgaaagtgacgccaaggctgcggtgtccaccaactgccgagcagcgcttctccatggagaaactagaaaaactgcttttggaattatctctacagtgaagaaacctcggccatcagaaggagatgaagattgtcttccagcttccaagaaagccaagtgtgagggctgaaaagaatgccccagtctctgtcagcactcccttcttcccttttatagttcatcagccacaacaaaaataaaacctttgtgtgatttactgttttcatttggagctagaaatcaatagtctataaaaacagttttacttgcaatccattaaaacaacaaacgaaacctagtgaagcatctttttaaaaggctgccagcttaatgaatttagatgtactttaagagagaaagactggttatttctcctttgtgtaagtgataaacaacagcaaatatacttgaataaaatgtttcaggtatttttgtttcattttgtttttgagatagggtctttgttgctcaggctggagtacagtggcataatcacagctcactgcaacctcaatcctgggctcaagtgatcctcccgcttcagcctctcaagcagcgggaactacaggtgtgcactaccacacctggctattttttttttttttttttttttcccttgtagagacatggtctcactatgttgctgaggctggtctcaaactcctaggatcaagccatcctcccgctttggcctcctaaagtgctgggattacatgagccaccacatgcagccagatgtttgaatattttaagagcttctttcgaaagtttcttgttcatactcaaatagtagttattttgaagatattcaaacttatattgaagaagtgactttagttcctcttgttttaagcttctttcatgtattcaaatcagcatttttttctaagaaattgctatagaatttgtggaaggagagaggatacacatgtaaaattacatctggtctcttccttcactgcttcatgcctacgtaaggtctttgaaataggattccttacttttagttagaaacccctaaaacgctaatattgattttcctgatagctgtattaaaaatagcaaagcatcggactgaaccaactttggaaataatttatttttataatgggatcatgttaagtagaagtagctttttatgcaaatacatgcatttatgcaatattaatgtaagggctctaaaacaatggagtagagccagaggtataactgaataagaaatttttttaagcaagagaaagacaactgttctgcgggttggagaaaatacaattttttttttttttttttttgagacagtctcgctctgtcccccaggctggagtgcagtggctcgatctctgctcactgcaagctccgcctcctgggttcatgccattctcctgcctcagcctcctgagtagctgggactacaggcgctcgccatgtatttagcagagacggggtttcaccgtgttagccaggatggtctcaatctcctgacctcatattccacccgcctcggcctcccaaagtgctgggattacaggcgttagccactgcgcccggcccgagaaaatacagttttaaaaagagaaagctttataacctcaccaatgaatacaaatgtttaaataaaatattgattaaaaaaacattaaaagcgaaaaaaaaaaaaaaaaaaaaaaaaaaa

SEQ ID NO: 2567 - protein, 268 aa, Homo sapiens
MAVFADLDLRAGSDLKALRGLVETAAHLGYSVVAINHIVDFKEKKQEIEKPVAVSELFTTLPIVQGKSRPIKILTRLTIIVSDPSHCNVLRATSSRARLYDVVAVFPKTEKLFHIACTHLDVDLVCITVTEKLPFYFKRPPINVAIDRGLAFELVYSPAIKDSTMRRYTISSALNLMQICKGKNVIISSAAERPLEIRGPYDVANLGLLFGLSESDAKAAVSTNCRAALLHGETRKTAFGIISTVKKPRPSEGDEDCLPASKKAKCEG

SEQ ID NO: 2568 - DNA, 5840 bp, Homo sapiens
gtctccactagaggctgcacagcccgcccggaccaacgcctccgcgcctgccgccgtctggccggcgccctcccgtttccttcctccagggggaaaaaatgtctttcgggccgctttccaggaagcagcaggatgcgccgctccactgtcggtagcaacaagctgcgcaaaccatgcaggatgatttactgatggacaaaagcaaaacccagccccagccccagcagcagcagcggcagcagcagcagccccaacctgagtccagcgtatccgaagccccgtccacgcccctctcctcagagacccccaagccggaggaaaacagcgcagtgccggccctcagcccagccgctgcccccccggcccccaacggcccggacaagatgcagatggaatcaccgctcctgccaggcttgagtttccatcagcctcctcagcagccgccgccgcctcaggagcccgcggcaccgggcgcgtcgctgtcgccgtccttcggcagcacctggtccacgggcaccaccaacgcggtagaggacagcttcttccaggggatcaccccagtcaacgggaccatgctcttccagaacttcccgcaccatgtcaacccagtcttcggaggcactttctccccgcagatcggcctggcgcagacccagcaccaccagcagccgccgccgcctgcgcccgcgccgcagccggcacagccagcgcagccaccacaggcgcagcccccgcagcagcgccgctcacccgccagccccagccaggcgccctacgcgcagaggagcgccgccgcggcgtacggccaccagcccatcatgaccagcaagccgtcctcgtcttcggcggttgcagccgctgctgccgcagccgccgcctcgtcggcctcgtccagctggaacacgcaccaaagcgtgaatgcagcctggagcgcaccgtccaacccctggggcggcctgcaggcgggccgggaccctcgccgggcggtcggtgtgggcgtgggtgtgggtgtcggggtgccttccccgctcaaccccatctcgccgctcaaaaagcccttctccagcaacgtgatcgcgccgcccaagttccctcgcgcggcccctctcacttccaagtcctggatggaggataacgctttccggaccgataatggtaacaatctgttgccatttcaggaccggagtaggccctatgatacttttaacttgcactcgttggagaactccttaatggatatgataaggactgatcatgaacctctgaaaggtaaacactaccctcccagtggcccaccaatgagtttcgctgatataatgtggaggaatcattttgcaggacgcatggggataaatttccatcatccaggaacagataatattatggcacttaacaatgccttcctggatgatagccatggtgatcaagccttgtcatctggcttaagttctcccactcgctgtcaaaatggggaacgagtagaacgctactctagaaaggtgtttgttggaggacttcctcctgatattgatgaagatgagatcactgccagctttcgcaggtttggacctctcgtagtagactggcctcacaaagctgaaagcaagtcttattttcctcctaaaggctatgcctttctgctgttccaagaggaaagctcagtacaagctttgatagatgcctgcctagaagaagatgggaaactctacctgtgtgtgtcaagccccaccatcaaggacaagccagtgcaaattcgaccatggaacctaagtgacagtgactttgtaatggatggttctcagcctttggaccccagaaaaactatctttgttgggggagttccacgaccccttcgagctgttgaactggcaatgatcatggaccgtttgtacggtggtgtctgctatgctggcattgatacggacccagagctgaagtaccccaaaggtgctggccgcgtggcattctccaatcagcagagttacattgcagccatcagcgctcgttttgtgcagcttcagcacaatgacattgacaaacgggttgaagtaaagccatatgtgctggatgatcagatgtgtgatgagtgccagggcacacgctgtggtgggaagtttgccccgttcttctgtgccaacgtcacctgtctgcagtattactgtgaatactgctgggcgagcatacattcccgagccgggcgggagttccacaaaccgctggtgaaggagggaggcgaccgccctcgtcacgtcccgttccgctggagctgagccacgggccgacccagccacaagtactggagtagataacaaggagggaaaagagagggcactgcctcagggcttacagtgttctggaaatctgtgcattcgttctcgatttttaaagaagaattgggtctttttattattattattattatttacagtcatattactgaactcagtgtccagtataatgcagaattgcagagtgtagaatggtactgatttgcactttgattcacacctttgtctgcttggtaccttaattttttatacctgatttgtcactcgtgacagtatgtagactgccattctcatcagcggccgtcaggctactgtctgtgattcttttgtttgttgttgtggtgttgttctgattgttttgaactggagcatgcacttattttcagaaacttagagagttgcccctaggacaagacttaccaaaggtaatactcgtgagtaggtggcagatgtagcaaaaacttcacaacaattcagcaatcattagctcgggtcacttagagtaaggataacccttcatgaaaataagcctttagttgctctctattttgacttgtaaggatacctcataagctggatcttttatttttccttcatgtttgatttttgttttgccgaggattttggttagatcttttagtattatgtaaatttatgctgcaatagcttttgctgctattaaaatggtattattaataccataatactctattcaggctaggatatcaattaaacacaaaaacccaacaacacacttttgtgattttagggatagagtcagctgccgaacggagatcagaatagacttcagaaagcttcggtggaaggtcactatttctgactgcatgtttacttaatcaggttgctgcatgcaataaattttatatccaatgtctagtataaaacgttcccacaatgcacaaattaagaatctatataagctataaaaatactcattttttaaaaaaagtttttttcattcaaagaattggtaattgaccggaggaaggcatgcctcaataaatggaatgctctgaatgggaagagcccataacagaatgacctatattacaaccgatataaaacctaggtgtaggatattcttcaagcaaatttgtggatggtagatgaagtactttgcggtgctctgttatatattgtgaaatttattttatatagtaaagtgattatgtctaactgtgatcaaacttaactgtttaaagcctctgtcagacattaatgaacttgacagttcataactgatatattataaactaacacatgagctcttagttacaatctcttagtgcttgcaccattttacatagcttcagaccttgtccagaaaaccaaagagctcatcttagcttacaaacactaagaatatatacaggatatagagataagttgtcagattgacaaactaggcacatttttaagaaagttgtgtaatggtgatgctaaagaaatgtctgtacaaaataagatggcctgggcagagttggttgtctgagtgagaaactaactacttaattccctggatttatcctgttaagcttgagtagaatgaaggcctgctagcactagcgtggtctagaatgaaggcctgctagcactagcgtggacatttttctagcattcacccttgggctgcagatagtaatatataaacacacacaatgattgcaagactatgtaaatctttttttaatcttcttcctatgttttggaattctggggacaatctgactggatatgacactgcagaatagatttaagtcgctgtgttttctgtgctgtgatgtccttgtactgtcttaagttagtgttgcttgtttttgttttgttctcccatgtttagttgcaattactggctctcaagctatagtttgttttcaaaaaggaaaaacaaaatagttttttactggattaaaaatgcttattttagaatcctcccctttttgaggctttttggtaataattgcttttttccagcccaggtgtggttttgtttgtttttttctatgtttgtgggttttttttcatctgtacaagaaattttgttatgcactactactttttgtattctagacagttttcaaaagttggcagatttttttttttgtttttaaggaaaaaggcatgctttctgactgacatgatcttttgcaatacctcaattttgaaatataggaaagaaaatgatattttctaagtaagtttattcagaaaaatatatattaatttaattctgcaagaaaatgatttaacagatgggtaactttatttttttcatgcttatttgtgttttttgaaaatgaagaagttagagctttataactataatattaaagatcatatctaacctacagaaatctacctaattatgtgaaagaagcaaaactttttgaagaagcacccctctttcatgtattaaaataacactgagatttttttaaaagctggaagattgtacagcataaagctaaagtgaaggcaaaaaacattgtcctgaagaataggttacaaaaaataaactccatttggtgctgaaagttgtgaatagatggtggaaactactttcccttaatttgtatatttctaatcaagtgttgattgtgcgcgactgaccaggattgtgaaagagttcttctgtttgtatttttttaaagagaacttttttagtttattaaattataacatgttcccttttgttttgtaaataaatgtgcccccaagttgttaatgttatattaaaagagagggtccttcaaaaaaattattttttaaaacacagaggtgttctgacctgcaacttgactgggaagcccctgggtaacacaggtcctgctgtggcctttccttggtgtgacacttgaactagtcgattttttgaaggctataacctaacctcgactatttgttgttatgtgcaatactgtttgtactgtttgtataaaaaatagaaaaaaaaaagaaaagaaaaaaggcataaatctttattgcagatttattttcattgcaaactttagacattgtgattcactgaaatcatttttctactgtcaaatatgtaccttttcttcatgctggtattttttcaatagtaatgtagcctttgtactgagacaaattttcattgttatttttagaaagattttttgctaagaaaaaaattaaacatatttacatatttttcattttatttcgtattttctttaaggagtgctttctcaatcattaatagagttgtttctgggagggactttcatatctggtcaatgtcataatattattttgtatttttattggaataaattaattttatgatgctaattctttaaaagtttatttttttcattttcagttatttttgaagctaaaacctttgtaatattgttactaaagtgtctagttttttgaaatgcaaagctttatgtattaacttgctgatgtggtttacaatagtgtgacaacgatgaaaatgcttggttatgtaaagtgattggaaatgtaatggataattgggtaataaaatgacagaatgagcag

SEQ ID NO: 2569 - protein, 698 aa, Homo sapiens
MQDDLLMDKSKTQPQPQQQQRQQQQPQPESSVSEAPSTPLSSETPKPEENSAVPALSPAAAPPAPNGPDKMQMESPLLPGLSFHQPPQQPPPPQEPAAPGASLSPSFGSTWSTGTTNAVEDSFFQGITPVNGTMLFQNFPHHVNPVFGGTFSPQIGLAQTQHHQQPPPPAPAPQPAQPAQPPQAQPPQQRRSPASPSQAPYAQRSAAAAYGHQPIMTSKPSSSSAVAAAAAAAAASSASSSWNTHQSVNAAWSAPSNPWGGLQAGRDPRRAVGVGVGVGVGVPSPLNPISPLKKPFSSNVIAPPKFPRAAPLTSKSWMEDNAFRTDNGNNLLPFQDRSRPYDTFNLHSLENSLMDMIRTDHEPLKGKHYPPSGPPMSFADIMWRNHFAGRMGINFHHPGTDNIMALNNAFLDDSHGDQALSSGLSSPTRCQNGERVERYSRKVFVGGLPPDIDEDEITASFRRFGPLVVDWPHKAESKSYFPPKGYAFLLFQEESSVQALIDACLEEDGKLYLCVSSPTIKDKPVQIRPWNLSDSDFVMDGSQPLDPRKTIFVGGVPRPLRAVELAMIMDRLYGGVCYAGIDTDPELKYPKGAGRVAFSNQQSYIAAISARFVQLQHNDIDKRVEVKPYVLDDQMCDECQGTRCGGKFAPFFCANVTCLQYYCEYCWASIHSRAGREFHKPLVKEGGDRPRHVPFRWS

SEQ ID NO: 2570 - DNA, 3941 bp, Homo sapiens
tcttacctcacaaaggtagctcctccgccggcagcaactcggcgcccgcggtccatggaccggaacctcgggccgacggacgggaacccgggccgcgatcgccgcctccccgcctcaggctcctcctcctcgctctccgccgcctccgccggactcccgcaggccctgcaccgccgccgccaggctagcggagctgccccgggaagctgggtgacgggttcgcggctgccgccggactgcggcctactccgccgcctctcagtgctattgtccctgggcctggccttgagcgggtccactggggaaggccgtgtgcgccggctccgcggaagatgccggaccaagccctacagcagatgctggacagaagttgctgggtttgttttgctactgatgaagatgatagaacagctgaatgggtgagaccatgcaggtgcagaggatctacaaaatgggttcaccaggcctgtctacaacgctgggtggatgaaaagcaaagaggaaacagtacagccagagtggcatgtcctcagtgcaatgctgaatacctaatagtttttccaaaattgggtccagtggtttacgtcttggatcttgcagatagactgatctcaaaagcctgtccatttgctgcagcaggaataatggtcggctctatctattggacagctgtgacttatggagcagtgacagtgatgcaggttgtaggtcataaagaaggtctggatgttatggagagagctgatcctttattccttttaattggacttcctactattcctgtcatgctgatattaggcaagatgattcgctgggaggactatgtgcttagactgtggcgcaaatactcgaataaactacaaattttaaatagtatatttccagggataggttgtcctgttcctcgaattccagctgaggccaatcctttagcagatcatgtctctgctactcgaatcttgtgtggagcccttgtctttcctactattgctacaatagttggtaaattgatgttcagtagtgttaactctaatttacaaaggacaatcttgggtggaattgcgtttgttgccataaaaggagcatttaaagtttacttcaaacagcagcaatatttacgacaggcacaccgcaaaattctgaattatccagaacaagaagaagcataaaactgacttctggttgttctgcagttctctcatccttatgaatctgttgtgttgttttgattccatcattaatgcacttgtggagacttgtgataagctgctgctcctatattttttaagaaatataataaagcacttagggcaggggaaatcatctcggtaatcatggaacctaaggatgtgatttgttttcattgtttgtatgtactacttttatggcagtcatatgaaccattatcttagcatggtaaacctgggttttgttcatattttctccagacagaaatgcaaagatcaaactgtgcaaatattaaaaaaatgcacatgctgttttattcaaatgcctcttttgtacatgttcatgtttagtgttttctcagaatcagcaactcaaggtactatgaggatttttctcactgacataatttgattacatactaaataagaggatatgttaatatgaggaaatgtaaattaaattagttataaataaataaccaaaaatgtatgtaaacattcaaatgattatctgaacaaatgagattttgtggtgttttctttaacccatgtgatgtcctccaaaatgtgtagggtaaaaattcacagggcttccagatcactttttcaatattaaattttatttacataatgttgacatctcatacttcatgaagtaattttgactcatgcagtcgtgtgtgtgtgtgtgtgtgtgtgtgtgtgtgtgtgtgtatttgtgtgtttcagtgtttcatcaggtccttccatctctgggagttttttcaacccatatttctagaaattacagctgccagtttatagtagtttgagcagaggatgatttgcaaaaataaaaataaagttattttactctcctcttgcattgattcagttattgagatattcgttgatcacctcctatttcccaggcactgtgcagagtgctgtaggacatagtggtgaacaagacagacttggtccaagctcttacagagttgacagtctagtttcagcacatagaaaaccagcagtgaataaaccaaggtgaggccttgagctctttgtttttatattaatgaggagaaaagtatgaaaacaagaagtcttaagtaaatattgaggtcattgtttttggcttaagtttattatagaaaatcaacactaatgtttttagattttaattgtcctattgatgaggctagcaccttaatcactgtttagttttgtattcatttttaaaagcaattattgaagccattttcaatagattggccattttaatgttcagcaacctgaatggttatttttgttaattaaaattaaatttttaagagatattttcaaaaccctatttattttcttgttcacagtaatgcatgtcaataataaatgtttccccttactgataagcggccactttaggagtgtagcaaatatagattgagctatgttagtttgcaataatatatgttaactttagtaattaaagactggtttctatagtatgaatgtcttaattttgagttatatgatgtttatttgaatgactgttgaacattcaaatttgtattatttggagatgaagatttgactaacagtgagccttattaagaacactactacagttctgaaggggaaatataacatctatggttatatattttaaaaacttagattataggctgtaattataaaatatattggcttttgttttcaatgtgaaagatacattaaatggacacatatcttgcaaaattttgttgtatagaacagtttttaggcagcctttactaaagttatgcaaacacacagttccccatttactacattaatgcccttgacagggagtagctgcttggttttataggtattagggctcatgaaggccggggaacaactctaatccttttggggcaggagggagggtttttttagggttgcggggagggaactgcaagtgcctgaggaccagagtggcctctagccccgaattgaacacttttaaacctaaagagccttattattattagctcgagaaataccacatgccagtcttcccaggaaggtgacctgcctgaccatgaagcaacaaaagagcataggcagacttaaagttggatagacctgggttcaaatcatagttcagctttcaataactgtatgtatgattttggctaaaggatttgactttctctcaactgcagttttcttaatctttgaaatgcaaataatgtttatctcagaagactatttctaggattaactgagagattaaaggaacagcagcacttaggctcaaaatcgcccctacaaagcagtagttgtttcttaattgctaagtaatctgtttgcactctaggaaaagtaaatggagaggtaaaagaaaggcattggggacaaatgaaagagatgatgtagatttttcggatgggtgggtatattttattttccagtttattttcatatttctttactgtgttatttctggaaactttaatgttttaaacctcttttataaaattcaatgacgactactagaattcttttcaaaagttaacttatctccaaagtggctgaaaatattgtttaccattacatgattatgaaatgactgtgaagaatataaaattaaacttagtgacttaattagtcactgccttgctaactttgctgtaatttttttaaacgtcttgtttttaatatagcaaactatctcaatactggctggattaggttaaataaagaatttttatgttcaaaaaaaaaaaaaaa

SEQ ID NO: 2571 - protein, 278 aa, Homo sapiens
MPDQALQQMLDRSCWVCFATDEDDRTAEWVRPCRCRGSTKWVHQACLQRWVDEKQRGNSTARVACPQCNAEYLIVFPKLGPVVYVLDLADRLISKACPFAAAGIMVGSIYWTAVTYGAVTVMQVVGHKEGLDVMERADPLFLLIGLPTIPVMLILGKMIRWEDYVLRLWRKYSNKLQILNSIFPGIGCPVPRIPAEANPLADHVSATRILCGALVFPTIATIVGKLMFSSVNSNLQRTILGGIAFVAIKGAFKVYFKQQQYLRQAHRKILNYPEQEEA

SEQ ID NO: 2572 - DNA, 3279 bp, Homo sapiens
ccggctcgaagcgcaacgaggaagcgtttgcggtgatcccggcgactgcgctggctaatgcggtaccggctagcgtggcttctgcaccccgcactgcccagcaccttccgctcagtcctcggcgcccgcctgccgcctccggagcgcctgtgtggtttccaaaaaaagacttacagcaaaatgaataatccagccatcaagagaataggaaatcacattaccaagtctcctgaagacaagcgagaatatcgagggctagagctggccaatggtatcaaagtacttcttatgagtgatcccaccacggataagtcatcagcagcacttgatgtgcacataggttcattgtcggatcctccaaatattgctggcttaagtcatttttgtgaacatatgctttttttgggaacaaagaaataccctaaagaaaatgaatacagccagtttctcagtgagcatgcaggaagttcaaatgcctttactagtggagagcataccaattactattttgatgtttctcatgaacacctagaaggtgccctagacaggtttgcacagttttttctgtgccccttgttcgatgaaagttgcaaagacagagaggtgaatgcagttgattcagaacatgagaagaatgtgatgaatgatgcctggagactctttcaattggaaaaagctacagggaatcctaaacaccccttcagtaaatttgggacaggtaacaaatatactctggagactagaccaaaccaagaaggcattgatgtaagacaagagctactgaaattccattctgcttactattcatccaacttaatggctgtttgtgttttaggtcgagaatctttagatgacttgactaatctggtggtaaagttattttctgaagtagagaacaaaaatgttccattgccagaatttcctgaacaccctttccaagaagaacatcttaaacaactttacaaaatagtacccattaaagatattaggaatctctatgtgacatttcccatacctgaccttcagaaatactacaaatcaaatcctggtcattatcttggtcatctcattgggcatgaaggtcctggaagtctgttatcagaacttaagtcaaagggctgggttaatactcttgttggtgggcagaaggaaggagcccgaggttttatgttttttatcattaatgtggacttgaccgaggaaggattattacatgttgaagatataattttgcacatgtttcaatacattcagaagttacgtgcagaaggacctcaagaatgggttttccaagagtgcaaggacttgaatgctgttgcttttaggtttaaagacaaagagaggccacggggctatacatctaagattgcaggaatattgcattattatcccctagaagaggtgctcacagcggaatatttactggaagaatttagacctgacttaatagagatggttctcgataaactcagaccagaaaatgtccgggttgccatagtttctaaatcttttgaaggaaaaactgatcgcacagaagagtggtatggaacccagtacaaacaagaagctataccggatgaagtcatcaagaaatggcaaaatgctgacctgaatgggaaatttaaacttcctacaaagaatgaatttattcctacgaattttgagattttaccgttagaaaaagaggcgacaccataccctgctcttattaaggatacagtcatgagcaaactttggttcaaacaagatgataagaaaaaaaagccgaaggcttgtctcaactttgaatttttcagcccatttgcttatgtggaccccttgcactgtaacatggcctatttgtaccttgagctcctcaaagactcactcaacgagtatgcatatgcagcagagctagcaggcttgagctatgatctccaaaataccatctatgggatgtatctttcagtgaaaggttacaatgacaagcagccaattttactaaagaagattattgagaaaatggctacctttgagattgatgaaaaaagatttgaaattatcaaagaagcatatatgcgatctcttaacaatttccgggctgaacagcctcaccagcatgccatgtactacctccgcttgctgatgactgaagtggcctggactaaagatgagttaaaagaagctctggatgatgtaacccttcctcgccttaaggccttcatacctcagctcctgtcacggctgcacattgaagcccttctccatggaaacataacaaagcaggctgcattaggaattatgcagatggttgaagacaccctcattgaacatgctcataccaaacctctccttccaagtcagctggttcggtatagagaagttcagctccctgacagaggatggtttgtttatcagcagagaaatgaagttcacaataactgtggcatcgagatatactaccaaacagacatgcaaagcacctcagagaatatgtttctggagctcttctgtcagattatctcggaaccttgcttcaacaccctgcgcaccaaggagcagttgggctatatcgtcttcagcgggccacgtcgagctaatggcatacagagcttgagattcatcatccagtcagaaaagccacctcactacctagaaagcagagtggaagctttcttaattaccatggaaaagtccatagaggacatgacagaagaggccttccaaaaacacattcaggcattagcaattcgtcgactagacaaaccaaagaagctatctgctgagtgtgctaaatactggggagaaatcatctcccagcaatataattttgacagagataacactgaggttgcatatttaaagacacttaccaaggaagatatcatcaaattctacaaggaaatgttggcagtagatgctccaaggagacataaggtatccgtccatgttcttgccagggaaatggattcttgtcctgttgttggagagttcccatgtcaaaatgacataaatttgtcacaagcaccagccttgccacaacctgaagtgattcagaacatgaccgaattcaagcgtggtctgccactgtttccccttgtgaaaccacatattaacttcatggctgcaaaactctgaagattccccatgcatgggaaagtgcaagtggatgcattcctgagtcttccagagcctaagaaaatcatcttggccactttaatagtttctgattcactattagagaaacaaacaaaaaattgtcaaatgtcattatgtagaaatattataaatccaaagtaa

SEQ ID NO: 2573 - protein, 1019 aa, Homo sapiens
MRYRLAWLLHPALPSTFRSVLGARLPPPERLCGFQKKTYSKMNNPAIKRIGNHITKSPEDKREYRGLELANGIKVLLMSDPTTDKSSAALDVHIGSLSDPPNIAGLSHFCEHMLFLGTKKYPKENEYSQFLSEHAGSSNAFTSGEHTNYYFDVSHEHLEGALDRFAQFFLCPLFDESCKDREVNAVDSEHEKNVMNDAWRLFQLEKATGNPKHPFSKFGTGNKYTLETRPNQEGIDVRQELLKFHSAYYSSNLMAVCVLGRESLDDLTNLVVKLFSEVENKNVPLPEFPEHPFQEEHLKQLYKIVPIKDIRNLYVTFPIPDLQKYYKSNPGHYLGHLIGHEGPGSLLSELKSKGWVNTLVGGQKEGARGFMFFIINVDLTEEGLLHVEDIILHMFQYIQKLRAEGPQEWVFQECKDLNAVAFRFKDKERPRGYTSKIAGILHYYPLEEVLTAEYLLEEFRPDLIEMVLDKLRPENVRVAIVSKSFEGKTDRTEEWYGTQYKQEAIPDEVIKKWQNADLNGKFKLPTKNEFIPTNFEILPLEKEATPYPALIKDTVMSKLWFKQDDKKKKPKACLNFEFFSPFAYVDPLHCNMAYLYLELLKDSLNEYAYAAELAGLSYDLQNTIYGMYLSVKGYNDKQPILLKKIIEKMATFEIDEKRFEIIKEAYMRSLNNFRAEQPHQHAMYYLRLLMTEVAWTKDELKEALDDVTLPRLKAFIPQLLSRLHIEALLHGNITKQAALGIMQMVEDTLIEHAHTKPLLPSQLVRYREVQLPDRGWFVYQQRNEVHNNCGIEIYYQTDMQSTSENMFLELFCQIISEPCFNTLRTKEQLGYIVFSGPRRANGIQSLRFIIQSEKPPHYLESRVEAFLITMEKSIEDMTEEAFQKHIQALAIRRLDKPKKLSAECAKYWGEIISQQYNFDRDNTEVAYLKTLTKEDIIKFYKEMLAVDAPRRHKVSVHVLAREMDSCPVVGEFPCQNDINLSQAPALPQPEVIQNMTEFKRGLPLFPLVKPHINFMAAKL

SEQ ID NO: 2574 - DNA, 4908 bp, Homo sapiens
acctgcgtgcagtcggtcctccaggccacgcagcgcccgagagtaccagggagactccggcccctgtcggcgccaagcccctccgcccctcacagcgcccaggtccgcggccgggccttgattttttggcggggaccgtcatggcgtcgcagccaaattcgtctgcgaagaagaaagaggagaaggggaagaacatccaggtggtggtgagatgcagaccatttaatttggcagagcggaaagctagcgcccattcaatagtagaatgtgatcctgtacgaaaagaagttagtgtacgaactggaggattggctgacaagagctcaaggaaaacatacacttttgatatggtgtttggagcatctactaaacagattgatgtttaccgaagtgttgtttgtccaattctggatgaagttattatgggctataattgcactatctttgcgtatggccaaactggcactggaaaaacttttacaatggaaggtgaaaggtcacctaatgaagagtatacctgggaagaggatcccttggctggtataattccacgtacccttcatcaaatttttgagaaacttactgataatggtactgaattttcagtcaaagtgtctctgttggagatctataatgaagagctttttgatcttcttaatccatcatctgatgtttctgagagactacagatgtttgatgatccccgtaacaagagaggagtgataattaaaggtttagaagaaattacagtacacaacaaggatgaagtctatcaaattttagaaaagggggcagcaaaaaggacaactgcagctactctgatgaatgcatactctagtcgttcccactcagttttctctgttacaatacatatgaaagaaactacgattgatggagaagagcttgttaaaatcggaaagttgaacttggttgatcttgcaggaagtgaaaacattggccgttctggagctgttgataagagagctcgggaagctggaaatataaatcaatccctgttgactttgggaagggtcattactgcccttgtagaaagaacacctcatgttccttatcgagaatctaaactaactagaatcctccaggattctcttggagggcgtacaagaacatctataattgcaacaatttctcctgcatctctcaatcttgaggaaactctgagtacattggaatatgctcatagagcaaagaacatattgaataagcctgaagtgaatcagaaactcaccaaaaaagctcttattaaggagtatacggaggagatagaacgtttaaaacgagatcttgctgcagcccgtgagaaaaatggagtgtatatttctgaagaaaattttagagtcatgagtggaaaattaactgttcaagaagagcagattgtagaattgattgaaaaaattggtgctgttgaggaggagctgaatagggttacagagttgtttatggataataaaaatgaacttgaccagtgtaaatctgacctgcaaaataaaacacaagaacttgaaaccactcaaaaacatttgcaagaaactaaattacaacttgttaaagaagaatatatcacatcagctttggaaagtactgaggagaaacttcatgatgctgccagcaagctgcttaacacagttgaagaaactacaaaagatgtatctggtctccattccaaactggatcgtaagaaggcagttgaccaacacaatgcagaagctcaggatatttttggcaaaaacctgaatagtctgtttaataatatggaagaattaattaaggatggcagctcaaagcaaaaggccatgctagaagtacataagaccttatttggtaatctgctgtcttccagtgtctctgcattagataccattactacagtagcacttggatctctcacatctattccagaaaatgtgtctactcatgtttctcagatttttaatatgatactaaaagaacaatcattagcagcagaaagtaaaactgtactacaggaattgattaatgtactcaagactgatcttctaagttcactggaaatgattttatccccaactgtggtgtctatactgaaaatcaatagtcaactaaagcatattttcaagacttcattgacagtggccgataagatagaagatcaaaaaaaggaactagatggctttctcagtatactgtgtaacaatctacatgaactacaagaaaataccatttgttccttggttgagtcacaaaagcaatgtggaaacctaactgaagacctgaagacaataaagcagacccattcccaggaactttgcaagttaatgaatctttggacagagagattctgtgctttggaggaaaagtgtgaaaatatacagaaaccacttagtagtgtccaggaaaatatacagcagaaatctaaggatatagtcaacaaaatgacttttcacagtcaaaaattttgtgctgattctgatggcttctcacaggaactcagaaattttaaccaagaaggtacaaaattggttgaagaatctgtgaaacactctgataaactcaatggcaacctggaaaaaatatctcaagagactgaacagagatgtgaatctctgaacacaagaacagtttatttttctgaacagtgggtatcttccttaaatgaaagggaacaggaacttcacaacttattggaggttgtaagccaatgttgtgaggcttcaagttcagacatcactgagaaatcagatggacgtaaggcagctcatgagaaacagcataacatttttcttgatcagatgactattgatgaagataaattgatagcacaaaatctagaacttaatgaaaccataaaaattggtttgactaagcttaattgctttctggaacaggatctgaaactggatatcccaacaggtacgacaccacagaggaaaagttatttatacccatcaacactggtaagaactgaaccacgtgaacatctccttgatcagctgaaaaggaaacagcctgagctgttaatgatgctaaactgttcagaaaacaacaaagaagagacaattccggatgtggatgtagaagaggcagttctggggcagtatactgaagaacctctaagtcaagagccatctgtagatgctggtgtggattgttcatcaattggcggggttccatttttccagcataaaaaatcacatggaaaagacaaagaaaacagaggcattaacacactggagaggtctaaagtggaagaaactacagagcacttggttacaaagagcagattacctctgcgagcccagatcaacctttaattcacttgggggttggcaattttatttttaaagaaaacttaaaaataaaacctgaaaccccagaacttgagccttgtgtatagattttaaaagaatatatatatcagccgggcgcggtggctcatgcctgtaatcccagcactttgggaggctgaggcgggtggattgcttgagcccaggagtttgagaccagcctggccaacgtggcaaaacctcgtctctgttaaaaattagccgggcgtggtggcacactcctgtaatcccagctactggggaggctgaggcacgagaatcacttgaacccaggaagcggggttgcagtgagccaaaggtacaccactacactccagcctgggcaacagagcaagactcggtctcaaaaacaaaatttaaaaaagatataaggcagtactgtaaattcagttgaattttgatatctacccatttttctgtcatccctatagttcactttgtattaaattgggtttcatttgggatttgcaatgtaaatacgtatttctagttttcatataaagtagttcttttataacaaatgaaaagtatttttcttgtatattattaagtaatgaatatataagaactgtactcttctcagcttgagcttaacataggtaaatatcaccaacatctgtccttagaaaggaccatctcatgttttttttcttgctatgacttgtgtattttcttgcatcctccctagacttccctatttcgctttctcctcggctcactttctccctttttatttttcaccaaaccatttgtagagctacaaaacctatcctttcttattttcagtagtcagaattttatctagaaatcttttaacacctttttagtggttatttctaaaatcactgtcaacaataaatctaaccctagttgtatccctcctttaagtatttaaaacttgttgccccaaatgtgaaagcatttaattcctttaagaggcctaactcattcaccctgacagagttcacaaaaagcccactttagagtatacattgctattatgggagaccacccagacatctgactaatggctctgtgccacactccaagacctgtgccttttagagaagctcacaatgatttaaggactgtttgaaacttccaattatgtctataatttatattcttttgtttacatgatgaaactttttgttgttgcttgtttgtatataatacaatgtgtacatgtatctttttctcgattcaaatcttaacccttaggactctggtatttttgatctggcaaccatatttctggaagttgagatgtttcagcttgaagaaccaaaacagaaggaatatgtacaaagaataaattttctgctcacgatgagtttagtgtgtaaagtttagagacatctgactttgatagctaaattaaaccaaaccctattgaagaattgaatatatgctacttcaagaaactaaattgatctcgtagaattatcttaataaaataatggctataatttctctgcaaaatcagatgtcagcataagcgatggataatacctaataaactgccctcagtaaatccatggttaataaatgtggtttctacatt

SEQ ID NO: 2575 - protein, 1056 aa, Homo sapiens
MASQPNSSAKKKEEKGKNIQVVVRCRPFNLAERKASAHSIVECDPVRKEVSVRTGGLADKSSRKTYTFDMVFGASTKQIDVYRSVVCPILDEVIMGYNCTIFAYGQTGTGKTFTMEGERSPNEEYTWEEDPLAGIIPRTLHQIFEKLTDNGTEFSVKVSLLEIYNEELFDLLNPSSDVSERLQMFDDPRNKRGVIIKGLEEITVHNKDEVYQILEKGAAKRTTAATLMNAYSSRSHSVFSVTIHMKETTIDGEELVKIGKLNLVDLAGSENIGRSGAVDKRAREAGNINQSLLTLGRVITALVERTPHVPYRESKLTRILQDSLGGRTRTSIIATISPASLNLEETLSTLEYAHRAKNILNKPEVNQKLTKKALIKEYTEEIERLKRDLAAAREKNGVYISEENFRVMSGKLTVQEEQIVELIEKIGAVEEELNRVTELFMDNKNELDQCKSDLQNKTQELETTQKHLQETKLQLVKEEYITSALESTEEKLHDAASKLLNTVEETTKDVSGLHSKLDRKKAVDQHNAEAQDIFGKNLNSLFNNMEELIKDGSSKQKAMLEVHKTLFGNLLSSSVSALDTITTVALGSLTSIPENVSTHVSQIFNMILKEQSLAAESKTVLQELINVLKTDLLSSLEMILSPTVVSILKINSQLKHIFKTSLTVADKIEDQKKELDGFLSILCNNLHELQENTICSLVESQKQCGNLTEDLKTIKQTHSQELCKLMNLWTERFCALEEKCENIQKPLSSVQENIQQKSKDIVNKMTFHSQKFCADSDGFSQELRNFNQEGTKLVEESVKHSDKLNGNLEKISQETEQRCESLNTRTVYFSEQWVSSLNEREQELHNLLEVVSQCCEASSSDITEKSDGRKAAHEKQHNIFLDQMTIDEDKLIAQNLELNETIKIGLTKLNCFLEQDLKLDIPTGTTPQRKSYLYPSTLVRTEPREHLLDQLKRKQPELLMMLNCSENNKEETIPDVDVEEAVLGQYTEEPLSQEPSVDAGVDCSSIGGVPFFQHKKSHGKDKENRGINTLERSKVEETTEHLVTKSRLPLRAQINL

SEQ ID NO: 2576 - DNA, 1753 bp, Homo sapiens
gcgcgggccagcagctctgcgaggggccggagcgcggcggagccatgcagtacccgcaccccgggccggcggcgggcgccgtgggggtgccgctgtacgcgcccacgccgctgctgcaacccgcacacccgacgcccttttacatcgaggacatcctgggccgcgggcccgccgcgcccacgcccgcccccacgctgccgtcccccaactcctccttcaccagcctcgtgtccccctaccggaccccggtgtacgagcccacgccgatccatccagccttctcgcaccactccgccgccgcgctggccgctgcctacggacccggcggcttcgggggccctctgtaccccttcccgcggacggtgaacgactacacgcacgccctgctccgccacgaccccctgggcaaacctctactctggagccccttcttgcagaggcctctgcataaaaggaaaggcggccaggtgagattctccaacgaccagaccatcgagctggagaagaaattcgagacgcagaaatatctctctccgcccgagaggaagcgtctggccaagatgctgcagctcagcgagagacaggtcaaaacctggtttcagaatcgacgcgctaaatggaggagactaaaacaggagaaccctcaaagcaataaaaaagaagaactggaaagtttggacagttcctgtgatcagaggcaagatttgcccagtgaacagaataaaggtgcttctttggatagctctcaatgttcgccctcccctgcctcccaggaagaccttgaatcagagatttcagaggattctgatcaggaagtggacattgagggcgataaaagctattttaatgctggatgatgaccactggcattggcatgttcagaaaactggatttaggaataatgttttgctacagaaaatcttcatagaagaactggaaggctatataagaaagggaatcaattctctggtattctggaaacctaaaaatatttggtgcactgctcaattaacaaacctacatggagaccttaattttgacttaacaaatagtttatgtactgctcttaggttgttttgataaagtgacattatagtgattaaattcttccccctttaaaaaaacagttagtggttttcactatttataaaaaattaattttgaactttttgttaaatttttaagttatagctttaaaggttttaataggaccttcttgaacgacttttctgtaatctgtttatctcccacttaatggaaaggcaaaggggtaccccaaatccagaggtgcctacatttcaggcagccttggagtattttaaaaggaaaacattctttacttttatatgacattcttatactgctgtctcaaatccaaaaacatttcagagctcttgtctcagagatgtgtgttctttttgtcagagatatggttgatgagaatcttaaatgcttgttttgcactatcacttagtacctgtttgaccaaggtgttaaggggatagtacctcccaattcaagcagagaaactgacctgactaaagttaatcgcagatgaactagaagtcacaggttaattaaatgtaagtagattgtagatactgttttatatcaaacaatgtttataatgtgtatatagaattgttcactgtaaaaaaaatggccaaaatgtgttttttttttaataagtaacttgactataaaataaagccgtccgtgggacgactgacctcgttgcaaaaaaaaaaaaaaa

SEQ ID NO: 2577 - protein, 270 aa, Homo sapiens
MQYPHPGPAAGAVGVPLYAPTPLLQPAHPTPFYIEDILGRGPAAPTPAPTLPSPNSSFTSLVSPYRTPVYEPTPIHPAFSHHSAAALAAAYGPGGFGGPLYPFPRTVNDYTHALLRHDPLGKPLLWSPFLQRPLHKRKGGQVRFSNDQTIELEKKFETQKYLSPPERKRLAKMLQLSERQVKTWFQNRRAKWRRLKQENPQSNKKEELESLDSSCDQRQDLPSEQNKGASLDSSQCSPSPASQEDLESEISEDSDQEVDIEGDKSYFNAG

SEQ ID NO: 2578 - DNA, 3568 bp, Homo sapiens
ctggaaaattaggggcctgtcgagcgatgttggaagaagaaacagatcaaacctatgagaatgtcctggctgagattcagtctttcgaactgcctgttgaagctactttaaggtctgtgtatgatgaccaaccaaatgcgcacaagaagtttatggaaaagttagatgcttgtatccgtaatcatgacaaggaaattgaaaagatgtgtaattttcatcatcagggttttgtagatgctattacagaactccttaaagtaaggactgatgcagaaaaactgaaggtgcaagttactgataccaaccgaaggtttcaagatgctggaaaagaggtgatagtccacacagaagatatcattcgatgtagaattcagcagagaaatattacaactgtagtagaaaaattgcagttatgccttcctgtgctagaaatgtacagtaagctgaaagaacagatgagtgccaaaaggtactattctgccctaaaaactatggaacaattagagaatgtgtactttccctgggttagtcaataccggttttgtcagctcatgatagaaaatcttcccaaactccgtgaggatattaaagaaatctccatgtctgatctcaaagactttttggaaagtattcgaaaacattctgacaaaataggtgaaacagcaatgaaacaggcacagcatcagaaaaccttcagtgtttctctgcagaaacaaaataaaatgaaatttgggaaaaatatgtatataaatcgtgatagaattccagaggaaaggaatgaaactgtattgaaacattcacttgaagaagaggatgagaatgaagaagagatcttaactgttcaggatcttgttgatttttcccctgtttatcgatgtttgcacatttattctgttttgggtgacgaggaaacatttgaaaactattatcgaaaacaaagaaagaaacaagcaagactggtattgcaaccccagtcgaatatgcatgaaacagttgatggctatagaagatatttcactcaaattgtagggttctttgtggtagaagatcacattttacatgtgacccaaggattagtaaccagggcatacactgatgaactttggaacatggccctctcaaagataattgctgtccttagagctcattcatcctattgcactgatcctgatcttgttctggagctgaagaatcttactgtaatatttgcagatactttacagggttatggttttccagtgaaccgactttttgaccttttatttgaaataagagaccaatacaatgaaacactgcttaagaaatgggctggagttttcagggacatttttgaagaagataattacagccccatccctgttgtcaatgaagaagaatataaaattgtcatcagcaaatttccctttcaagatccagaccttgaaaagcagtctttcccaaagaaattccccatgtctcagtcagtgcctcatatttacattcaagttaaagaatttatttatgccagccttaaattttcagagtcactacaccggagctcaacagaaatagacgatatgcttagaaaatcaacaaatctgctgctgaccagaactttgagtagctgtttactgaaccttattagaaaacctcatataggtttgacagagctggtacaaatcatcataaacacaacacacctggagcaagcttgtaaatatcttgaggactttataactaacattacaaatatttcccaagaaactgttcatactacaagactttatggactttctactttcaaggatgctcgacatgcagcagaaggagaaatatataccaaactgaatcaaaaaattgatgaatttgttcagcttgctgattatgactggacaatgtctgagccagatggaagagctagtggttatttaatggaccttataaattttttgagaagcatctttcaagtgtttactcatttgcctgggaaagttgctcagacagcttgcatgtcagcctgccagcatctgtcaacatccttaatgcagatgctactggacagtgagttaaaacaaataagcatgggagctgttcagcagtttaacttagatgtcatacagtgtgaattgtttgccagctctgagcctgtgccaggattccagggggataccctgcagctagcattcattgacctcagacaactccttgacctgtttatggtttgggattggtctacttacctagctgattatgggcagccagcttctaagtaccttcgggtgaatccaaacacagcccttactcttttggagaagatgaaggatactagcaaaaagaacaatatatttgctcagttcaggaagaatgatcgagacaaacagaagttgatagagacagtcgtgaaacagctgagaagtttggtgaatggtatgtcccagcacatgtagacctcacatggcttgcactcagtgacaccaaatccatgattcaatgttgatcttgagcaagtattggtcatgatacagtaatttgtttacagaatccaaaaatacaatagagaagatacatgagggcttaaacaagaaatagtaataaatatcatttgtatggatttttaaataatcgaatactattttatatatggaaaaaaatgaccattttttcacttttaggggaaaatgcaaaagtgtaatacataaattgtcacaaattatacctgaaattgattacaaatacatttgaaaaacatatgcctctactcataagtatttttttctatttagacttgaatgataatctgttttttgatcagtatatggctttggaattcaatcatgtctgatatggtagtatttcactaccattttctgacttttagcttttattttcacctcaatgtgatttaagcagaccaaaatttctaattctgctaattctgaaggggaaatagacaaatcttaaaagctgcctgaaatcaaacttgatttaactcagtaagaatgtgaattatttgttctacttgggtggtttaatttaatcgttctgaatatgaacaaaaggttttggattttctaaagatgcagtgttgtttctgttcatcagggttaatatttctaactatattgcttgtaggtgaccccattctggatttgtttggtttggtttggttccagttaaaagagaggacaggaactaaatggggctaaccacttcaggtgcagcttgtgcgagggtagatggttcctgcacacagaagttaccacaggggtcaggttactttcttcaaatagcagatttcagtactttatcctcattgtggaaacaagccaaaccaaatgaactctggaaaacctaaaacaaatgtacattttcctttgtgtatgtttccgtggtccaaatggcaatataaatccagtctttattctccctttgttgtatttatgctgaatcttccctttgccttttcaggatttaggcctgtaagaaactatgcctgattctgtaaaataagtgtaaagaattatatgtacatctctggattttgtgatgaaatattaaaaatattgagcaagttgttgaaaatgcaaaa

SEQ ID NO: 2579 - protein, 799 aa, Homo sapiens
MLEEETDQTYENVLAEIQSFELPVEATLRSVYDDQPNAHKKFMEKLDACIRNHDKEIEKMCNFHHQGFVDAITELLKVRTDAEKLKVQVTDTNRRFQDAGKEVIVHTEDIIRCRIQQRNITTVVEKLQLCLPVLEMYSKLKEQMSAKRYYSALKTMEQLENVYFPWVSQYRFCQLMIENLPKLREDIKEISMSDLKDFLESIRKHSDKIGETAMKQAQHQKTFSVSLQKQNKMKFGKNMYINRDRIPEERNETVLKHSLEEEDENEEEILTVQDLVDFSPVYRCLHIYSVLGDEETFENYYRKQRKKQARLVLQPQSNMHETVDGYRRYFTQIVGFFVVEDHILHVTQGLVTRAYTDELWNMALSKIIAVLRAHSSYCTDPDLVLELKNLTVIFADTLQGYGFPVNRLFDLLFEIRDQYNETLLKKWAGVFRDIFEEDNYSPIPVVNEEEYKIVISKFPFQDPDLEKQSFPKKFPMSQSVPHIYIQVKEFIYASLKFSESLHRSSTEIDDMLRKSTNLLLTRTLSSCLLNLIRKPHIGLTELVQIIINTTHLEQACKYLEDFITNITNISQETVHTTRLYGLSTFKDARHAAEGEIYTKLNQKIDEFVQLADYDWTMSEPDGRASGYLMDLINFLRSIFQVFTHLPGKVAQTACMSACQHLSTSLMQMLLDSELKQISMGAVQQFNLDVIQCELFASSEPVPGFQGDTLQLAFIDLRQLLDLFMVWDWSTYLADYGQPASKYLRVNPNTALTLLEKMKDTSKKNNIFAQFRKNDRDKQKLIETVVKQLRSLVNGMSQHM

SEQ ID NO: 2580 - DNA, 3606 bp, Homo sapiens
gtcgttcccgcggcgccgcgcctcgctggctcctcagcttccagccaaaatggcggagaacagcgagagtctgggcaccgtccccgagcacgagcggatcttgcaggagatcgagagcaccgacaccgcctgtgtggggcccaccctccggtctgtgtatgatgaccaaccaaatgcgcacaagaagtttatggaaaagttagatgcttgtatccgtaatcatgacaaggaaattgaaaagatgtgtaattttcatcatcagggttttgtagatgctattacagaactccttaaagtaaggactgatgcagaaaaactgaaggtgcaagttactgataccaaccgaaggtttcaagatgctggaaaagaggtgatagtccacacagaagatatcattcgatgtagaattcagcagagaaatattacaactgtagtagaaaaattgcagttatgccttcctgtgctagaaatgtacagtaagctgaaagaacagatgagtgccaaaaggtactattctgccctaaaaactatggaacaattagagaatgtgtactttccctgggttagtcaataccggttttgtcagctcatgatagaaaatcttcccaaactccgtgaggatattaaagaaatctccatgtctgatctcaaagactttttggaaagtattcgaaaacattctgacaaaataggtgaaacagcaatgaaacaggcacagcatcagaaaaccttcagtgtttctctgcagaaacaaaataaaatgaaatttgggaaaaatatgtatataaatcgtgatagaattccagaggaaaggaatgaaactgtattgaaacattcacttgaagaagaggatgagaatgaagaagagatcttaactgttcaggatcttgttgatttttcccctgtttatcgatgtttgcacatttattctgttttgggtgacgaggaaacatttgaaaactattatcgaaaacaaagaaagaaacaagcaagactggtattgcaaccccagtcgaatatgcatgaaacagttgatggctatagaagatatttcactcaaattgtagggttctttgtggtagaagatcacattttacatgtgacccaaggattagtaaccagggcatacactgatgaactttggaacatggccctctcaaagataattgctgtccttagagctcattcatcctattgcactgatcctgatcttgttctggagctgaagaatcttactgtaatatttgcagatactttacagggttatggttttccagtgaaccgactttttgaccttttatttgaaataagagaccaatacaatgaaacactgcttaagaaatgggctggagttttcagggacatttttgaagaagataattacagccccatccctgttgtcaatgaagaagaatataaaattgtcatcagcaaatttccctttcaagatccagaccttgaaaagcagtctttcccaaagaaattccccatgtctcagtcagtgcctcatatttacattcaagttaaagaatttatttatgccagccttaaattttcagagtcactacaccggagctcaacagaaatagacgatatgcttagaaaatcaacaaatctgctgctgaccagaactttgagtagctgtttactgaaccttattagaaaacctcatataggtttgacagagctggtacaaatcatcataaacacaacacacctggagcaagcttgtaaatatcttgaggactttataactaacattacaaatatttcccaagaaactgttcatactacaagactttatggactttctactttcaaggatgctcgacatgcagcagaaggagaaatatataccaaactgaatcaaaaaattgatgaatttgttcagcttgctgattatgactggacaatgtctgagccagatggaagagctagtggttatttaatggaccttataaattttttgagaagcatctttcaagtgtttactcatttgcctgggaaagttgctcagacagcttgcatgtcagcctgccagcatctgtcaacatccttaatgcagatgctactggacagtgagttaaaacaaataagcatgggagctgttcagcagtttaacttagatgtcatacagtgtgaattgtttgccagctctgagcctgtgccaggattccagggggataccctgcagctagcattcattgacctcagacaactccttgacctgtttatggtttgggattggtctacttacctagctgattatgggcagccagcttctaagtaccttcgggtgaatccaaacacagcccttactcttttggagaagatgaaggatactagcaaaaagaacaatatatttgctcagttcaggaagaatgatcgagacaaacagaagttgatagagacagtcgtgaaacagctgagaagtttggtgaatggtatgtcccagcacatgtagacctcacatggcttgcactcagtgacaccaaatccatgattcaatgttgatcttgagcaagtattggtcatgatacagtaatttgtttacagaatccaaaaatacaatagagaagatacatgagggcttaaacaagaaatagtaataaatatcatttgtatggatttttaaataatcgaatactattttatatatggaaaaaaatgaccattttttcacttttaggggaaaatgcaaaagtgtaatacataaattgtcacaaattatacctgaaattgattacaaatacatttgaaaaacatatgcctctactcataagtatttttttctatttagacttgaatgataatctgttttttgatcagtatatggctttggaattcaatcatgtctgatatggtagtatttcactaccattttctgacttttagcttttattttcacctcaatgtgatttaagcagaccaaaatttctaattctgctaattctgaaggggaaatagacaaatcttaaaagctgcctgaaatcaaacttgatttaactcagtaagaatgtgaattatttgttctacttgggtggtttaatttaatcgttctgaatatgaacaaaaggttttggattttctaaagatgcagtgttgtttctgttcatcagggttaatatttctaactatattgcttgtaggtgaccccattctggatttgtttggtttggtttggttccagttaaaagagaggacaggaactaaatggggctaaccacttcaggtgcagcttgtgcgagggtagatggttcctgcacacagaagttaccacaggggtcaggttactttcttcaaatagcagatttcagtactttatcctcattgtggaaacaagccaaaccaaatgaactctggaaaacctaaaacaaatgtacattttcctttgtgtatgtttccgtggtccaaatggcaatataaatccagtctttattctccctttgttgtatttatgctgaatcttccctttgccttttcaggatttaggcctgtaagaaactatgcctgattctgtaaaataagtgtaaagaattatatgtacatctctggattttgtgatgaaatattaaaaatattgagcaagttgttgaaaatgcaaaa

SEQ ID NO: 2581 - protein, 804 aa, Homo sapiens
MAENSESLGTVPEHERILQEIESTDTACVGPTLRSVYDDQPNAHKKFMEKLDACIRNHDKEIEKMCNFHHQGFVDAITELLKVRTDAEKLKVQVTDTNRRFQDAGKEVIVHTEDIIRCRIQQRNITTVVEKLQLCLPVLEMYSKLKEQMSAKRYYSALKTMEQLENVYFPWVSQYRFCQLMIENLPKLREDIKEISMSDLKDFLESIRKHSDKIGETAMKQAQHQKTFSVSLQKQNKMKFGKNMYINRDRIPEERNETVLKHSLEEEDENEEEILTVQDLVDFSPVYRCLHIYSVLGDEETFENYYRKQRKKQARLVLQPQSNMHETVDGYRRYFTQIVGFFVVEDHILHVTQGLVTRAYTDELWNMALSKIIAVLRAHSSYCTDPDLVLELKNLTVIFADTLQGYGFPVNRLFDLLFEIRDQYNETLLKKWAGVFRDIFEEDNYSPIPVVNEEEYKIVISKFPFQDPDLEKQSFPKKFPMSQSVPHIYIQVKEFIYASLKFSESLHRSSTEIDDMLRKSTNLLLTRTLSSCLLNLIRKPHIGLTELVQIIINTTHLEQACKYLEDFITNITNISQETVHTTRLYGLSTFKDARHAAEGEIYTKLNQKIDEFVQLADYDWTMSEPDGRASGYLMDLINFLRSIFQVFTHLPGKVAQTACMSACQHLSTSLMQMLLDSELKQISMGAVQQFNLDVIQCELFASSEPVPGFQGDTLQLAFIDLRQLLDLFMVWDWSTYLADYGQPASKYLRVNPNTALTLLEKMKDTSKKNNIFAQFRKNDRDKQKLIETVVKQLRSLVNGMSQHM

SEQ ID NO: 2582 - DNA, 3997 bp, Homo sapiens
gtgccaaggcggctgggggcggcgagcggggccgcgggcgcgcaccgactcaagagccgactgtcagcctcggcgggccggagttctccggcgctgggacaggggcgctgggacaggggcgctgggggcgagccctggcgggggccaggtccgaggaccctgggcgcggcggccccgccaggaggtccggccgcgagcgtgacctcacggggaggggccagcgcggcggcctgggcgctgagccgagcgccgggagagcagcgcagaagccgagccgcgaggagcgcactccgtggccccgatggagcggtacaaagccctggaacagctgctgacagagttggatgacttcctcaagattcttgaccaggagaacctgagcagcacagcactggtgaagaagagctgcctggcggagctcctccggctttacaccaaaagcagcagctctgatgaggagtacatttatatgaacaaagtgaccatcaacaagcaacagaatgcagagtctcaaggcaaagcgcctgaggagcagggcctgctacccaatggggagcccagccagcactcctcggcccctcagaagagccttccagacctcccgccacccaagatgattccagaacggaaacagcttgccatcccaaagacggagtctccagagggctactatgaagaggctgagccatatgacacatccctcaatgaggacggagaggctgtgagcagctcctacgagtcctacgatgaagaggacggcagcaagggcaagtcggccccttaccagtggccctcgccggaggccggcatcgagctgatgcgtgacgcccgcatctgcgccttcctgtggcgcaagaagtggctgggacagtgggccaagcagctctgtgtcatcaaggacaacaggcttctgtgctacaaatcctccaaggaccacagccctcagctggacgtgaacctactgggcagcagcgtcattcacaaggagaagcaagtgcggaagaaggagcacaagctgaagatcacaccgatgaatgccgatgtgattgtgctgggcctgcagagcaaggaccaggctgagcagtggctcagggtcatccaggaagtgagcggcctgccttccgaaggagcatctgaaggaaaccagtacaccccggatgcccagcgctttaactgccagaaaccagatatagctgagaagtacctgtcggcttcagagtatgggagctccgtggatggccaccctgaggtcccagaaaccaaagacgtcaagaagaaatgttctgctggcctcaaactgagcaacctaatgaatctgggcaggaagaaatccacctcactggagcctgtggagaggtccctcgagacatccagttacctgaacgtgctggtgaacagccagtggaagtctcgctggtgctctgtcagggacaatcacctgcacttctaccaggaccggaaccggagcaaggtggcccagcaacccctcagcctggtgggctgcgaggtggtcccagaccccagccccgaccacctctactccttccgcatcctccacaagggcgaggagctggccaagcttgaggccaagtcttccgaggaaatgggccactggctgggtctcctgctctctgagtcaggctccaagacagacccagaagagttcacctacgactatgtggatgccgatagggtctcctgtattgtgagtgcggccaaaaactctctcttactgatgcagagaaagttctcagagcccaacacttacatcgatggcctgcctagccaggaccgccaggaggagctgtatgacgacgtggacctgtcagagctcacagctgcggtggagcctaccgaggaagccacccctgttgcagatgacccaaatgagagagaatctgaccgagtgtacctggacctcacacctgtcaagtcctttctgcatggccccagcagtgcacaggcccaggcctcctccccgacgttgtcctgcctggacaatgcaactgaggccctcccggcagactcaggcccaggtcccaccccagatgagccctgcataaagtgtccagagaacctgggagaacagcagctggagagtttggagccagaggatccttccctgagaatcaccaccgtcaaaatccagacggaacagcagagaatctccttcccaccgagctgcccggatgccgtggtggccaccccacctggtgccagcccacctgtgaaggacaggttgcgcgtgaccagtgcagagatcaagcttggcaagaatcggacagaagctgaggtgaagcggtacacagaggagaaggagaggcttgaaaagaagaaggaagaaatccgggggcacctggctcagctccggaaagagaaacgggagctaaaggaaaccctactgaaatgcacagacaaggaagtcctggcgagcctggagcagaagctgaaggaaattgacgaggagtgccggggcgaggagagcaggcgcgtggacctggagctcagcatcatggaggtgaaggacaacctgaagaaggctgaggcagggcctgtgacgttaggcaccaccgtggacaccacccacctggagaatgtgagcccccgccccaaagctgtcacacctgcctctgccccagactgtaccccagtcaactctgcaaccacactcaagaacaggcctctctcggtcgtggtcacaggcaaaggcactgtactccagaaagccaaggaatgggagaagaaaggagcaagttagaaaacaagcttcatctaaagactctcatgtcaatgtggaccttggtgacaatcctgctttgttaaagcaaaaactatgcgaaagggtgagtctgtttagaagaaaaagcaaagactgaggtactgtgaatggagagcttcagctaagaggaggctctgtcccttttcagagccaaaggaaataatacaacaaaaaggaggcttctttggagacctaagtctattggatgtaaacaagacgttgtatttagggatgttctgtgtttctttcttttttgaagttgtcatcaattgctttactaagatttttaaatagtgaaaacctcctgtttagactttggtggaagatgaatcaaggaagcagggccctgtcttatgggtcacgtgtctttggtgagtgagaagacctaaactcctggccatcatctcttatccaatacttagcagttggggattaaaccatccttgccttcagttctctccaatattaccaggcccaactcagtcttcagtgattttaaacagcattgacatcatctgtaaaaccatcatctgtaaaaccatctatgacatgagttttgagaaacaataatggggaaaatatttgggaccaagctgaagcactaatcccactaagttaaagacttctttccagtccaaggcaggcctgaatcaactgtctttaaataaaattttaagtgatgctgtattatatataggaaaaaatgcttaaaatcctgtcatttagaacagtgaaaagtatcttttgagattaaagtgactctttactgtaggaaaaatattactctgtgtttacagattcattgctgtggtcaggccatttttaagggaagagttatttaatataaatagtctctgattttaagttctgtttaatgttcattctccttccaagaacaaagtggtgatttttggttagggtgatcgccctcttaaaattggcagtgctgttccttgtgctgcccctgtcttttcctctgatggcatttttttttttttttttttaacacaggttgaaacatttcatctattatctctgcctcatttctggagggttgtgtatcagttctctaacacttgttcctgagaactaaatgtcttttttattcttatttcctctctcataaacatttggtgaccttttaccaagtggtgagttagttaggttttttaaaataaaatgttcattgtatttgaaaaaaaaaaaaaaaaaaaaaaa

SEQ ID NO: 2583 - protein, 818 aa, Homo sapiens
MERYKALEQLLTELDDFLKILDQENLSSTALVKKSCLAELLRLYTKSSSSDEEYIYMNKVTINKQQNAESQGKAPEEQGLLPNGEPSQHSSAPQKSLPDLPPPKMIPERKQLAIPKTESPEGYYEEAEPYDTSLNEDGEAVSSSYESYDEEDGSKGKSAPYQWPSPEAGIELMRDARICAFLWRKKWLGQWAKQLCVIKDNRLLCYKSSKDHSPQLDVNLLGSSVIHKEKQVRKKEHKLKITPMNADVIVLGLQSKDQAEQWLRVIQEVSGLPSEGASEGNQYTPDAQRFNCQKPDIAEKYLSASEYGSSVDGHPEVPETKDVKKKCSAGLKLSNLMNLGRKKSTSLEPVERSLETSSYLNVLVNSQWKSRWCSVRDNHLHFYQDRNRSKVAQQPLSLVGCEVVPDPSPDHLYSFRILHKGEELAKLEAKSSEEMGHWLGLLLSESGSKTDPEEFTYDYVDADRVSCIVSAAKNSLLLMQRKFSEPNTYIDGLPSQDRQEELYDDVDLSELTAAVEPTEEATPVADDPNERESDRVYLDLTPVKSFLHGPSSAQAQASSPTLSCLDNATEALPADSGPGPTPDEPCIKCPENLGEQQLESLEPEDPSLRITTVKIQTEQQRISFPPSCPDAVVATPPGASPPVKDRLRVTSAEIKLGKNRTEAEVKRYTEEKERLEKKKEEIRGHLAQLRKEKRELKETLLKCTDKEVLASLEQKLKEIDEECRGEESRRVDLELSIMEVKDNLKKAEAGPVTLGTTVDTTHLENVSPRPKAVTPASAPDCTPVNSATTLKNRPLSVVVTGKGTVLQKAKEWEKKGAS

SEQ ID NO: 2584 - DNA, 3985 bp, Homo sapiens
gtgccaaggcggctgggggcggcgagcggggccgcgggcgcgcaccgactcaagagccgactgtcagcctcggcgggccggagttctccggcgctgggacaggggcgctgggacaggggcgctgggggcgagccctggcgggggccaggtccgaggaccctgggcgcggcggccccgccaggaggtccggccgcgagcgtgacctcacggggaggggccagcgcggcggcctgggcgctgagccgagcgccgggagagcagcgcagaagccgagccgcgaggagcgcactccgtggccccgatggagcggtacaaagccctggaacagctgctgacagagttggatgacttcctcaagattcttgaccaggagaacctgagcagcacagcactggtgaagaagagctgcctggcggagctcctccggctttacaccaaaagcagcagctctgatgaggagtacatttatatgaacaaagtgaccatcaacaagcaacagaatgcagagtctcaaggcaaagcgcctgaggagcagggcctgctacccaatggggagcccagccagcactcctcggcccctcagaagagccttccagacctcccgccacccaagatgattccagaacggaaacagcttgccatcccaaagacggagtctccagagggctactatgaagaggctgagccatatgacacatccctcaatgaggacggagaggctgtgagcagctcctacgagtcctacgatgaagaggacggcagcaagggcaagtcggccccttaccagtggccctcgccggaggccggcatcgagctgatgcgtgacgcccgcatctgcgccttcctgtggcgcaagaagtggctgggacagtgggccaagcagctctgtgtcatcaaggacaacaggcttctgtgctacaaatcctccaaggaccacagccctcagctggacgtgaacctactgggcagcagcgtcattcacaaggagaagcaagtgcggaagaaggagcacaagctgaagatcacaccgatgaatgccgatgtgattgtgctgggcctgcagagcaaggaccaggctgagcagtggctcagggtcatccaggaagtgagcggcctgccttccgaaggagcatctgaaggaaaccagtacaccccggatgcccagcgctttaactgccagaaaccagatatagctgagaagtacctgtcggcttcagagtatgggagctccgtggatggccaccctgaggtcccagaaaccaaagacgtcaagaagaaatgttctgctggcctcaaactgagcaacctaatgaatctgggcaggaagaaatccacctcactggagcctgtggagaggtccctcgagacatccagttacctgaacgtgctggtgaacagccagtggaagtctcgctggtgctctgtcagggacaatcacctgcacttctaccaggaccggaaccggagcaaggtggcccagcaacccctcagcctggtgggctgcgaggtggtcccagaccccagccccgaccacctctactccttccgcatcctccacaagggcgaggagctggccaagcttgaggccaagtcttccgaggaaatgggccactggctgggtctcctgctctctgagtcaggctccaagacagacccagaagagttcacctacgactatgtggatgccgatagggtctcctgtattgtgagtgcggccaaaaactctctcttactgatgcagagaaagttctcagagcccaacacttacatcgatggcctgcctagccaggaccgccaggaggagctgtatgacgacgtggacctgtcagagctcacagctgcggtggagcctaccgaggaagccacccctgttgcagatgacccaaatgagagagaatctgaccgagtgtacctggacctcacacctgtcaagtcctttctgcatggccccagcagtgcacaggcccaggcctcctccccgacgttgtcctgcctggacaatgcaactgaggccctcccggcagactcaggcccaggtcccaccccagatgagccctgcataaagtgtccagagaacctgggagaacagcagctggagagtttggagccagaggatccttccctgagaatcaccaccgtcaaaatccagacggaacagcagagaatctccttcccaccgagctgcccggatgccgtggtggccaccccacctggtgccagcccacctgtgaaggacaggttgcgcgtgaccagtgcagagatcaagcttggcaagaatcggacagaagctgaggtgaagcggtacacagaggagaaggagaggcttgaaaagaagaaggaagaaatccgggggcacctggctcagctccggaaagagaaacgggagctaaaggaaaccctactgaaatgcacagacaaggaagtcctggcgagcctggagcagaagctgaaggaaattgacgaggagtgccggggcgaggagagcaggcgcgtggacctggagctcagcatcatggaggtgaaggacaacctgaagaaggctgaggcagggcctgtgacgttaggcaccaccgtggacaccacccacctggagaatcccaaagctgtcacacctgcctctgccccagactgtaccccagtcaactctgcaaccacactcaagaacaggcctctctcggtcgtggtcacaggcaaaggcactgtactccagaaagccaaggaatgggagaagaaaggagcaagttagaaaacaagcttcatctaaagactctcatgtcaatgtggaccttggtgacaatcctgctttgttaaagcaaaaactatgcgaaagggtgagtctgtttagaagaaaaagcaaagactgaggtactgtgaatggagagcttcagctaagaggaggctctgtcccttttcagagccaaaggaaataatacaacaaaaaggaggcttctttggagacctaagtctattggatgtaaacaagacgttgtatttagggatgttctgtgtttctttcttttttgaagttgtcatcaattgctttactaagatttttaaatagtgaaaacctcctgtttagactttggtggaagatgaatcaaggaagcagggccctgtcttatgggtcacgtgtctttggtgagtgagaagacctaaactcctggccatcatctcttatccaatacttagcagttggggattaaaccatccttgccttcagttctctccaatattaccaggcccaactcagtcttcagtgattttaaacagcattgacatcatctgtaaaaccatcatctgtaaaaccatctatgacatgagttttgagaaacaataatggggaaaatatttgggaccaagctgaagcactaatcccactaagttaaagacttctttccagtccaaggcaggcctgaatcaactgtctttaaataaaattttaagtgatgctgtattatatataggaaaaaatgcttaaaatcctgtcatttagaacagtgaaaagtatcttttgagattaaagtgactctttactgtaggaaaaatattactctgtgtttacagattcattgctgtggtcaggccatttttaagggaagagttatttaatataaatagtctctgattttaagttctgtttaatgttcattctccttccaagaacaaagtggtgatttttggttagggtgatcgccctcttaaaattggcagtgctgttccttgtgctgcccctgtcttttcctctgatggcatttttttttttttttttttaacacaggttgaaacatttcatctattatctctgcctcatttctggagggttgtgtatcagttctctaacacttgttcctgagaactaaatgtcttttttattcttatttcctctctcataaacatttggtgaccttttaccaagtggtgagttagttaggttttttaaaataaaatgttcattgtatttgaaaaaaaaaaaaaaaaaaaaaaa

SEQ ID NO: 2585 - protein, 814 aa, Homo sapiens
MERYKALEQLLTELDDFLKILDQENLSSTALVKKSCLAELLRLYTKSSSSDEEYIYMNKVTINKQQNAESQGKAPEEQGLLPNGEPSQHSSAPQKSLPDLPPPKMIPERKQLAIPKTESPEGYYEEAEPYDTSLNEDGEAVSSSYESYDEEDGSKGKSAPYQWPSPEAGIELMRDARICAFLWRKKWLGQWAKQLCVIKDNRLLCYKSSKDHSPQLDVNLLGSSVIHKEKQVRKKEHKLKITPMNADVIVLGLQSKDQAEQWLRVIQEVSGLPSEGASEGNQYTPDAQRFNCQKPDIAEKYLSASEYGSSVDGHPEVPETKDVKKKCSAGLKLSNLMNLGRKKSTSLEPVERSLETSSYLNVLVNSQWKSRWCSVRDNHLHFYQDRNRSKVAQQPLSLVGCEVVPDPSPDHLYSFRILHKGEELAKLEAKSSEEMGHWLGLLLSESGSKTDPEEFTYDYVDADRVSCIVSAAKNSLLLMQRKFSEPNTYIDGLPSQDRQEELYDDVDLSELTAAVEPTEEATPVADDPNERESDRVYLDLTPVKSFLHGPSSAQAQASSPTLSCLDNATEALPADSGPGPTPDEPCIKCPENLGEQQLESLEPEDPSLRITTVKIQTEQQRISFPPSCPDAVVATPPGASPPVKDRLRVTSAEIKLGKNRTEAEVKRYTEEKERLEKKKEEIRGHLAQLRKEKRELKETLLKCTDKEVLASLEQKLKEIDEECRGEESRRVDLELSIMEVKDNLKKAEAGPVTLGTTVDTTHLENPKAVTPASAPDCTPVNSATTLKNRPLSVVVTGKGTVLQKAKEWEKKGAS

SEQ ID NO: 2586 - DNA, 7620 bp, Homo sapiens
gtcattgagctgatgtgcttttgcaaggggtctctttagaagtggtaggggcagggtcgagagaagaaggggatgcagaatctgtacatgaggaaggagccagagtcactcaggaaactcctcattcttcctgcgctggctgtggcacacccaccggtggcacacccctccctcgggtccagttcagcccacagactcctgggaggagagccagggccccagcctctcctttgaggagtgttgcagcctttctgtgtgccagatgcctagtgaagaaaagctgaaaccctggagctttgtgcatgttaatgaccttggaaatgactgagctcacggaccctcatcacaccatgggagactacaaagtggcccaccctcaggaccctcaccacccatcagagaagcctgtcattcactgccataaatgtggggagccttgcaagggtgaagtgcttcgggtccagaccaaacatttccacatcaagtgtttcacctgcaaagtgtgtggctgtgacctggcacaagggggcttcttcataaagaacggagagtatctctgcaccctggactaccagcggatgtacgggacacgctgccatggctgtggggagttcgtggagggcgaagtggtgactgctctgggcaagacctaccatcccaattgctttgcttgtactatctgcaagcgcccgtttccacccggagaccgagtcacattcaatgggagagactgcctttgtcaactctgtgcacagccgatgtcgtccagtccgaaagaaaccaccttctccagcaattgtgccggctgcggaagagatatcaagaatgggcaggcgctgctggcgctggataagcagtggcacttggggtgctttaaatgcaagtcctgcgggaaggtcctcaccggggagtacatcagcaaggatggtgctccgtactgtgaaaaggactaccagggactctttggggtgaaatgtgaggcgtgtcaccagtttatcacagggaaagtcctggaggcaggtgacaaacattaccaccccagctgtgcacgatgcagcagatgcaaccagatgttcacagaaggagaggaaatgtatcttcaaggctccaccgtttggcatcccgactgtaagcaatctacgaagaccgaggaaaagctgcggcctaccaggacatcctcggaaagtatttattctaggccaggctccagtattcctggctcaccaggtcatactatctatgcaaaagtagacaatgagatcctggattacaaggatttagcagccattccgaaggtcaaggcaatttatgacattgaacgtccagatcttattacctatgagcctttctacacttcgggctatgatgacaaacaggagagacagagccttggagagtctccgaggactttgtctcctactccatcagcagaagggtaccaggatgttcgggatcggatgatccatcggtccacgagccagggctccatcaactcccctgtgtacagccgccacagctacactccaaccacgtcccgctctccccagcatttccacagacctggcaatgagccgtccagcggccggaactcccctctcccttaccggccagacagccgccctctaactccaacttacgctcaggcccctaaacatttccatgttccagatcaaggaatcaacatttaccgaaagccacccatctacaaacagcatgctgccttggcagcccagagcaagtcctcagaagatatcatcaagttttccaagttcccagcagcccaggcaccagaccccagcgagacaccaaagattgagacggaccactggcctggtcccccctcatttgctgtcgtaggacctgacatgaaacgcagatctagtggcagagaggaagatgatgaggaacttctgagacgtcggcagcttcaagaagagcaattaatgaagcttaactcaggcctgggacagttgatcttgaaagaagagatggagaaagagagccgggaaaggtcatctctgttagccagtcgctacgattctcccatcaactcagcttcacatattccatcatctaaaactgcatctctccctggctatggaagaaatgggcttcaccggcctgtttctaccgacttcgctcagtataacagctatggggatgtcagcgggggagtgcgagattaccagacactcccagatggccacatgcctgcaatgagaatggaccgaggagtgtctatgcccaacatgttggaaccaaagatatttccatatgaaatgctcatggtgaccaacagagggcgaaacaaaatcctcagagaggtggacagaaccaggctggagcgccacttagcccctgaagtgtttcgggaaatctttggaatgtccatacaggagtttgacaggttacctctttggagacgcaacgacatgaagaaaaaagcaaaactcttctaagtcccactcgtgaatggcaattagagaaaggactgacagtggcggtgccccataggatgtcatattgaggcccaaacttgattggagaatttgcaaactaccgtcgctcagcaacaccaaaaagagaaagtctggttaaaacaccatgagtcaaatgtcgggccagccaacagtaacacttgccaagaagcatggcgtagaaatttctatgttccgaaacacagagtagtgtccacatgtgagcttttcacattaccttatgtatacaacaggagctgcgttgttttcttctttttcttttcctttatctgttgtccaacaacagtgctgactgtccggataagagctggcaagtgcccttaggatgccgcatgggaaaaatcggttatcataatttcaaagtataaatatatttattaagtagcgctgcggctaagaaggaagagtgaggggtctgtccatggggtggcagtgatttcacacccgcctttcttgaatggcttcgtgttactcagccgtgccctggcaggaatggaactccatcagggaacagggcagctctgtttgaatggggtgaaaaacagcaaaattaattcttagcaagctccttgttctctactgttcaccgggacctggctggcaaatgacttagctattagtatatttaaaaactgttcaaaagcaaaagagaaggaacaggaatgaaaggaaaccttcccttaactctttctgcttcccatagcaggtctggttcctgctccccgcctaggacaggagctgtctggagctccacctttgcaaagaaaggaaaaacacaaattgcccccagattggcccagtggcatgccattaggtgattttgcataggggccatatcattcatggccaaaaaaaaccaaaaagcaaaaaacaaaaacaagtcccatgtcctactgactctagttcttccagtcgttatcctctgctgtctctctggcatcctatgaatcagatcaagcccatgctgttgttggtttttaaggtttctttcaataataggctaaggaaagacatgtttttctcttttaaatctctgcaactccaaagtagactccttcgaacgtatttaatttggccttttcagctttcttcttgcccagctctgtcgaattcatgggtgtgtgtgcacatgttggtttcactcacccagagtaattttgtgagcatgcatgtgctttttaatttctgcttgaatgtttgtcctgctgtgttgcagcttctaaagacattgtcaccgagtgtgtgtgactcaaagatcaagagtgaggctaaactgcgaccccaacatcacttccttcatggaaaggtgttggcgctgatgtagctcatggaaggatcagactgggaaccacagaggaaggatgaggtgggatgtggaggtcagagcatctcacgagagtccctcaggctctgcaacactagattcgaatatgagcctagggtttccccaacacgtgcgtgcatatgaaaccacatcatgattcccgacgtgagttagatgagggagagtttgtgtaactccacacccaggagggtaagccactttattatcatgctttggggctgtgcttaagaatttaagctctgttttaaagccgaagaagaaaacatttgaatttaccttcatatgccactaagaacaaaagctctgaagttcttcctgctggcaccaaatattaggattacaagctgtctctctgacaccagtggtaaaaaagcaagtagaatagtttctgagtctgtgttgcagcctctgacacgtggctcaccgctgtcatttgggggatggaatgaacagtcactgttctatagcatcctcctgtgctcttacctaaggaatctaaattgtcctagccttccattgctatgcactgaatgaggactactctcgtgtgtgtgtgtgtgtgtgtgtgtgtgtgtgtgtgtgtgtgtgtgtgtgttggatctactaacatgtttagcaaatggctctgacagggtggccatgagcagatgagaccagctcttgcttggttggaagccacactgcagtttgcagtttagcctttggtgtctcagtggcttcttgcttattccatgctttttctatcccatcctctctctgtgccctcctgcaatggcagccttggcacaatgcctgggtgtcctcatccttgctttactctggaaagtgtggggatggagaggatggtgcatttccagtgcttccttacctgtcaataacaatggtggccacctgggtcccagcacttggctggtggagagatttttttcattatggagctaataaagggtccctacgttttacattgattaatgaattatcacccagacatgtgcagatgaaatgtcaatataagaaaaatcaaggtatttgggaaacatgggcataatcaggtagttttgctaaaattcctcttccttggtctacataaagaagacatgggtctgtcatagaatggggacattagactgaaaactgggacaacccccttccttattttatagagactaggagttaaggggcctgcctaagattgcagtgataaagaactgaaccctaaatcagctcccactaatgaaaccctgctttccttgtatcttttaaactcagttctgcatccaacttgagaagaaaaaaagcttctttccatatcaagtaccatatgagttcatttaaactgcaccttgcagaaatgcattgccagaaagcaccagtagcctcctatctgcaagcagagtagtgctctgctctggggaggggtcattggaaaccataatgcagagtgggccccctactccatttcccagcaaaaggctccagctggagggatgggttgtggggcaacctggttcctgctaactgccagattgaatgtgtgggctagaatgcctgcacatttagttaaactgggctcagcatgcttgtcctcaaaatgtccatcctggtcacagcacacaagatggctattggtctgcttttaccctaccctgtactatacatgaaaattccagttattaacacactcaaactggtggagcttgttcaccctaggaaggggattgtatatatggcaggcttccctggtgccgatgtaaagggctacatttgggaacatttgacttccttgggactcttaagtgcataatgatggcatgaagtaaaaggggcctcaatgatgataggaaaatcagttcttttaaaatttcttcaagaaaatccaggctatcacatagtctttctgtgtgacttattaggagataggaagagcattgggaaacttgcacagctagctatgcatctacattttggtttggggttagttatgaaatgttcttaatatgacgtgttcaataacttcacataaacttcctgttctccaaaacctcaaagagatagagttaatgagttgttgtttttttttaaatgggggtagttttctatctgtcatgggctctagcatctactccgctacccaattctgtcatctccaagctgagtttcctcttctgaggcagaggctggagcagttctttttcagttctcatcctctccatcccaatccagtatatcaatcaactctaactcggagacgtctagctggcaatgtttctaaaactttcactggatttctttagacattgaagcaaacatttttttctaagaattgcttctcagatgatgatatcaaatgtatatgcttttgcaagtttgaaaagttcaaattaaccacttttgactaggtaagtctttctaaaaaccatttaaagctaactgggtcttagcatcctcctgtgtatggaagagacaggtgaccgctccaggttgggtgctcacagaacccttttcctgactctcatggaagatggtggaaggaaaatagactgtctcatcaaccctcctgtgtcctctgaagcaatctcagtttttattaaccacctcttctgtgtttctggtagctatttaacctgtatttaatctgtacttcctatgccagcctcaattttatttgatttttacaattattctcttctaaccaatgaagtgtttgtcagtatgccccaaagcttgctcttttgtgctcccttttgaataactttctatccagaaaaagagattatttgggacttgagatttgcagtgataccaacttatagcaatgatgtactttaagggaactacccaactatgttgtgatagaagaaagagaaaccttcactttggcatttttttttaatcactgtttatttttctgtttgcggcccaggaagcagtgggaggtggtggcagatatgctttgcatatggattgttatgtttttatttgggcaagtttaatcatggaaaactcaaaaagaaggggggaaatggtcagtttaagccaaaagaaactttctaaacaatgtataggtacacagcaaaattaaacaaatccaacaatttctgaagcttagtgtaattgagtggtggttgttattcaataaaattattcccaaaagtgtttctcctaagagtgcagttcccatgagtcacttcctgaacccattgaccaaaggtggacagagacaatcctgtagaccttgacattcagaaagatgtgagctgcttactgatcatatatgcatacgtttctttacagcagaggaaaccattgtccacaaaactgatgttcttttggggttttatgtacagacttgtccaatcatgtgtgtggttcctgcgagttgctgatgactccgcattgaagctctctgagttctttgattttaagttgggtttatggaattttttcaaatgttggaaggtgtgtggttcttcctgccctccctccccttttggaaatatgaaagcaaatgtttagaagaattccttttgaaaagctgtgtcgtgttccctgtgaaactgagcaggtgtgtgttggcgcgctaagtgccacatgcttgtgtgtagaggaggaggtggccctgccggctccgcgctgctgtgcctgtgatccctacctgctccccgctcctgttgccagcagcactcactgcactcctttgtcatatactctgcatcactgtcatactcacaacttcgtgaataaagttgtgtgctttattcgtagaaaaaaaaaaaa

SEQ ID NO: 2587 - protein, 718 aa, Homo sapiens
MLMTLEMTELTDPHHTMGDYKVAHPQDPHHPSEKPVIHCHKCGEPCKGEVLRVQTKHFHIKCFTCKVCGCDLAQGGFFIKNGEYLCTLDYQRMYGTRCHGCGEFVEGEVVTALGKTYHPNCFACTICKRPFPPGDRVTFNGRDCLCQLCAQPMSSSPKETTFSSNCAGCGRDIKNGQALLALDKQWHLGCFKCKSCGKVLTGEYISKDGAPYCEKDYQGLFGVKCEACHQFITGKVLEAGDKHYHPSCARCSRCNQMFTEGEEMYLQGSTVWHPDCKQSTKTEEKLRPTRTSSESIYSRPGSSIPGSPGHTIYAKVDNEILDYKDLAAIPKVKAIYDIERPDLITYEPFYTSGYDDKQERQSLGESPRTLSPTPSAEGYQDVRDRMIHRSTSQGSINSPVYSRHSYTPTTSRSPQHFHRPGNEPSSGRNSPLPYRPDSRPLTPTYAQAPKHFHVPDQGINIYRKPPIYKQHAALAAQSKSSEDIIKFSKFPAAQAPDPSETPKIETDHWPGPPSFAVVGPDMKRRSSGREEDDEELLRRRQLQEEQLMKLNSGLGQLILKEEMEKESRERSSLLASRYDSPINSASHIPSSKTASLPGYGRNGLHRPVSTDFAQYNSYGDVSGGVRDYQTLPDGHMPAMRMDRGVSMPNMLEPKIFPYEMLMVTNRGRNKILREVDRTRLERHLAPEVFREIFGMSIQEFDRLPLWRRNDMKKKAKLF

SEQ ID NO: 2588 - DNA, 7704 bp, Homo sapiens
gtcattgagctgatgtgcttttgcaaggggtctctttagaagtggtaggggcagggtcgagagaagaaggggatgcagaatctgtacatgaggaaggagccagagtcactcaggaaactcctcattcttcctgcgctggctgtggcacacccaccggtggcacacccctccctcgggtccagttcagcccacagactcctgggaggagagccagggccccagcctctcctttgaggagtgttgcagcctttctgtgtgccagatgcctagtgaagaaaagctgaaaccctggagctttgtgcatgttaatgaccttggaaatgactgagctcacggaccctcatcacaccatgggagactacaaagtggcccaccctcaggaccctcaccacccatcagagaagcctgtcattcactgccataaatgtggggagccttgcaagggtgaagtgcttcgggtccagaccaaacatttccacatcaagtgtttcacctgcaaagtgtgtggctgtgacctggcacaagggggcttcttcataaagaacggagagtatctctgcaccctggactaccagcggatgtacgggacacgctgccatggctgtggggagttcgtggagggcgaagtggtgactgctctgggcaagacctaccatcccaattgctttgcttgtactatctgcaagcgcccgtttccacccggagaccgagtcacattcaatgggagagactgcctttgtcaactctgtgcacagccgatgtcgtccagtccgaaagaaaccaccttctccagcaattgtgccggctgcggaagagatatcaagaatgggcaggcgctgctggcgctggataagcagtggcacttggggtgctttaaatgcaagtcctgcgggaaggtcctcaccggggagtacatcagcaaggatggtgctccgtactgtgaaaaggactaccagggactctttggggtgaaatgtgaggcgtgtcaccagtttatcacagggaaagtcctggaggcaggtgacaaacattaccaccccagctgtgcacgatgcagcagatgcaaccagatgttcacagaaggagaggaaatgtatcttcaaggctccaccgtttggcatcccgactgtaagcaatctacgaagaccgaggaaaagctgcggctgccaaacattcggcgttcttcatccgatttcttttattccaaaagtctgattcgacgcacaggacggtctccgtctctgcagcctaccaggacatcctcggaaagtatttattctaggccaggctccagtattcctggctcaccaggtcatactatctatgcaaaagtagacaatgagatcctggattacaaggatttagcagccattccgaaggtcaaggcaatttatgacattgaacgtccagatcttattacctatgagcctttctacacttcgggctatgatgacaaacaggagagacagagccttggagagtctccgaggactttgtctcctactccatcagcagaagggtaccaggatgttcgggatcggatgatccatcggtccacgagccagggctccatcaactcccctgtgtacagccgccacagctacactccaaccacgtcccgctctccccagcatttccacagacctggcaatgagccgtccagcggccggaactcccctctcccttaccggccagacagccgccctctaactccaacttacgctcaggcccctaaacatttccatgttccagatcaaggaatcaacatttaccgaaagccacccatctacaaacagcatgctgccttggcagcccagagcaagtcctcagaagatatcatcaagttttccaagttcccagcagcccaggcaccagaccccagcgagacaccaaagattgagacggaccactggcctggtcccccctcatttgctgtcgtaggacctgacatgaaacgcagatctagtggcagagaggaagatgatgaggaacttctgagacgtcggcagcttcaagaagagcaattaatgaagcttaactcaggcctgggacagttgatcttgaaagaagagatggagaaagagagccgggaaaggtcatctctgttagccagtcgctacgattctcccatcaactcagcttcacatattccatcatctaaaactgcatctctccctggctatggaagaaatgggcttcaccggcctgtttctaccgacttcgctcagtataacagctatggggatgtcagcgggggagtgcgagattaccagacactcccagatggccacatgcctgcaatgagaatggaccgaggagtgtctatgcccaacatgttggaaccaaagatatttccatatgaaatgctcatggtgaccaacagagggcgaaacaaaatcctcagagaggtggacagaaccaggctggagcgccacttagcccctgaagtgtttcgggaaatctttggaatgtccatacaggagtttgacaggttacctctttggagacgcaacgacatgaagaaaaaagcaaaactcttctaagtcccactcgtgaatggcaattagagaaaggactgacagtggcggtgccccataggatgtcatattgaggcccaaacttgattggagaatttgcaaactaccgtcgctcagcaacaccaaaaagagaaagtctggttaaaacaccatgagtcaaatgtcgggccagccaacagtaacacttgccaagaagcatggcgtagaaatttctatgttccgaaacacagagtagtgtccacatgtgagcttttcacattaccttatgtatacaacaggagctgcgttgttttcttctttttcttttcctttatctgttgtccaacaacagtgctgactgtccggataagagctggcaagtgcccttaggatgccgcatgggaaaaatcggttatcataatttcaaagtataaatatatttattaagtagcgctgcggctaagaaggaagagtgaggggtctgtccatggggtggcagtgatttcacacccgcctttcttgaatggcttcgtgttactcagccgtgccctggcaggaatggaactccatcagggaacagggcagctctgtttgaatggggtgaaaaacagcaaaattaattcttagcaagctccttgttctctactgttcaccgggacctggctggcaaatgacttagctattagtatatttaaaaactgttcaaaagcaaaagagaaggaacaggaatgaaaggaaaccttcccttaactctttctgcttcccatagcaggtctggttcctgctccccgcctaggacaggagctgtctggagctccacctttgcaaagaaaggaaaaacacaaattgcccccagattggcccagtggcatgccattaggtgattttgcataggggccatatcattcatggccaaaaaaaaccaaaaagcaaaaaacaaaaacaagtcccatgtcctactgactctagttcttccagtcgttatcctctgctgtctctctggcatcctatgaatcagatcaagcccatgctgttgttggtttttaaggtttctttcaataataggctaaggaaagacatgtttttctcttttaaatctctgcaactccaaagtagactccttcgaacgtatttaatttggccttttcagctttcttcttgcccagctctgtcgaattcatgggtgtgtgtgcacatgttggtttcactcacccagagtaattttgtgagcatgcatgtgctttttaatttctgcttgaatgtttgtcctgctgtgttgcagcttctaaagacattgtcaccgagtgtgtgtgactcaaagatcaagagtgaggctaaactgcgaccccaacatcacttccttcatggaaaggtgttggcgctgatgtagctcatggaaggatcagactgggaaccacagaggaaggatgaggtgggatgtggaggtcagagcatctcacgagagtccctcaggctctgcaacactagattcgaatatgagcctagggtttccccaacacgtgcgtgcatatgaaaccacatcatgattcccgacgtgagttagatgagggagagtttgtgtaactccacacccaggagggtaagccactttattatcatgctttggggctgtgcttaagaatttaagctctgttttaaagccgaagaagaaaacatttgaatttaccttcatatgccactaagaacaaaagctctgaagttcttcctgctggcaccaaatattaggattacaagctgtctctctgacaccagtggtaaaaaagcaagtagaatagtttctgagtctgtgttgcagcctctgacacgtggctcaccgctgtcatttgggggatggaatgaacagtcactgttctatagcatcctcctgtgctcttacctaaggaatctaaattgtcctagccttccattgctatgcactgaatgaggactactctcgtgtgtgtgtgtgtgtgtgtgtgtgtgtgtgtgtgtgtgtgtgtgtgtgttggatctactaacatgtttagcaaatggctctgacagggtggccatgagcagatgagaccagctcttgcttggttggaagccacactgcagtttgcagtttagcctttggtgtctcagtggcttcttgcttattccatgctttttctatcccatcctctctctgtgccctcctgcaatggcagccttggcacaatgcctgggtgtcctcatccttgctttactctggaaagtgtggggatggagaggatggtgcatttccagtgcttccttacctgtcaataacaatggtggccacctgggtcccagcacttggctggtggagagatttttttcattatggagctaataaagggtccctacgttttacattgattaatgaattatcacccagacatgtgcagatgaaatgtcaatataagaaaaatcaaggtatttgggaaacatgggcataatcaggtagttttgctaaaattcctcttccttggtctacataaagaagacatgggtctgtcatagaatggggacattagactgaaaactgggacaacccccttccttattttatagagactaggagttaaggggcctgcctaagattgcagtgataaagaactgaaccctaaatcagctcccactaatgaaaccctgctttccttgtatcttttaaactcagttctgcatccaacttgagaagaaaaaaagcttctttccatatcaagtaccatatgagttcatttaaactgcaccttgcagaaatgcattgccagaaagcaccagtagcctcctatctgcaagcagagtagtgctctgctctggggaggggtcattggaaaccataatgcagagtgggccccctactccatttcccagcaaaaggctccagctggagggatgggttgtggggcaacctggttcctgctaactgccagattgaatgtgtgggctagaatgcctgcacatttagttaaactgggctcagcatgcttgtcctcaaaatgtccatcctggtcacagcacacaagatggctattggtctgcttttaccctaccctgtactatacatgaaaattccagttattaacacactcaaactggtggagcttgttcaccctaggaaggggattgtatatatggcaggcttccctggtgccgatgtaaagggctacatttgggaacatttgacttccttgggactcttaagtgcataatgatggcatgaagtaaaaggggcctcaatgatgataggaaaatcagttcttttaaaatttcttcaagaaaatccaggctatcacatagtctttctgtgtgacttattaggagataggaagagcattgggaaacttgcacagctagctatgcatctacattttggtttggggttagttatgaaatgttcttaatatgacgtgttcaataacttcacataaacttcctgttctccaaaacctcaaagagatagagttaatgagttgttgtttttttttaaatgggggtagttttctatctgtcatgggctctagcatctactccgctacccaattctgtcatctccaagctgagtttcctcttctgaggcagaggctggagcagttctttttcagttctcatcctctccatcccaatccagtatatcaatcaactctaactcggagacgtctagctggcaatgtttctaaaactttcactggatttctttagacattgaagcaaacatttttttctaagaattgcttctcagatgatgatatcaaatgtatatgcttttgcaagtttgaaaagttcaaattaaccacttttgactaggtaagtctttctaaaaaccatttaaagctaactgggtcttagcatcctcctgtgtatggaagagacaggtgaccgctccaggttgggtgctcacagaacccttttcctgactctcatggaagatggtggaaggaaaatagactgtctcatcaaccctcctgtgtcctctgaagcaatctcagtttttattaaccacctcttctgtgtttctggtagctatttaacctgtatttaatctgtacttcctatgccagcctcaattttatttgatttttacaattattctcttctaaccaatgaagtgtttgtcagtatgccccaaagcttgctcttttgtgctcccttttgaataactttctatccagaaaaagagattatttgggacttgagatttgcagtgataccaacttatagcaatgatgtactttaagggaactacccaactatgttgtgatagaagaaagagaaaccttcactttggcatttttttttaatcactgtttatttttctgtttgcggcccaggaagcagtgggaggtggtggcagatatgctttgcatatggattgttatgtttttatttgggcaagtttaatcatggaaaactcaaaaagaaggggggaaatggtcagtttaagccaaaagaaactttctaaacaatgtataggtacacagcaaaattaaacaaatccaacaatttctgaagcttagtgtaattgagtggtggttgttattcaataaaattattcccaaaagtgtttctcctaagagtgcagttcccatgagtcacttcctgaacccattgaccaaaggtggacagagacaatcctgtagaccttgacattcagaaagatgtgagctgcttactgatcatatatgcatacgtttctttacagcagaggaaaccattgtccacaaaactgatgttcttttggggttttatgtacagacttgtccaatcatgtgtgtggttcctgcgagttgctgatgactccgcattgaagctctctgagttctttgattttaagttgggtttatggaattttttcaaatgttggaaggtgtgtggttcttcctgccctccctccccttttggaaatatgaaagcaaatgtttagaagaattccttttgaaaagctgtgtcgtgttccctgtgaaactgagcaggtgtgtgttggcgcgctaagtgccacatgcttgtgtgtagaggaggaggtggccctgccggctccgcgctgctgtgcctgtgatccctacctgctccccgctcctgttgccagcagcactcactgcactcctttgtcatatactctgcatcactgtcatactcacaacttcgtgaataaagttgtgtgctttattcgtagaaaaaaaaaaaa

SEQ ID NO: 2589 - protein, 746 aa, Homo sapiens
MLMTLEMTELTDPHHTMGDYKVAHPQDPHHPSEKPVIHCHKCGEPCKGEVLRVQTKHFHIKCFTCKVCGCDLAQGGFFIKNGEYLCTLDYQRMYGTRCHGCGEFVEGEVVTALGKTYHPNCFACTICKRPFPPGDRVTFNGRDCLCQLCAQPMSSSPKETTFSSNCAGCGRDIKNGQALLALDKQWHLGCFKCKSCGKVLTGEYISKDGAPYCEKDYQGLFGVKCEACHQFITGKVLEAGDKHYHPSCARCSRCNQMFTEGEEMYLQGSTVWHPDCKQSTKTEEKLRLPNIRRSSSDFFYSKSLIRRTGRSPSLQPTRTSSESIYSRPGSSIPGSPGHTIYAKVDNEILDYKDLAAIPKVKAIYDIERPDLITYEPFYTSGYDDKQERQSLGESPRTLSPTPSAEGYQDVRDRMIHRSTSQGSINSPVYSRHSYTPTTSRSPQHFHRPGNEPSSGRNSPLPYRPDSRPLTPTYAQAPKHFHVPDQGINIYRKPPIYKQHAALAAQSKSSEDIIKFSKFPAAQAPDPSETPKIETDHWPGPPSFAVVGPDMKRRSSGREEDDEELLRRRQLQEEQLMKLNSGLGQLILKEEMEKESRERSSLLASRYDSPINSASHIPSSKTASLPGYGRNGLHRPVSTDFAQYNSYGDVSGGVRDYQTLPDGHMPAMRMDRGVSMPNMLEPKIFPYEMLMVTNRGRNKILREVDRTRLERHLAPEVFREIFGMSIQEFDRLPLWRRNDMKKKAKLF

SEQ ID NO: 2590 - DNA, 7597 bp, Homo sapiens
gagacagtaaggagccaggggaacagagagaattgtggggcagcaccgctccttgggtccccactccccatttctcattgcttggaaatccatgccaagatgcctgccttccttggtctaaagtgtctggggaaattgtgcagctctgagaaaagcaaagtcacctcatctgagagaaccagtgccaggggctcgaacagaaagagactgattgttgaggaccggagggtctctgggacctccttcaccgctcataggcgtgccactatcactcatttgctgtatctctgtcccaaggactactgcccacgtgggcgtgtatgtaacagcgttgatccttttgtggcccaccctcaggaccctcaccacccatcagagaagcctgtcattcactgccataaatgtggggagccttgcaagggtgaagtgcttcgggtccagaccaaacatttccacatcaagtgtttcacctgcaaagtgtgtggctgtgacctggcacaagggggcttcttcataaagaacggagagtatctctgcaccctggactaccagcggatgtacgggacacgctgccatggctgtggggagttcgtggagggcgaagtggtgactgctctgggcaagacctaccatcccaattgctttgcttgtactatctgcaagcgcccgtttccacccggagaccgagtcacattcaatgggagagactgcctttgtcaactctgtgcacagccgatgtcgtccagtccgaaagaaaccaccttctccagcaattgtgccggctgcggaagagatatcaagaatgggcaggcgctgctggcgctggataagcagtggcacttggggtgctttaaatgcaagtcctgcgggaaggtcctcaccggggagtacatcagcaaggatggtgctccgtactgtgaaaaggactaccagggactctttggggtgaaatgtgaggcgtgtcaccagtttatcacagggaaagtcctggaggcaggtgacaaacattaccaccccagctgtgcacgatgcagcagatgcaaccagatgttcacagaaggagaggaaatgtatcttcaaggctccaccgtttggcatcccgactgtaagcaatctacgaagaccgaggaaaagctgcggcctaccaggacatcctcggaaagtatttattctaggccaggctccagtattcctggctcaccaggtcatactatctatgcaaaagtagacaatgagatcctggattacaaggatttagcagccattccgaaggtcaaggcaatttatgacattgaacgtccagatcttattacctatgagcctttctacacttcgggctatgatgacaaacaggagagacagagccttggagagtctccgaggactttgtctcctactccatcagcagaagggtaccaggatgttcgggatcggatgatccatcggtccacgagccagggctccatcaactcccctgtgtacagccgccacagctacactccaaccacgtcccgctctccccagcatttccacagacctggcaatgagccgtccagcggccggaactcccctctcccttaccggccagacagccgccctctaactccaacttacgctcaggcccctaaacatttccatgttccagatcaaggaatcaacatttaccgaaagccacccatctacaaacagcatgctgccttggcagcccagagcaagtcctcagaagatatcatcaagttttccaagttcccagcagcccaggcaccagaccccagcgagacaccaaagattgagacggaccactggcctggtcccccctcatttgctgtcgtaggacctgacatgaaacgcagatctagtggcagagaggaagatgatgaggaacttctgagacgtcggcagcttcaagaagagcaattaatgaagcttaactcaggcctgggacagttgatcttgaaagaagagatggagaaagagagccgggaaaggtcatctctgttagccagtcgctacgattctcccatcaactcagcttcacatattccatcatctaaaactgcatctctccctggctatggaagaaatgggcttcaccggcctgtttctaccgacttcgctcagtataacagctatggggatgtcagcgggggagtgcgagattaccagacactcccagatggccacatgcctgcaatgagaatggaccgaggagtgtctatgcccaacatgttggaaccaaagatatttccatatgaaatgctcatggtgaccaacagagggcgaaacaaaatcctcagagaggtggacagaaccaggctggagcgccacttagcccctgaagtgtttcgggaaatctttggaatgtccatacaggagtttgacaggttacctctttggagacgcaacgacatgaagaaaaaagcaaaactcttctaagtcccactcgtgaatggcaattagagaaaggactgacagtggcggtgccccataggatgtcatattgaggcccaaacttgattggagaatttgcaaactaccgtcgctcagcaacaccaaaaagagaaagtctggttaaaacaccatgagtcaaatgtcgggccagccaacagtaacacttgccaagaagcatggcgtagaaatttctatgttccgaaacacagagtagtgtccacatgtgagcttttcacattaccttatgtatacaacaggagctgcgttgttttcttctttttcttttcctttatctgttgtccaacaacagtgctgactgtccggataagagctggcaagtgcccttaggatgccgcatgggaaaaatcggttatcataatttcaaagtataaatatatttattaagtagcgctgcggctaagaaggaagagtgaggggtctgtccatggggtggcagtgatttcacacccgcctttcttgaatggcttcgtgttactcagccgtgccctggcaggaatggaactccatcagggaacagggcagctctgtttgaatggggtgaaaaacagcaaaattaattcttagcaagctccttgttctctactgttcaccgggacctggctggcaaatgacttagctattagtatatttaaaaactgttcaaaagcaaaagagaaggaacaggaatgaaaggaaaccttcccttaactctttctgcttcccatagcaggtctggttcctgctccccgcctaggacaggagctgtctggagctccacctttgcaaagaaaggaaaaacacaaattgcccccagattggcccagtggcatgccattaggtgattttgcataggggccatatcattcatggccaaaaaaaaccaaaaagcaaaaaacaaaaacaagtcccatgtcctactgactctagttcttccagtcgttatcctctgctgtctctctggcatcctatgaatcagatcaagcccatgctgttgttggtttttaaggtttctttcaataataggctaaggaaagacatgtttttctcttttaaatctctgcaactccaaagtagactccttcgaacgtatttaatttggccttttcagctttcttcttgcccagctctgtcgaattcatgggtgtgtgtgcacatgttggtttcactcacccagagtaattttgtgagcatgcatgtgctttttaatttctgcttgaatgtttgtcctgctgtgttgcagcttctaaagacattgtcaccgagtgtgtgtgactcaaagatcaagagtgaggctaaactgcgaccccaacatcacttccttcatggaaaggtgttggcgctgatgtagctcatggaaggatcagactgggaaccacagaggaaggatgaggtgggatgtggaggtcagagcatctcacgagagtccctcaggctctgcaacactagattcgaatatgagcctagggtttccccaacacgtgcgtgcatatgaaaccacatcatgattcccgacgtgagttagatgagggagagtttgtgtaactccacacccaggagggtaagccactttattatcatgctttggggctgtgcttaagaatttaagctctgttttaaagccgaagaagaaaacatttgaatttaccttcatatgccactaagaacaaaagctctgaagttcttcctgctggcaccaaatattaggattacaagctgtctctctgacaccagtggtaaaaaagcaagtagaatagtttctgagtctgtgttgcagcctctgacacgtggctcaccgctgtcatttgggggatggaatgaacagtcactgttctatagcatcctcctgtgctcttacctaaggaatctaaattgtcctagccttccattgctatgcactgaatgaggactactctcgtgtgtgtgtgtgtgtgtgtgtgtgtgtgtgtgtgtgtgtgtgtgtgtgttggatctactaacatgtttagcaaatggctctgacagggtggccatgagcagatgagaccagctcttgcttggttggaagccacactgcagtttgcagtttagcctttggtgtctcagtggcttcttgcttattccatgctttttctatcccatcctctctctgtgccctcctgcaatggcagccttggcacaatgcctgggtgtcctcatccttgctttactctggaaagtgtggggatggagaggatggtgcatttccagtgcttccttacctgtcaataacaatggtggccacctgggtcccagcacttggctggtggagagatttttttcattatggagctaataaagggtccctacgttttacattgattaatgaattatcacccagacatgtgcagatgaaatgtcaatataagaaaaatcaaggtatttgggaaacatgggcataatcaggtagttttgctaaaattcctcttccttggtctacataaagaagacatgggtctgtcatagaatggggacattagactgaaaactgggacaacccccttccttattttatagagactaggagttaaggggcctgcctaagattgcagtgataaagaactgaaccctaaatcagctcccactaatgaaaccctgctttccttgtatcttttaaactcagttctgcatccaacttgagaagaaaaaaagcttctttccatatcaagtaccatatgagttcatttaaactgcaccttgcagaaatgcattgccagaaagcaccagtagcctcctatctgcaagcagagtagtgctctgctctggggaggggtcattggaaaccataatgcagagtgggccccctactccatttcccagcaaaaggctccagctggagggatgggttgtggggcaacctggttcctgctaactgccagattgaatgtgtgggctagaatgcctgcacatttagttaaactgggctcagcatgcttgtcctcaaaatgtccatcctggtcacagcacacaagatggctattggtctgcttttaccctaccctgtactatacatgaaaattccagttattaacacactcaaactggtggagcttgttcaccctaggaaggggattgtatatatggcaggcttccctggtgccgatgtaaagggctacatttgggaacatttgacttccttgggactcttaagtgcataatgatggcatgaagtaaaaggggcctcaatgatgataggaaaatcagttcttttaaaatttcttcaagaaaatccaggctatcacatagtctttctgtgtgacttattaggagataggaagagcattgggaaacttgcacagctagctatgcatctacattttggtttggggttagttatgaaatgttcttaatatgacgtgttcaataacttcacataaacttcctgttctccaaaacctcaaagagatagagttaatgagttgttgtttttttttaaatgggggtagttttctatctgtcatgggctctagcatctactccgctacccaattctgtcatctccaagctgagtttcctcttctgaggcagaggctggagcagttctttttcagttctcatcctctccatcccaatccagtatatcaatcaactctaactcggagacgtctagctggcaatgtttctaaaactttcactggatttctttagacattgaagcaaacatttttttctaagaattgcttctcagatgatgatatcaaatgtatatgcttttgcaagtttgaaaagttcaaattaaccacttttgactaggtaagtctttctaaaaaccatttaaagctaactgggtcttagcatcctcctgtgtatggaagagacaggtgaccgctccaggttgggtgctcacagaacccttttcctgactctcatggaagatggtggaaggaaaatagactgtctcatcaaccctcctgtgtcctctgaagcaatctcagtttttattaaccacctcttctgtgtttctggtagctatttaacctgtatttaatctgtacttcctatgccagcctcaattttatttgatttttacaattattctcttctaaccaatgaagtgtttgtcagtatgccccaaagcttgctcttttgtgctcccttttgaataactttctatccagaaaaagagattatttgggacttgagatttgcagtgataccaacttatagcaatgatgtactttaagggaactacccaactatgttgtgatagaagaaagagaaaccttcactttggcatttttttttaatcactgtttatttttctgtttgcggcccaggaagcagtgggaggtggtggcagatatgctttgcatatggattgttatgtttttatttgggcaagtttaatcatggaaaactcaaaaagaaggggggaaatggtcagtttaagccaaaagaaactttctaaacaatgtataggtacacagcaaaattaaacaaatccaacaatttctgaagcttagtgtaattgagtggtggttgttattcaataaaattattcccaaaagtgtttctcctaagagtgcagttcccatgagtcacttcctgaacccattgaccaaaggtggacagagacaatcctgtagaccttgacattcagaaagatgtgagctgcttactgatcatatatgcatacgtttctttacagcagaggaaaccattgtccacaaaactgatgttcttttggggttttatgtacagacttgtccaatcatgtgtgtggttcctgcgagttgctgatgactccgcattgaagctctctgagttctttgattttaagttgggtttatggaattttttcaaatgttggaaggtgtgtggttcttcctgccctccctccccttttggaaatatgaaagcaaatgtttagaagaattccttttgaaaagctgtgtcgtgttccctgtgaaactgagcaggtgtgtgttggcgcgctaagtgccacatgcttgtgtgtagaggaggaggtggccctgccggctccgcgctgctgtgcctgtgatccctacctgctccccgctcctgttgccagcagcactcactgcactcctttgtcatatactctgcatcactgtcatactcacaacttcgtgaataaagttgtgtgctttattcgtagaaaaaaaaaaaa

SEQ ID NO: 2591 - protein, 778 aa, Homo sapiens
MPAFLGLKCLGKLCSSEKSKVTSSERTSARGSNRKRLIVEDRRVSGTSFTAHRRATITHLLYLCPKDYCPRGRVCNSVDPFVAHPQDPHHPSEKPVIHCHKCGEPCKGEVLRVQTKHFHIKCFTCKVCGCDLAQGGFFIKNGEYLCTLDYQRMYGTRCHGCGEFVEGEVVTALGKTYHPNCFACTICKRPFPPGDRVTFNGRDCLCQLCAQPMSSSPKETTFSSNCAGCGRDIKNGQALLALDKQWHLGCFKCKSCGKVLTGEYISKDGAPYCEKDYQGLFGVKCEACHQFITGKVLEAGDKHYHPSCARCSRCNQMFTEGEEMYLQGSTVWHPDCKQSTKTEEKLRPTRTSSESIYSRPGSSIPGSPGHTIYAKVDNEILDYKDLAAIPKVKAIYDIERPDLITYEPFYTSGYDDKQERQSLGESPRTLSPTPSAEGYQDVRDRMIHRSTSQGSINSPVYSRHSYTPTTSRSPQHFHRPGNEPSSGRNSPLPYRPDSRPLTPTYAQAPKHFHVPDQGINIYRKPPIYKQHAALAAQSKSSEDIIKFSKFPAAQAPDPSETPKIETDHWPGPPSFAVVGPDMKRRSSGREEDDEELLRRRQLQEEQLMKLNSGLGQLILKEEMEKESRERSSLLASRYDSPINSASHIPSSKTASLPGYGRNGLHRPVSTDFAQYNSYGDVSGGVRDYQTLPDGHMPAMRMDRGVSMPNMLEPKIFPYEMLMVTNRGRNKILREVDRTRLERHLAPEVFREIFGMSIQEFDRLPLWRRNDMKKKAKLF

SEQ ID NO: 2592 - DNA, 6850 bp, Homo sapiens
gaggagaggaggcgtgagagagcgtgcctgcccgccgcacacggggctggtttccggagtgcgtctctagagggatgcacgttgccttagccgagcttcggagagaagcctgatatgtaacccaggcaggtgggagcctcagtctgtcgggctgaggtctggcatctacaaagcctcttggccgtgttctgaacttgaagcctggaggagttctctgctcagcacagccaaggaacagaattagaagaaaaggaaccctggcctgaggcaggtgacaaacattaccaccccagctgtgcacgatgcagcagatgcaaccagatgttcacagaaggagaggaaatgtatcttcaaggctccaccgtttggcatcccgactgtaagcaatctacgaagaccgaggaaaagctgcggctgccaaacattcggcgttcttcatccgatttcttttattccaaaagtctgattcgacgcacaggacggtctccgtctctgcagcctaccaggacatcctcggaaagtatttattctaggccaggctccagtattcctggctcaccaggtcatactatctatgcaaaagtagacaatgagatcctggattacaaggatttagcagccattccgaaggtcaaggcaatttatgacattgaacgtccagatcttattacctatgagcctttctacacttcgggctatgatgacaaacaggagagacagagccttggagagtctccgaggactttgtctcctactccatcagcagaagggtaccaggatgttcgggatcggatgatccatcggtccacgagccagggctccatcaactcccctgtgtacagccgccacagctacactccaaccacgtcccgctctccccagcatttccacagacctgatcaaggaatcaacatttaccgaaagccacccatctacaaacagcatgctgccttggcagcccagagcaagtcctcagaagatatcatcaagttttccaagttcccagcagcccaggcaccagaccccagcgagacaccaaagattgagacggaccactggcctggtcccccctcatttgctgtcgtaggacctgacatgaaacgcagatctagtggcagagaggaagatgatgaggaacttctgagacgtcggcagcttcaagaagagcaattaatgaagcttaactcaggcctgggacagttgatcttgaaagaagagatggagaaagagagccgggaaaggtcatctctgttagccagtcgctacgattctcccatcaactcagcttcacatattccatcatctaaaactgcatctctccctggctatggaagaaatgggcttcaccggcctgtttctaccgacttcgctcagtataacagctatggggatgtcagcgggggagtgcgagattaccagacactcccagatggccacatgcctgcaatgagaatggaccgaggagtgtctatgcccaacatgttggaaccaaagatatttccatatgaaatgctcatggtgaccaacagagggcgaaacaaaatcctcagagaggtggacagaaccaggctggagcgccacttagcccctgaagtgtttcgggaaatctttggaatgtccatacaggagtttgacaggttacctctttggagacgcaacgacatgaagaaaaaagcaaaactcttctaagtcccactcgtgaatggcaattagagaaaggactgacagtggcggtgccccataggatgtcatattgaggcccaaacttgattggagaatttgcaaactaccgtcgctcagcaacaccaaaaagagaaagtctggttaaaacaccatgagtcaaatgtcgggccagccaacagtaacacttgccaagaagcatggcgtagaaatttctatgttccgaaacacagagtagtgtccacatgtgagcttttcacattaccttatgtatacaacaggagctgcgttgttttcttctttttcttttcctttatctgttgtccaacaacagtgctgactgtccggataagagctggcaagtgcccttaggatgccgcatgggaaaaatcggttatcataatttcaaagtataaatatatttattaagtagcgctgcggctaagaaggaagagtgaggggtctgtccatggggtggcagtgatttcacacccgcctttcttgaatggcttcgtgttactcagccgtgccctggcaggaatggaactccatcagggaacagggcagctctgtttgaatggggtgaaaaacagcaaaattaattcttagcaagctccttgttctctactgttcaccgggacctggctggcaaatgacttagctattagtatatttaaaaactgttcaaaagcaaaagagaaggaacaggaatgaaaggaaaccttcccttaactctttctgcttcccatagcaggtctggttcctgctccccgcctaggacaggagctgtctggagctccacctttgcaaagaaaggaaaaacacaaattgcccccagattggcccagtggcatgccattaggtgattttgcataggggccatatcattcatggccaaaaaaaaccaaaaagcaaaaaacaaaaacaagtcccatgtcctactgactctagttcttccagtcgttatcctctgctgtctctctggcatcctatgaatcagatcaagcccatgctgttgttggtttttaaggtttctttcaataataggctaaggaaagacatgtttttctcttttaaatctctgcaactccaaagtagactccttcgaacgtatttaatttggccttttcagctttcttcttgcccagctctgtcgaattcatgggtgtgtgtgcacatgttggtttcactcacccagagtaattttgtgagcatgcatgtgctttttaatttctgcttgaatgtttgtcctgctgtgttgcagcttctaaagacattgtcaccgagtgtgtgtgactcaaagatcaagagtgaggctaaactgcgaccccaacatcacttccttcatggaaaggtgttggcgctgatgtagctcatggaaggatcagactgggaaccacagaggaaggatgaggtgggatgtggaggtcagagcatctcacgagagtccctcaggctctgcaacactagattcgaatatgagcctagggtttccccaacacgtgcgtgcatatgaaaccacatcatgattcccgacgtgagttagatgagggagagtttgtgtaactccacacccaggagggtaagccactttattatcatgctttggggctgtgcttaagaatttaagctctgttttaaagccgaagaagaaaacatttgaatttaccttcatatgccactaagaacaaaagctctgaagttcttcctgctggcaccaaatattaggattacaagctgtctctctgacaccagtggtaaaaaagcaagtagaatagtttctgagtctgtgttgcagcctctgacacgtggctcaccgctgtcatttgggggatggaatgaacagtcactgttctatagcatcctcctgtgctcttacctaaggaatctaaattgtcctagccttccattgctatgcactgaatgaggactactctcgtgtgtgtgtgtgtgtgtgtgtgtgtgtgtgtgtgtgtgtgtgtgtgtgttggatctactaacatgtttagcaaatggctctgacagggtggccatgagcagatgagaccagctcttgcttggttggaagccacactgcagtttgcagtttagcctttggtgtctcagtggcttcttgcttattccatgctttttctatcccatcctctctctgtgccctcctgcaatggcagccttggcacaatgcctgggtgtcctcatccttgctttactctggaaagtgtggggatggagaggatggtgcatttccagtgcttccttacctgtcaataacaatggtggccacctgggtcccagcacttggctggtggagagatttttttcattatggagctaataaagggtccctacgttttacattgattaatgaattatcacccagacatgtgcagatgaaatgtcaatataagaaaaatcaaggtatttgggaaacatgggcataatcaggtagttttgctaaaattcctcttccttggtctacataaagaagacatgggtctgtcatagaatggggacattagactgaaaactgggacaacccccttccttattttatagagactaggagttaaggggcctgcctaagattgcagtgataaagaactgaaccctaaatcagctcccactaatgaaaccctgctttccttgtatcttttaaactcagttctgcatccaacttgagaagaaaaaaagcttctttccatatcaagtaccatatgagttcatttaaactgcaccttgcagaaatgcattgccagaaagcaccagtagcctcctatctgcaagcagagtagtgctctgctctggggaggggtcattggaaaccataatgcagagtgggccccctactccatttcccagcaaaaggctccagctggagggatgggttgtggggcaacctggttcctgctaactgccagattgaatgtgtgggctagaatgcctgcacatttagttaaactgggctcagcatgcttgtcctcaaaatgtccatcctggtcacagcacacaagatggctattggtctgcttttaccctaccctgtactatacatgaaaattccagttattaacacactcaaactggtggagcttgttcaccctaggaaggggattgtatatatggcaggcttccctggtgccgatgtaaagggctacatttgggaacatttgacttccttgggactcttaagtgcataatgatggcatgaagtaaaaggggcctcaatgatgataggaaaatcagttcttttaaaatttcttcaagaaaatccaggctatcacatagtctttctgtgtgacttattaggagataggaagagcattgggaaacttgcacagctagctatgcatctacattttggtttggggttagttatgaaatgttcttaatatgacgtgttcaataacttcacataaacttcctgttctccaaaacctcaaagagatagagttaatgagttgttgtttttttttaaatgggggtagttttctatctgtcatgggctctagcatctactccgctacccaattctgtcatctccaagctgagtttcctcttctgaggcagaggctggagcagttctttttcagttctcatcctctccatcccaatccagtatatcaatcaactctaactcggagacgtctagctggcaatgtttctaaaactttcactggatttctttagacattgaagcaaacatttttttctaagaattgcttctcagatgatgatatcaaatgtatatgcttttgcaagtttgaaaagttcaaattaaccacttttgactaggtaagtctttctaaaaaccatttaaagctaactgggtcttagcatcctcctgtgtatggaagagacaggtgaccgctccaggttgggtgctcacagaacccttttcctgactctcatggaagatggtggaaggaaaatagactgtctcatcaaccctcctgtgtcctctgaagcaatctcagtttttattaaccacctcttctgtgtttctggtagctatttaacctgtatttaatctgtacttcctatgccagcctcaattttatttgatttttacaattattctcttctaaccaatgaagtgtttgtcagtatgccccaaagcttgctcttttgtgctcccttttgaataactttctatccagaaaaagagattatttgggacttgagatttgcagtgataccaacttatagcaatgatgtactttaagggaactacccaactatgttgtgatagaagaaagagaaaccttcactttggcatttttttttaatcactgtttatttttctgtttgcggcccaggaagcagtgggaggtggtggcagatatgctttgcatatggattgttatgtttttatttgggcaagtttaatcatggaaaactcaaaaagaaggggggaaatggtcagtttaagccaaaagaaactttctaaacaatgtataggtacacagcaaaattaaacaaatccaacaatttctgaagcttagtgtaattgagtggtggttgttattcaataaaattattcccaaaagtgtttctcctaagagtgcagttcccatgagtcacttcctgaacccattgaccaaaggtggacagagacaatcctgtagaccttgacattcagaaagatgtgagctgcttactgatcatatatgcatacgtttctttacagcagaggaaaccattgtccacaaaactgatgttcttttggggttttatgtacagacttgtccaatcatgtgtgtggttcctgcgagttgctgatgactccgcattgaagctctctgagttctttgattttaagttgggtttatggaattttttcaaatgttggaaggtgtgtggttcttcctgccctccctccccttttggaaatatgaaagcaaatgtttagaagaattccttttgaaaagctgtgtcgtgttccctgtgaaactgagcaggtgtgtgttggcgcgctaagtgccacatgcttgtgtgtagaggaggaggtggccctgccggctccgcgctgctgtgcctgtgatccctacctgctccccgctcctgttgccagcagcactcactgcactcctttgtcatatactctgcatcactgtcatactcacaacttcgtgaataaagttgtgtgctttattcgtagaaaaaaaaaaaa

SEQ ID NO: 2593 - protein, 455 aa, Homo sapiens
MFTEGEEMYLQGSTVWHPDCKQSTKTEEKLRLPNIRRSSSDFFYSKSLIRRTGRSPSLQPTRTSSESIYSRPGSSIPGSPGHTIYAKVDNEILDYKDLAAIPKVKAIYDIERPDLITYEPFYTSGYDDKQERQSLGESPRTLSPTPSAEGYQDVRDRMIHRSTSQGSINSPVYSRHSYTPTTSRSPQHFHRPDQGINIYRKPPIYKQHAALAAQSKSSEDIIKFSKFPAAQAPDPSETPKIETDHWPGPPSFAVVGPDMKRRSSGREEDDEELLRRRQLQEEQLMKLNSGLGQLILKEEMEKESRERSSLLASRYDSPINSASHIPSSKTASLPGYGRNGLHRPVSTDFAQYNSYGDVSGGVRDYQTLPDGHMPAMRMDRGVSMPNMLEPKIFPYEMLMVTNRGRNKILREVDRTRLERHLAPEVFREIFGMSIQEFDRLPLWRRNDMKKKAKLF

SEQ ID NO: 2594 - DNA, 2374 bp, Homo sapiens
gggtggggggaataacatgttcttttaaacgcagagtttaaacattgagttgcatcattgtgaggaaaaccacttagtatttttagtgaggtgactttacaagtaaagatcttcaagaagatttttatgtgatttaaaaaatcagcttagatgcttggaatttggattgttgcattcttgttctttggcacatcaagaggaaaagaagtttgctatgaaaggttagggtgtttcaaagatggtttaccatggaccaggactttctcaacagagttggtaggtttaccctggtctccagagaagataaacactcgtttcctgctctacactatacacaatcccaatgcctatcaggagatcagtgcggttaattcttcaactatccaagcctcatattttggaacagacaagatcacccgtatcaacatagctggatggaaaacagatggcaaatggcagagagacatgtgcaatgtgttgctacagctggaagatataaattgcattaatttagattggatcaacggttcacgggaatacatccatgctgtaaacaatctccgtgttgttggtgctgaggtggcttattttattgatgttctcatgaaaaaatttgaatattccccttctaaagtgcacttgattggccacagcttgggagcacacctggctggggaagctgggtcaaggataccaggccttggaagaataactgggttggacccagctgggccatttttccacaacactccaaaggaagtcaggctagacccctcggatgccaactttgttgacgttattcatacaaatgcagctcgcatcctctttgagcttggtgttggaaccattgatgcttgtggtcatcttgacttttacccaaatggagggaagcacatgccaggatgtgaagacttaattacacctttactgaaatttaacttcaatgcttacaaaaaagaaatggcttccttctttgactgtaaccatgcccgaagttatcaattttatgctgaaagcattcttaatcctgatgcatttattgcttatccttgtagatcctacacatcttttaaagcaggaaattgcttcttttgttccaaagaaggttgcccaacaatgggtcattttgctgatagatttcacttcaaaaatatgaagactaatggatcacattattttttaaacacagggtccctttccccatttgcccgttggaggcacaaattgtctgttaaactcagtggaagcgaagtcactcaaggaactgtctttcttcgtgtaggcggggcaattgggaaaactggggagtttgccattgtcagtggaaaacttgagccaggcatgacttacacaaaattaatcgatgcagatgttaacgttggaaacattacaagtgttcagttcatctggaaaaaacatttgtttgaagattctcagaataagttgggagcagaaatggtgataaatacatctgggaaatatggatataaatctacctactgtagccaagacattatgggacctaatattctccagaacctgaaaccatgctaatctcagatacagtcttgatggatttctttagtaggagcaatgaagaaaagtgtctccttccacctggcatccagaccaaatttgacccttgtaaatgacttagtcatttacaggggtcttactcagagtcaagtacgggtttgctttttttctgtgtagaatgttcatctaactgcaccttaaaaacacactgaaccctgggacaaaagataattactatgatctgtaggaatctggatatcattgacaaaatagagctgttttggaattttcctgaataagaggaggtgatgcaaatgtatgttgagtgtataaactcactggacaaaagtaagcctctggcttgctgagtttttgaagtatattttcaggtataataatcattgttctaaaattatataaaactatttgttatgttgttaaatcttgctgagacaaattatgactatagtgcatgatatatagtagattataaccttgtgggttgatgtgtctatctagtaataataaaaactaatgagatggcactagtatttccaaggtgttccttggtgttcagggtgtgcacaagagagattttggagcttatctgttatgtgttcatcagttagcaatgggacctgaagttcaacaacccagggtatagcccccttcctccaaagtccctgccacaggagaattactcctctctctgggtcttgaatgctctatggtgaatttgtatttagcctcaaggcagcatttcatttgtaaagcacttgggtaaccctttgttcttgcaataacaatattataatatttaaaaaaaaaaaaaaaaaaa

SEQ ID NO: 2595 - protein, 467 aa, Homo sapiens
MLGIWIVAFLFFGTSRGKEVCYERLGCFKDGLPWTRTFSTELVGLPWSPEKINTRFLLYTIHNPNAYQEISAVNSSTIQASYFGTDKITRINIAGWKTDGKWQRDMCNVLLQLEDINCINLDWINGSREYIHAVNNLRVVGAEVAYFIDVLMKKFEYSPSKVHLIGHSLGAHLAGEAGSRIPGLGRITGLDPAGPFFHNTPKEVRLDPSDANFVDVIHTNAARILFELGVGTIDACGHLDFYPNGGKHMPGCEDLITPLLKFNFNAYKKEMASFFDCNHARSYQFYAESILNPDAFIAYPCRSYTSFKAGNCFFCSKEGCPTMGHFADRFHFKNMKTNGSHYFLNTGSLSPFARWRHKLSVKLSGSEVTQGTVFLRVGGAIGKTGEFAIVSGKLEPGMTYTKLIDADVNVGNITSVQFIWKKHLFEDSQNKLGAEMVINTSGKYGYKSTYCSQDIMGPNILQNLKPC

SEQ ID NO: 2596 - DNA, 1502 bp, Homo sapiens
tgttgctatctggttgcgtgtggaacctgacggaactgccacgatgctgccactttggactctttcactgctgctgggagcagtagcaggaaaagaagtttgctacgaaagactcggctgcttcagtgatgactccccatggtcaggaattacggaaagacccctccatatattgccttggtctccaaaagatgtcaacacccgcttcctcctatatactaatgagaacccaaacaactttcaagaagttgccgcagattcatcaagcatcagtggctccaatttcaaaacaaatagaaaaactcgctttattattcatggattcatagacaagggagaagaaaactggctggccaatgtgtgcaagaatctgttcaaggtggaaagtgtgaactgtatctgtgtggactggaaaggtggctcccgaactggatacacacaagcctcgcagaacatcaggatcgtgggagcagaagtggcatattttgttgaatttcttcagtcggcgttcggttactcaccttccaacgtgcatgtcattggccacagcctgggtgcccacgctgctggggaggctggaaggagaaccaatgggaccattggacgcatcacagggttggacccagcagaaccttgctttcagggcacacctgaattagtccgattggaccccagcgatgccaaatttgtggatgtaattcacacggatggtgcccccatagtccccaatttggggtttggaatgagccaagtcgtgggccacctagatttctttccaaatggaggagtggaaatgcctggatgtaaaaagaacattctctctcagattgtggacatagacggaatctgggaagggactcgagactttgcggcctgtaatcacttaagaagctacaaatattacactgatagcatcgtcaaccctgatggctttgctggattcccctgtgcctcttacaacgtcttcactgcaaacaagtgtttcccttgtccaagtggaggctgcccacagatgggtcactatgctgatagatatcctgggaaaacaaatgatgtgggccagaaattttatctagacactggtgatgccagtaattttgcacgttggaggtataaggtatctgtcacactgtctggaaaaaaggttacaggacacatactagtttctttgttcggaaataaaggaaactctaagcagtatgaaattttcaagggcactctcaaaccagatagtactcattccaatgaatttgactcagatgtggatgttggggacttgcagatggttaaatttatttggtataacaatgtgatcaacccaactttacctagagtgggagcatccaagattatagtggagacaaatgttggaaaacagttcaacttctgtagtccagaaaccgtcagggaggaagttctgctcaccctcacaccgtgttaggagactactgttatttgaccaatgaattgacttctaataaaatctagtggtgatgcaaaaa

SEQ ID NO: 2597 - protein, 465 aa, Homo sapiens
MLPLWTLSLLLGAVAGKEVCYERLGCFSDDSPWSGITERPLHILPWSPKDVNTRFLLYTNENPNNFQEVAADSSSISGSNFKTNRKTRFIIHGFIDKGEENWLANVCKNLFKVESVNCICVDWKGGSRTGYTQASQNIRIVGAEVAYFVEFLQSAFGYSPSNVHVIGHSLGAHAAGEAGRRTNGTIGRITGLDPAEPCFQGTPELVRLDPSDAKFVDVIHTDGAPIVPNLGFGMSQVVGHLDFFPNGGVEMPGCKKNILSQIVDIDGIWEGTRDFAACNHLRSYKYYTDSIVNPDGFAGFPCASYNVFTANKCFPCPSGGCPQMGHYADRYPGKTNDVGQKFYLDTGDASNFARWRYKVSVTLSGKKVTGHILVSLFGNKGNSKQYEIFKGTLKPDSTHSNEFDSDVDVGDLQMVKFIWYNNVINPTLPRVGASKIIVETNVGKQFNFCSPETVREEVLLTLTPC

SEQ ID NO: 2598 - DNA, 1481 bp, Homo sapiens
ctctggaacattagacaggatgctgatcttctggacaatcacacttttcctgctgggagcagccaaaggaaaagaagtttgctatgaggacctcgggtgcttttctgacactgagccctggggcgggacagcaatcaggcccctgaaaattctcccctggagccctgagaagatcggcacccgcttcctgctgtacaccaatgaaaacccaaacaactttcaaattctcctcctctctgatccatcaacaattgaggcatcaaattttcaaatggacagaaagacccggttcatcatccatggcttcatagacaaaggagatgagagctgggtgacagacatgtgcaagaaactgttcgaggtggaggaggtgaactgcatctgcgtggactggaagaagggctcccaagccacctacacacaggctgccaacaacgtgcgagtggtgggcgcccaggtggcccagatgctcgacatcctcttgacagagtatagctaccccccttccaaagttcacctcattggccacagcctgggagcccacgtggctggagaggcaggaagcaagactccaggcctgagcaggattacagggttggatcctgtagaagcaagtttcgagagtactcctgaagaggtgcgacttgatccctctgatgctgactttgttgatgtgattcacacggatgcagctcccctgatcccattcttgggttttggaacgaaccaacagatgggtcatcttgacttcttccccaatggaggagagagcatgccgggatgcaagaagaatgccctgtctcagatcgtggatctagatggcatctgggcgggaacccgggactttgtggcttgcaatcacctaagaagctacaagtattacttggaaagcatcctcaatcccgatgggtttgctgcatatccctgcacttcctacaagtcctttgagtctgacaagtgcttcccgtgtccagatcaaggatgcccacagatgggtcactatgctgataaatttgctggcaggacaagtgaagagcagcagaaattcttcttgaacacaggagaggctagcaatttcgctcgctggagatatggggtttccatcacactgtctggaagaacagccactggtcagatcaaagttgctttgtttggaaataagggaaacactcaccagtacagcatcttcagggggattctcaaaccaggctcaacccattcctatgagtttgatgcaaagctggatgttggaacaattgagaaagtcaagtttctttggaataacaatgtgataaatccaaccctccccaaagtgggtgccaccaagatcactgtgcaaaagggagaagagaagacagtgtacaacttctgtagcgaagacacagtgcgggaagacacgctgctcaccctcacgccctgctaagctcccggggcgacgaggctgctgcgttcacactaataaaatccactggtgcatctgt

SEQ ID NO: 2599 - protein, 467 aa, Homo sapiens
MLIFWTITLFLLGAAKGKEVCYEDLGCFSDTEPWGGTAIRPLKILPWSPEKIGTRFLLYTNENPNNFQILLLSDPSTIEASNFQMDRKTRFIIHGFIDKGDESWVTDMCKKLFEVEEVNCICVDWKKGSQATYTQAANNVRVVGAQVAQMLDILLTEYSYPPSKVHLIGHSLGAHVAGEAGSKTPGLSRITGLDPVEASFESTPEEVRLDPSDADFVDVIHTDAAPLIPFLGFGTNQQMGHLDFFPNGGESMPGCKKNALSQIVDLDGIWAGTRDFVACNHLRSYKYYLESILNPDGFAAYPCTSYKSFESDKCFPCPDQGCPQMGHYADKFAGRTSEEQQKFFLNTGEASNFARWRYGVSITLSGRTATGQIKVALFGNKGNTHQYSIFRGILKPGSTHSYEFDAKLDVGTIEKVKFLWNNNVINPTLPKVGATKITVQKGEEKTVYNFCSEDTVREDTLLTLTPC

SEQ ID NO: 2600 - DNA, 1486 bp, Homo sapiens
gtgagtggaagctctggtgcagcatgatgctgcccccttggaccctcggccttctcctgctggccacagtcagaggaaaagaggtctgctacggacaacttggctgcttttctgatgaaaaaccatgggcaggaacccttcagcgacctgtaaaattacttccctggtcccccgaggacattgacacccgctttcttctgtacacaaatgaaaatccaaacaacttccaactaatcactggcacggaaccagacaccattgaggcttcaaacttccaactggaccgcaagacacgcttcatcatccatggcttcttagacaaggcggaggacagctggccatcggacatgtgcaagaaaatgtttgaagtggagaaggtgaactgcatctgtgtggactggaggcacgggtcccgggcaatgtacacccaagccgtgcaaaacattcgggttgttggggcggagacagctttcttaatacaagcactgtcgacgcagctagggtacagccttgaggacgtgcatgtcatcggccacagcctgggcgcgcacacggccgcggaggcgggcaggaggctggggggccgcgtgggcaggatcacagggctggatccagcagggccgtgcttccaggatgaacctgaggaggttcggttggatccatctgacgccgtgtttgtggatgtgattcacacagattcttctcccatagttccttccctaggtttcggaatgagccaaaaggtgggccatctggatttctttccaaatggaggaaaggaaatgcccggatgtaagaaaaatgtcctttcaaccattactgatattgatggaatatgggaaggaattggtggctttgtgtcttgcaatcacctaagaagcttcgagtattactcaagcagcgtcctcaaccctgatggcttcctgggctatccctgtgcctcctacgatgagtttcaggagagtaagtgtttcccttgtccagctgaaggatgccccaaaatggggcactatgctgaccaatttaaggggaaaacaagtgctgtggaacaaacctttttcctgaacacaggagagagtggtaactttactagttggagatataaggtatcagtcacactttctggaaaagagaaagtgaatgggtacatcaggattgctttgtatggaagtaatgaaaactcaaaacaatatgagattttcaaaggatccctcaaaccagatgcaagtcacacgtgtgctattgatgtggattttaatgttggaaaaatacagaaagttaaattcctctggaacaaacgtgggataaatctatctgagcccaaactgggggcttcccaaatcacagtgcaaagtggtgaagatgggactgagtataatttttgtagcagcgacactgtggaagaaaacgtcttgcaatctctttacccttgttaaaaacgtggtgcagctattgcggtaataaaatctttaatgcactcggaaaa

SEQ ID NO: 2601 - protein, 470 aa, Homo sapiens
MMLPPWTLGLLLLATVRGKEVCYGQLGCFSDEKPWAGTLQRPVKLLPWSPEDIDTRFLLYTNENPNNFQLITGTEPDTIEASNFQLDRKTRFIIHGFLDKAEDSWPSDMCKKMFEVEKVNCICVDWRHGSRAMYTQAVQNIRVVGAETAFLIQALSTQLGYSLEDVHVIGHSLGAHTAAEAGRRLGGRVGRITGLDPAGPCFQDEPEEVRLDPSDAVFVDVIHTDSSPIVPSLGFGMSQKVGHLDFFPNGGKEMPGCKKNVLSTITDIDGIWEGIGGFVSCNHLRSFEYYSSSVLNPDGFLGYPCASYDEFQESKCFPCPAEGCPKMGHYADQFKGKTSAVEQTFFLNTGESGNFTSWRYKVSVTLSGKEKVNGYIRIALYGSNENSKQYEIFKGSLKPDASHTCAIDVDFNVGKIQKVKFLWNKRGINLSEPKLGASQITVQSGEDGTEYNFCSSDTVEENVLQSLYPC

SEQ ID NO: 2602 - DNA, 1009 bp, Homo sapiens
gggcagaggccaagtgggcaccggatagcgccagccccgcccagagagcgaaatcatggagccttccaagaccttcatgagaaacctgccaatcacaccaggctatagcggctttgtgccattcctcagctgccaaggaatgtccaaggaggatgacatgaaccactgtgtgaaaaccttccaggagaaaacacagcgctataaagaacagctgcgggaattgtgctgcgcagtggccactgccccgaaactgaaacctgtcaactccgaggagacggtcctgcaggccctgcaccagtacaatctgcagtaccaccccctgatcctggaatgcaaatatgtaaagaaacctctccaggagcccccgatccctggctgggcaggctacctgccgagagccaaggtcactgaatttggctgtggcacgagatacactgtcatggccaaaaactgctacaaggacttcctggagatcacggagagggccaagaaggcacatctgaaaccatatgaagagtgaggagaaatgtctctttccttcctactaccgttttaaaaaggggatgaaatgtttgcagtggcctttctgcttagctgggccagctccctgcaactcacacggacggttcctctcctagatggaagctgccctgcccttggaaggcccctgagagaggaccccaaaactccgctgacatgtggctgtgctcagaggccaagtataccatgcagtgggaagatgtatctagagccactgtcctccgcaaagtatgcagaaggctagaagcgcagagtctcccaaggaggtgaactttaagtggggcttccaaaacctgccattctcatgttggaatcacgcccagtgagcaataaagaaatttagtaacaagaattttttaactgccgcctgcatcctgagtggttgacggttgcatgtcattaatgataaagaccgttttttgtcatgtgggaataaagaggctgcttctccgcaaaaaaaaaaaaaaaa

SEQ ID NO: 2603 - protein, 154 aa, Homo sapiens
MEPSKTFMRNLPITPGYSGFVPFLSCQGMSKEDDMNHCVKTFQEKTQRYKEQLRELCCAVATAPKLKPVNSEETVLQALHQYNLQYHPLILECKYVKKPLQEPPIPGWAGYLPRAKVTEFGCGTRYTVMAKNCYKDFLEITERAKKAHLKPYEE

SEQ ID NO: 2604 - DNA, 6355 bp, Homo sapiens
atgaatcattcacaactgaagccttgcattattaatatcgttattctcagacttctaaggagggcccagctggatcccatatatggaaggcgcgactcagcctccggggcaagcacctccctgggtccggagttgccatggagtcccgcaggcggcctggaggcggtgccccgggctcggcccccgcgcaggtccttggtctgcggcctgggtcctgcccgcgccggggtccacccagcccgcctttgcgccggcccagggccgctcccctgggaccctgggggacagacagaagctggtggggactggcgcgggcgtcctcgggagagcgccgggcgcgctgggcttgctgaagggctccaggcctggccattcggtgacttccaaagaggggacgcgccgcggggccccgagggcctgaaatccgctcccgcagcgcagccccgggcgcgccactacccccgccgcggtcgactgcggggcgaccgctcggtcccgaagccgggagaggagaggccgggcctcggcgggccgctctgggcgggcggggagcgcagctccggagccaggcagttccccgcgcccgccttccccgacctttcccggccggcccgagctcggagggcgctcccgctgcccggcggctcagacacggcccgagcgccgccgcggacgcggacagagacccgcacgggcacgggcgctgcgctggaggctcccctcgcggtccggggctgcgcgaccatggcggacaaggaggccggcggcagcgacgggccccgagaaacggctcccacatctgcatattcatctccagcccggagtcttggggacacaggaataacgcctctgtccccctcccatattgtgaacgacactgactccaacgtctcagaacagcagtcatttctcgtggtggtggccgtcgactttgggaccacatccagtggctatgcctacagcttcaccaaggagccggaatgcatccatgtgatgaggcgatgggagggaggtgaccctggtgtgtccaatcagaagactccaaccaccatcttgctgactcccgagaggaagttccacagcttcgggtatgccgccagggacttttaccatgacctggatcccaatgaggccaagcagtggctgtacctggagaagttcaagatgaagctgcacaccactggggacctcaccatggatacagacctgacggcagcaaatggcaagaaagtcaaagcccttgaaatctttgcttatgccctgcagtactttaaggagcaggcgctgaaggagctgagtgaccaggcgggttcggagttcgagaactctgatgtcagatgggtcatcacggtgcctgccatctggaagcagccggccaagcagttcatgagacaagctgcctaccaggcaggcctggcctcccccgagaactcggagcagctcatcattgccttggagcctgaggcagcctctatctactgccgaaagctgcggctacaccagatgattgagctgagcagcaaggcagccgtcaatgggtacagcggcagtgacacagtaggagctgggtttacacaggctaaggaacacatacggcgtaatcggcagagtcggacctttttggtggagaatgtcataggagaaatctggtccgagctggaggaaggtgataagtatgtggttgtggacagtggcggtggcaccgtagacctgacagtccatcagatccggttaccggagggacaccttaaggaactgtataaagcaacaggcggaccctatggatctttaggagtagattatgagttcgaaaaacttctgtataaaatatttggagaggattttattgaacaattcaaaatcaaacgccctgcagcctgggttgacttaatgattgcgtttgagtctcgcaaaagggcggctgccccagacagaactaacccgctgaacatcaccctgcccttctccttcattgactactacaagaagttccgcgggcacagtgtggagcacgccttgcggaaaagcaatgtggattttgtgaagtggtcctcgcaggggatgctgcggatgagtccagatgccatgaacgccctttttaagccgaccatcgatagcatcattgagcatctccgggacctgtttcagaagcccgaggtgtccaccgtcaagttcctctttctggtgggcggctttgccgaggcgcccctgctgcagcaggcggtgcaggctgcttttggggaccagtgccggatcatcatcccccaggacgtgggcctcaccatcctcaagggtgccgtcctctttggcctggaccccgcggtcatcaaggtgcgccggtcgccgctcacctacggggtaggcgtgctgaaccgctacgtggagggcaagcacccgcctgagaagctgctggtgaaggatggcactcggtggtgcaccgacgtctttgacaagttcatctctgccgaccagtctgtggctctgggtgagctggtcaagcgtagctacaccccggccaagccctcccagctggtcattgtcatcaacatctacagctctgagcacgacaacgtcagcttcatcactgatcccggggtgaagaagtgtggcacgctccgcctggatctcacagggaccagtggcactgcggtgcccgcccggagggagatccagacccttatgcagttcggggacaccgagatcaaagccacagccattgatatagccacttcgaagagtgtcaaagttgggatcgacttcttaaattactaaccctcccgccccgctgcctgtccccttggactcaacttatctgcatctgctgacctcaaccttgactgttctttccctaaccttgaccctcaccattgcccatgtgaatttcagcagggaagatgagaacaatcagggctagaaataattagtgacttttgagggcacactggagtcagaaaaacagaaattaagattaaggtttaggcatagaaaattaaaggatcctggaggagcagctagttttcataggtacaaaagtggtgaaatggccacggagaagggaatcagtacatttctgcagcagtggttgcgctgctttgaacagatctccgttatgtagaatttaggatgccctattgctgtctttctagatttaaaatgagatctttgaaccaggaggagatcttcatctgagacttgtctttctaaattttttggatggccatcaatataaaatgccacccatctgcagttaatttcttttcctcatcatgtgattaaaagtggtgattcagtgggaactgggaatgtttttagctggtggtagaaggctgcctacactgggcactgttttagattctcatatcatttaaacagcaaggaggttcagggaagaataaccgtagccttgggtaatccactagggcttttgtgagtaggagagctgatacctcacattcttagcaggtgaaaacttgccatgatggaaacagatagtgaagagttactgacgtatcccaaattatatgctgtgacataaattcccagcatgcccagccctgatttctgagttcataagtaattctagtgaaccttagtaggaattctgggtaagaaaatgaggttgccattggtcttgtttgcatcaccaagaccagacatccagaagagcccctcaccttgaaaagcagacagattttaaattaaccccctccttcccactcaccttcatctccctaagagttttggccatttaattccacattttgaaaggaatacattggtgaaatttgggaagagaatctgtgctatgcaatgtttcattaaaatcttcagtttttcaagtctctctaaaaataatttgtagatctatacttgatgtattaagtcagttttttttcacagcgggcctgtggctcgcctgcatcagaattgcctgggtgcgtgttcagaacaggttcctggatctgagccctttttaactgaggccgactcttggagaggggcaccagaatctgcatttgtagtgtataccacatcgtggttcaactgaaattggagaaatactaacctgagattttgttgaagttcacacacagatcacagcccgccctctgcaggtgtcccctttgggctcctttaggaagagggcttccatgagaaggtgaccccataccttgccctcttggtcaatgggattggggctccacctggcttggagatggcccttttaaccctcacaggaagggccaggggaggaaaaaaattgcaagaaagcgacaccaagaacggagctgactgaggaaccaactggagggtcttcactctctccttccccagtgtacaaaaccagttttctgcaacattcaggagccaaatgaggaaaaagaatcaagaatctgactcacagcccatctgatctgttcaaagctgtcttttccacctgctgaaattcattaaatcactggaggcatgcataatgaatggagaatgagtgaacttccaatgcaacttggattcacaaacccattatcatagccaatatgcagattttaaacagcatttcacatttcatttgaccatgtcttctttttcgcatcgcctgctgcagaattccctactagaatgtgaaacaacgaacaaaccacagaacttagagtgtgctggttagtcacataacttagtagcaggattgtgtatccaggcacaaaggtgtctttgctaatgttctcttgctacctgccctgcttcaaacgctaaatggtatgggtctttctttgttgccagccatattctacaaataagacttttcaatatagttatgagtaatataattttatgtacatataatgttagaatattgtacagaatcttggtttctacgatgcgcttttcttgtttcaaaaagaggaaaatgcttgatttttgttgatgatacttttgttactgtccttaattttccatagtttggtttcttaattgtgctcactaagcatcgatctgtgctgatgccaagctatggactatgtacgcaagaccgagcaatagacagaggtgcctagggtccaaacacactgaacgcacgtggaccgcctggatcaggagcctcatcagacccttctccatgcacatccttcccaaacagtcacagattccattgaaaggagcagattctatcagttcttctgtgcagactttaagagctgaacgttctggttctggaagccatgtgactgcgcagaacaacctaagaaaccctttgtgtcctgaggggtcgttgacctctccttccgggtcggagcagtcactctgagggcaaagcgtggtccactgtgtgtgatgttttcaggatgctagggtcaaagaaagaaaccaagtggtacataagcccagcttttctgctgggctaagtgtaagtgtgagtaacatggtcaagcccctcttttttgggctaatgtaaagcctttcctgccttgcattaatgctatctccctgtgtactgtttctcttaaatgagcagatagaaatctgcagtgttggcagataggtgatggagaggatgataattttatcttctggccacagagctgcagccccagttgtcagagtccttaaatgaaacccccaaatccatccctccttccctacccccactggaatattctagaataagagcactggataagtacacttgaacacatttttctaaccttagaaaatacctacaaggcctgttgtcttgacccattactcaattgtccctggcatattatctgatcttcacgtttcttggaagcagaatcatcaaggctttcctttgtaactgccctttccgtacacagcaggcatgaataaatgctgagtaacagacaagttacagacaggaggggaaagaggaggaaccatacaactgtttttgcaaaatgatggctgagtccagattatagaggttgccttacccttagaatgttatttagaccaagtttagcttttagagtccaggtctggttaattgccagggtagcaaagaatcgcatgcaccaatgtaaacaggagtcagaatgcattattagtcaaagatcgaatttcacattgtagagatgtatagctgtgattaagctgcatatgtatgctgggaaacggcttgagtggatggctaatataaaagttgttggccataatgccacacctctcatctgcttgaaatatggaccagtattctaaaatatcagctactggggtctcattcactacaagataaattcaaacttcacagaactttgcagcagttcaccaccagacgggactgtgtctgcaaactctcttgtcttcacagacgcctaataaagcaaaactctga

SEQ ID NO: 2605 - protein, 923 aa, Homo sapiens
MNHSQLKPCIINIVILRLLRRAQLDPIYGRRDSASGASTSLGPELPWSPAGGLEAVPRARPPRRSLVCGLGPARAGVHPARLCAGPGPLPWDPGGQTEAGGDWRGRPRESAGRAGLAEGLQAWPFGDFQRGDAPRGPEGLKSAPAAQPRARHYPRRGRLRGDRSVPKPGEERPGLGGPLWAGGERSSGARQFPAPAFPDLSRPARARRALPLPGGSDTARAPPRTRTETRTGTGAALEAPLAVRGCATMADKEAGGSDGPRETAPTSAYSSPARSLGDTGITPLSPSHIVNDTDSNVSEQQSFLVVVAVDFGTTSSGYAYSFTKEPECIHVMRRWEGGDPGVSNQKTPTTILLTPERKFHSFGYAARDFYHDLDPNEAKQWLYLEKFKMKLHTTGDLTMDTDLTAANGKKVKALEIFAYALQYFKEQALKELSDQAGSEFENSDVRWVITVPAIWKQPAKQFMRQAAYQAGLASPENSEQLIIALEPEAASIYCRKLRLHQMIELSSKAAVNGYSGSDTVGAGFTQAKEHIRRNRQSRTFLVENVIGEIWSELEEGDKYVVVDSGGGTVDLTVHQIRLPEGHLKELYKATGGPYGSLGVDYEFEKLLYKIFGEDFIEQFKIKRPAAWVDLMIAFESRKRAAAPDRTNPLNITLPFSFIDYYKKFRGHSVEHALRKSNVDFVKWSSQGMLRMSPDAMNALFKPTIDSIIEHLRDLFQKPEVSTVKFLFLVGGFAEAPLLQQAVQAAFGDQCRIIIPQDVGLTILKGAVLFGLDPAVIKVRRSPLTYGVGVLNRYVEGKHPPEKLLVKDGTRWCTDVFDKFISADQSVALGELVKRSYTPAKPSQLVIVINIYSSEHDNVSFITDPGVKKCGTLRLDLTGTSGTAVPARREIQTLMQFGDTEIKATAIDIATSKSVKVGIDFLNY

SEQ ID NO: 2606 - DNA, 3917 bp, Homo sapiens
atggagttgtccagagagctcgcccttgctgcgagccactcccagccactgcctccacacctactacagccgattggcacctgtagccactgtgatgctgctgcatccactttggaggtgtcggtgctacctctcctgctggtacagacaccgccagtgctggtgccaccaccaccacgtgagtgtcaccaacactgccagcgccaggctcaccgccactgccatgtcactggagccaccaactcacaacaccgcagggccagcgcagtggtggggaagagtgaagctctgggtgttgtttgctcaagtcccactcagtttgaaggcagatgtgggacaaactgggtgacaagacgtcatgaagtgctccgaactgcccctcttctccaaataaagcttcattctggactatttggggatgtccaagggacaggacttagtccctcaggattcgtctgttcttacaactttgaactctatgtggatgttgtctatcaggatcttcagtcctcccttttctctgggataccaatgctactcaagctctacacatctaacacccaatgcatcatatcgcctccatcaaaaccagatgacgcactgatcctatttccgttaactatcacagaattctacaagggccccaggctccgtggtggatgtgaaggtaacacagactcagattctaccgtcaggggatttccatctagcaaggagagaaggcaggttcatgatggtccattacacacagacagtgagacgttccgtaagagagcagagagaacacggaggaagtttggaagagtgggcctgcctggcacgggcggccttagcaacccggaggagctcactaacagcagagagcaagggggcgcgtggggagggcggggtggcccaagacgctgggccactgggacccgagcgcgcgaccccagccggaattcggagctaaggctgccgcgctccggcaaaacgcgcttgatgaggaagaacctaggcctggaagccacgcgagatctgggggtcgggatcacgttgcgttgcctagcgacagcagggacgctcgtgggaccccaggctaaaccccgctgtagccttaaatctcctaccatggaggaagaaggcggcggccgcagctgtgggaccactagggagctgcagaagctgaagcagcaggcgatggagtactaccgggagaacgacgttccgcgcaggctggaagagctgctcaactccaccttctacctccagcctgccgacgtctacgggcacctgaaagcaaactgcttttctaaacttgcaaagcctcccaccatatgcaaaatagtggggaaagacgtactagatggactggggcttccaaccctgcaagtggacatattctgcaccattcaaaactttcccaagaacgtatgttctgtggtgatctcgactcattttgaagtccatgagaatgctctgcccgagctggccaaggcggaggaggcagagagggccagcgcggtgagcaccgccgtgcagtgggtcaacagcaccatcacgcacgagctccaggggatggcaccctctgaccaggcagaggtggatcacctactcaggatattcttcgcaagtaaagtacaagaagataaggggagaaaagaattggaaaagagcctggaatactcaacagtgcctacacctctacctccagtaccaccaccaccaccccctccacctcctaccaaaaaaaaggggcaaaagccagggaggaaggatactattacagagaaacctattgcgcctgcagagcctgttgagcctgtactcagtggcagtatggccataggggccgtgtcactagctgttgccaaagcctgtgccatgctgcttaataaacctctgtacttaaatatcgctctactgaagcacaatcaggaacagccaacaacgctatctatgcctttgctgatggtatcgctggtcagctgtgggaagtcatcatctgggaagctaaatttaatgaaagaagtgatttgtataccccatcctgaattaacaaccaaacaaggtgtcgagatgcttatggaaatgcagaaacatatcaacaaaataattgaaatgccctctcctccaaaagcagagacaaaaaaagggcacgatggaagcaaaagaggtcaacagcagatcactggcaagatgtctcatcttggctgtttaaccattaactgtgactccatagaacagccactgcttctaatacaggaaatctgtgccaacctggggctagaactgggaacaaatctgcatctagctatcaactgtgctggacatgagctgatggactacaataaaggaaagtatgaagtgatcatgggcacatacaaaaatgcagcggagatggttgacctgtatgtggatctgatcaacaagtacccttcaattattgccttaattgatcctttcaggaaggaggactctgaacagtgggacagcatctatcacgcacttggttccaggtgttacataattgcaggaactgcttccaaaagcatttctaaacttctagagcaaggaaacatcagcatccccaaatccaatgggctgatcataaaacacacaaaccaaactacaatgtctgacttggtggaaataaccaatctgattgacagtaagaagcacatcactgtctttggaagtacagaaggagaatcatctgatgacagccttgtcgatttggctgttgggcttggtgtccggttcatcaagttggggggtctttcccgtggtgaacgagtgactaaatacaaccgccttctcactatagaggaagaacttgtccagaatggaacactgggtttcaaagaagaacacacttttttttactttaatgaggaagctgaaaaggctgcggaggcacttgaggctgctgcggctagggagccgctggtgcccaccttccccacacaaggtgtagaggaatcagccgaaacaggagcatcctctggatagggctgtacacaccccaggttccagccacaccatcagtattagtagaccgggaggtctgaagtacggcgccgtgtctccacatggagtttcctcttcaacttcaccaactcttgtggtttttattcttctaattccactgtttggtaaattacatatatgatgtttttgcctgaaattctgtgaacttcgttttgcagccaccacacttccatgtggattttgtttgtctattagctctcctgtccatttttcagggacacgctccagtaaaagaggccaatatttttgttgccaactccacactcagtcaaacaccccatcctttaccaatcagaatatctctgagaacaaaaacctaatgaccctagaagctctctgtgctgggaacagatgtccatcttctgtgtttattctacatgtctgtgctgaaaagcactgacacatttttgtaaccaacctcacgtagaagtgtgagagcatcaccattttttgtaagagccaatttcatctcactttcctacccttgattccttttttcctaattccctctcctttttaaattttagtttttcttgtattatttttatctttgcgagtcttcttagatcctttttggagtaagaatgagtataaatgaataagcacatcagtaaatgaattaatattctcaaggttattaaatgcccagttattcataccacagcatttaaaaagcaatccgcaagtgataaaaaaaaaaaaaaaaaatgatgtgacatatccattgcctgaattgctcttttgtaagccagtgttgggattatagcagaggagtagcagaaataaatatattcagacacaaacatatagatataataatatccaaccactttatatgatttagggtctcgttaaaatggttaccatttgcttctcctaaaaattat

SEQ ID NO: 2607 - protein, 996 aa, Homo sapiens [sequence omitted]

SEQ ID NO: 2608 - DNA, 3417 bp, Homo sapiens
cgaggctggcatagcggctgccgacccgccttcgttcctccaccccctgcacgggactgctgggcccgccccgccccgcctgcaggtgaagcggccgcagccgccgagtaggtgcgtggggatgatctcactcgcgcgctccgcgccaggaggaggaggagcgggagcggatccaacttccgggtagtggagccgcaagccaccggcatcttgctttttcttccccctcctcctgtgtgccccgcgccgctccctctttcccttttattcccggccccacccgccaaaatgaacagctcggacgaagagaagcagctgcagctcattaccagtctgaaggagcaagcaataggcgaatatgaagaccttagagcagagaaccagaaaacaaaggagaagtgtgacaaaattaggcaagaacgagatgaagccgttaaaaaactggaagaatttcagaaaatttctcacatggtcatagaggaagttaatttcatgcagaaccatcttgaaatagagaagacttgtcgagaaagtgctgaagctttggcaacaaagctaaataaagaaaataaaacgttgaaaagaatcagcatgttgtacatggccaagctgggaccagatgtaataactgaagagataaacattgatgatgaagattcgactacagacacagacggtgccgccgagacttgtgtctcagtacagtgtcagaagcaaattaaagaacttcgagatcaaattgtatctgttcaggaggaaaagaagattttagccattgagctggaaaatctcaagagcaaactcgtagaagtaattgaagaagtaaataaagttaaacaagaaaagactgttttaaattcagaagttcttgaacagagaaaagtcttagaaaaatgcaatagagtgtccatgttagctgtagaagagtatgaggagatgcaagtaaacctggagctggagaaggaccttcgaaagaaagcagagtcatttgcacaagagatgttcattgagcaaaacaagctaaagagacaaagccaccttctgctgcagagctccatccctgatcagcagcttttgaaagctttagacgaaaatgcaaaactcacccagcaacttgaagaagagagaattcagcatcaacaaaaggtcaaagaattagaagagcaactagaaaatgaaacactccacaaagaaatacacaacctcaaacagcaactggagcttctagaggaagataaaaaggaattggaattgaaatatcagaattctgaagagaaagccagaaatttaaagcactctgttgatgaactccagaaacgagtgaaccagtctgagaattcagtacctccaccacctcctcctccaccaccacttccccctccacctcccaatcctatccgatccctcatgtccatgatccggaaacgatcccaccccagtggcagtggtgctaagaaagaaaaggcaactcaaccagaaacaactgaagaagtcacagatctaaagaggcaagcagttgaagagatgatggatagaattaaaaagggagttcatcttagacccgttaatcagacagccagaccgaagacaaagccagaatcttcgaaaggctgcgaaagtgcagtggatgaactaaaaggaatactggcctcccagtagcattggatgcaggaaaaaatacattgacggtgaaaaacaagccgaaccagttgtagttttagatcctgtttctacacatgaaccccaaaccaaagaccaggttgctgaaaaagatccaactcaacacaaggaggatgaaggcgaaattcaaccagaaaacaaagaagacagcattgaaaacgtgagagagacagacagctccaactgctgatccataaaccagaagcctgatacgtttggaagtccttttcaataagcacatgattagtgttgttatattggcaagggctgtagacattctgctctggtcactgtattcagaatacaggttcttttctggtgtcacttttgtaagtagcaactataaacataagtaagctgtttagcaaaacacacattcctagtaggttttggttttttgatctttataaagatgaggtttttttcctagttactgtattaagtatgacttcttttagaaggttacaaaaaaattcagatgttgatacctttttaggaaatgtgcataccactcatcaaatggaatgctgaaagtttgaggtgcttgtatataatcggataaacaaaactgatcaacccaatgtgattttaaaagcccccaaagaagcttctgttttgggtctgatcctcttgatggagaaactgcagcagcatggaaattgttgggtactgtggcatacaagttattttctacagtagactgagataaactgaaaactcaggagctggcatcaaactcgtagtcccatagtcagtgttaattacacacattgttaactattggatgaaaaatacatgctattgattgtgtccaaagcctcccgaggacctccgtggggatgctctggtagcctgaatacagaactgaggtgaaagtccaaaccttgaattttacagtagtaagttggtaaaccatgtgctctgtgctatgagttaattatgttttcccaaatactaatgtggcacaagtaccatattttatcagagttcttatgtacagtatggtgaagataagtgacaagcacacatttttcttgcttcactgctgttctatattacacaggtttgttgttgttttttttaaaaaagaaattaagcagtagttagtctctaaaaatacaatgtttcaggctaccacagtgaataaatagaaatgtaatcagggattaaaaaaaaaacttatgcagcttttcaaagttgattgtttcaaaattggtgtttatttaaaataagtggtaatgtacttgaatgcactttttatgacaatgattcagtaatggtaattttactattaaagaaagtgaaaggtttagttttgttagcatggctcagcatgtagctgtcaggtgtttttcacctaagggcaaaagaaaatgatagtaataattgcagtagttgtattgtattgtatttttgcacgtgtggtaagcataggcttgaagaggtgggtaggcaggtacatgtacttcctaaattttgagataattatctttctgtaagttcgttatgcttgactgtttccatgttctcccaataatgattttatagttacttatcactttactcatggagaattaaaacgtaatgtttttcaactgtatctttctttaactggataatactgctatatgatatgcttactacagactgcattaattcacgaaacgaattctgttatgctgtaatttgaactctcctcaccacaacttattaaaaaggcaccaatagtttcccatt

SEQ ID NO: 2609 - protein, 456 aa, Homo sapiens
MNSSDEEKQLQLITSLKEQAIGEYEDLRAENQKTKEKCDKIRQERDEAVKKLEEFQKISHMVIEEVNFMQNHLEIEKTCRESAEALATKLNKENKTLKRISMLYMAKLGPDVITEEINIDDEDSTTDTDGAAETCVSVQCQKQIKELRDQIVSVQEEKKILAIELENLKSKLVEVIEEVNKVKQEKTVLNSEVLEQRKVLEKCNRVSMLAVEEYEEMQVNLELEKDLRKKAESFAQEMFIEQNKLKRQSHLLLQSSIPDQQLLKALDENAKLTQQLEEERIQHQQKVKELEEQLENETLHKEIHNLKQQLELLEEDKKELELKYQNSEEKARNLKHSVDELQKRVNQSENSVPPPPPPPPPLPPPPPNPIRSLMSMIRKRSHPSGSGAKKEKATQPETTEEVTDLKRQAVEEMMDRIKKGVHLRPVNQTARPKTKPESSKGCESAVDELKGILASQ

SEQ ID NO: 2610 - DNA, 5504 bp, Homo sapiens
gactgctggccgtggatccatttcacaggcctgccttctctcactaacgctcttcctagtccccgggccaactcggacagtttgctcatttattgcaacggtcaaggctggcttgtgccagaacggcgcgcgcgcgcgcacgcacgcacacacacggggggaaacttttttaaaaatgaaaggctagaagagctcagcggcggcgcgggcgctgcgcgagggctccggagctgactcgccgaggcaggaaatccctccggtcgcgacgcccggccccggctcggcgcccgcgtgggatggtgcagcgctcgccgccgggcccgagagctgctgcactgaaggccggcgacgatggcagcgcgcccgctgcccgtgtcccccgcccgcgccctcctgctcgccctggccggtgctctgctcgcgccctgcgaggcccgaggggtgagcttatggaaccaaggaagagctgatgaagttgtcagtgcctctgttgggagtggggacctctggatcccagtgaagagcttcgactccaagaatcatccagaagtgctgaatattcgactacaacgggaaagcaaagaactgatcataaatctggaaagaaatgaaggtctcattgccagcagtttcacggaaacccactatctgcaagacggtactgatgtctccctcgctcgaaattacacggtaattctgggtcactgttactaccatggacatgtacggggatattctgattcagcagtcagtctcagcacgtgttctggtctcaggggacttattgtgtttgaaaatgaaagctatgtcttagaaccaatgaaaagtgcaaccaacagatacaaactcttcccagcgaagaagctgaaaagcgtccggggatcatgtggatcacatcacaacacaccaaacctcgctgcaaagaatgtgtttccaccaccctctcagacatgggcaagaaggcataaaagagagaccctcaaggcaactaagtatgtggagctggtgatcgtggcagacaaccgagagtttcagaggcaaggaaaagatctggaaaaagttaagcagcgattaatagagattgctaatcacgttgacaagttttacagaccactgaacattcggatcgtgttggtaggcgtggaagtgtggaatgacatggacaaatgctctgtaagtcaggacccattcaccagcctccatgaatttctggactggaggaagatgaagcttctacctcgcaaatcccatgacaatgcgcagcttgtcagtggggtttatttccaagggaccaccatcggcatggccccaatcatgagcatgtgcacggcagaccagtctgggggaattgtcatggaccattcagacaatccccttggtgcagccgtgaccctggcacatgagctgggccacaatttcgggatgaatcatgacacactggacaggggctgtagctgtcaaatggcggttgagaaaggaggctgcatcatgaacgcttccaccgggtacccatttcccatggtgttcagcagttgcagcaggaaggacttggagaccagcctggagaaaggaatgggggtgtgcctgtttaacctgccggaagtcagggagtctttcgggggccagaagtgtgggaacagatttgtggaagaaggagaggagtgtgactgtggggagccagaggaatgtatgaatcgctgctgcaatgccaccacctgtaccctgaagccggacgctgtgtgcgcacatgggctgtgctgtgaagactgccagctgaagcctgcaggaacagcgtgcagggactccagcaactcctgtgacctcccagagttctgcacaggggccagccctcactgcccagccaacgtgtacctgcacgatgggcactcatgtcaggatgtggacggctactgctacaatggcatctgccagactcacgagcagcagtgtgtcacgctctggggaccaggtgctaaacctgcccctgggatctgctttgagagagtcaattctgcaggtgatccttatggcaactgtggcaaagtctcgaagagttcctttgccaaatgcgagatgagagatgctaaatgtggaaaaatccagtgtcaaggaggtgccagccggccagtcattggtaccaatgccgtttccatagaaacaaacatccccctgcagcaaggaggccggattctgtgccgggggacccacgtgtacttgggcgatgacatgccggacccagggcttgtgcttgcaggcacaaagtgtgcagatggaaaaatctgcctgaatcgtcaatgtcaaaatattagtgtctttggggttcacgagtgtgcaatgcagtgccacggcagaggggtgtgcaacaacaggaagaactgccactgcgaggcccactgggcacctcccttctgtgacaagtttggctttggaggaagcacagacagcggccccatccggcaagcagataaccaaggtttaaccataggaattctggtgaccatcctgtgtcttcttgctgccggatttgtggtttatctcaaaaggaagaccttgatacgactgctgtttacaaataagaagaccaccattgaaaaactaaggtgtgtgcgcccttcccggccaccccgtggcttccaaccctgtcaggctcacctcggccaccttggaaaaggcctgatgaggaagccgccagattcctacccaccgaaggacaatcccaggagattgctgcagtgtcagaatgttgacatcagcagacccctcaacggcctgaatgtccctcagccccagtcaactcagcgagtgcttcctcccctccaccgggccccacgtgcacctagcgtccctgccagacccctgccagccaagcctgcacttaggcaggcccaggggacctgtaagccaaacccccctcagaagcctctgcctgcagatcctctggccagaacaactcggctcactcatgccttggccaggaccccaggacaatgggagactgggctccgcctggcacccctcagacctgctccacaatatccacaccaagtgcccagatccacccacaccgcctatattaagtgagaagccgacaccttttttcaacagtgaagacagaagtttgcactatctttcagctccagttggagttttttgtaccaacttttaggattttttttaatgtttaaaacatcattactataagaactttgagctactgccgtcagtgctgtgctgtgctatggtgctctgtctacttgctcaggtacttgtaaattattaatttatgcagaatgttgattacagtgcagtgcgctgtagtaggcatttttaccatcactgagttttccatggcaggaaggcttgttgtgcttttagtattttagtgaacttgaaatatcctgcttgatgggattctggacaggatgtgtttgctttctgatcaaggccttattggaaagcagtcccccaactacccccagctgtgcttatggtaccagatgcagctcaagagatcccaagtagaatctcagttgattttctggattccccatctcaggccagagccaaggggcttcaggtccaggctgtgtttggctttcagggaggccctgtgccccttgacaactggcaggcaggctcccagggacacctgggagaaatctggcttctggccaggaagctttggtgagaacctgggttgcagacaggaatcttaaggtgtagccacaccaggatagagactggaacactagacaagccagaacttgaccctgagctgaccagccgtgagcatgtttggaaggggtctgtagtgtcactcaaggcggtgcttgatagaaatgccaagcacttctttttctcgctgtcctttctagagcactgccaccagtaggttatttagcttgggaaaggtggtgtttctgtaagaaacctactgcccaggcactgcaaaccgccacctccctatactgcttggagctgagcaaatcaccacaaactgtaatacaatgatcctgtattcagacagatgaggctttccatgggaccacaactattttcagatgtgaaccattaaccagatctagtcaatcaagtctgtttactgcaaggttcaacttattaacaattaggcagactctttatgcttgcaaaaactacaaccaatggaatgtgatgttcatgggtatagttcatgtctgctatcattattcgtagatattggacaaagaaccttctctatggggcatcctctttttccaacttggctgcaggaatctttaaaagatgcttttaacagagtctgaacctatttcttaaacacttgcaacctacctgttgagcatcacagaatgtgataaggaaatcaacttgcttatcaacttcctaaatattatgagatgctggcttgggcagcatccccttgaactcttcactcttcaaatgcctgactagggagccatgtttcacaaggtctttaaagtgactaatggcatgagaaatacaaaaatactcagataaggtaaaatgccatgatgcctctgtcttctggactggttttcacattagaagacaattgacaacagttacataattcactctgagtgttttatgagaaagccttcttttgggggtcaacagttttcctatgctttgaaacagaaaaatatgtaccaagaatcttggtttgccttccagaaaacaaaactgcatttcactttcccggtgttccccactgtatctaggcaacatagtattcatgactatggataaactaaacacgtgacacaaacacacacaaaagggaacccagctctaatacattccaactcgtatagcatgcatctgtttattctatagttattaagttctttaaaatgtaaagccatgctggaaaataatactgctgagatacatacagaattactgtaactgattacacttggtaattgtactaaagccaaacatatatatactattaaaaaggtttacagaattttatggtgcattacgtgggcattgtctttttagatgcccaaatccttagatctggcatgttagcccttcctccaattataagaggatatgaactgagtttttcttttgttgtttgttcttagctgtaattcctatgcttctatttcagagagccaggagagtttgatattaaaggaggttaaaactgtgatcttatgccatgtcatcaatggccacttaggggccatggctgatgacacattcttatctctacagtactaatgtgttattatagagccatgcattttatttctgaataagaacatatttaaactaatattcccttacaatatggacagtattaatccttccaagatgcagtatttatcaagtgaagcatatttagcagcaaattccattttaacataacttaggaaccaataaccagggtgttttgtggttgggggaggcacggggtggagtattcttttttatatcctcaaaacaaaaaaaatcaatacttatatttc

SEQ ID NO: 2611 - protein, 909 aa, Homo sapiens
MAARPLPVSPARALLLALAGALLAPCEARGVSLWNQGRADEVVSASVGSGDLWIPVKSFDSKNHPEVLNIRLQRESKELIINLERNEGLIASSFTETHYLQDGTDVSLARNYTVILGHCYYHGHVRGYSDSAVSLSTCSGLRGLIVFENESYVLEPMKSATNRYKLFPAKKLKSVRGSCGSHHNTPNLAAKNVFPPPSQTWARRHKRETLKATKYVELVIVADNREFQRQGKDLEKVKQRLIEIANHVDKFYRPLNIRIVLVGVEVWNDMDKCSVSQDPFTSLHEFLDWRKMKLLPRKSHDNAQLVSGVYFQGTTIGMAPIMSMCTADQSGGIVMDHSDNPLGAAVTLAHELGHNFGMNHDTLDRGCSCQMAVEKGGCIMNASTGYPFPMVFSSCSRKDLETSLEKGMGVCLFNLPEVRESFGGQKCGNRFVEEGEECDCGEPEECMNRCCNATTCTLKPDAVCAHGLCCEDCQLKPAGTACRDSSNSCDLPEFCTGASPHCPANVYLHDGHSCQDVDGYCYNGICQTHEQQCVTLWGPGAKPAPGICFERVNSAGDPYGNCGKVSKSSFAKCEMRDAKCGKIQCQGGASRPVIGTNAVSIETNIPLQQGGRILCRGTHVYLGDDMPDPGLVLAGTKCADGKICLNRQCQNISVFGVHECAMQCHGRGVCNNRKNCHCEAHWAPPFCDKFGFGGSTDSGPIRQADNQGLTIGILVTILCLLAAGFVVYLKRKTLIRLLFTNKKTTIEKLRCVRPSRPPRGFQPCQAHLGHLGKGLMRKPPDSYPPKDNPRRLLQCQNVDISRPLNGLNVPQPQSTQRVLPPLHRAPRAPSVPARPLPAKPALRQAQGTCKPNPPQKPLPADPLARTTRLTHALARTPGQWETGLRLAPLRPAPQYPHQVPRSTHTAYIK

SEQ ID NO: 2612 - DNA, 3355 bp, Homo sapiens
gactgctggccgtggatccatttcacaggcctgccttctctcactaacgctcttcctagtccccgggccaactcggacagtttgctcatttattgcaacggtcaaggctggcttgtgccagaacggcgcgcgcgcgcgcacgcacgcacacacacggggggaaacttttttaaaaatgaaaggctagaagagctcagcggcggcgcgggcgctgcgcgagggctccggagctgactcgccgaggcaggaaatccctccggtcgcgacgcccggccccggctcggcgcccgcgtgggatggtgcagcgctcgccgccgggcccgagagctgctgcactgaaggccggcgacgatggcagcgcgcccgctgcccgtgtcccccgcccgcgccctcctgctcgccctggccggtgctctgctcgcgccctgcgaggcccgaggggtgagcttatggaaccaaggaagagctgatgaagttgtcagtgcctctgttgggagtggggacctctggatcccagtgaagagcttcgactccaagaatcatccagaagtgctgaatattcgactacaacgggaaagcaaagaactgatcataaatctggaaagaaatgaaggtctcattgccagcagtttcacggaaacccactatctgcaagacggtactgatgtctccctcgctcgaaattacacggtaattctgggtcactgttactaccatggacatgtacggggatattctgattcagcagtcagtctcagcacgtgttctggtctcaggggacttattgtgtttgaaaatgaaagctatgtcttagaaccaatgaaaagtgcaaccaacagatacaaactcttcccagcgaagaagctgaaaagcgtccggggatcatgtggatcacatcacaacacaccaaacctcgctgcaaagaatgtgtttccaccaccctctcagacatgggcaagaaggcataaaagagagaccctcaaggcaactaagtatgtggagctggtgatcgtggcagacaaccgagagtttcagaggcaaggaaaagatctggaaaaagttaagcagcgattaatagagattgctaatcacgttgacaagttttacagaccactgaacattcggatcgtgttggtaggcgtggaagtgtggaatgacatggacaaatgctctgtaagtcaggacccattcaccagcctccatgaatttctggactggaggaagatgaagcttctacctcgcaaatcccatgacaatgcgcagcttgtcagtggggtttatttccaagggaccaccatcggcatggccccaatcatgagcatgtgcacggcagaccagtctgggggaattgtcatggaccattcagacaatccccttggtgcagccgtgaccctggcacatgagctgggccacaatttcgggatgaatcatgacacactggacaggggctgtagctgtcaaatggcggttgagaaaggaggctgcatcatgaacgcttccaccgggtacccatttcccatggtgttcagcagttgcagcaggaaggacttggagaccagcctggagaaaggaatgggggtgtgcctgtttaacctgccggaagtcagggagtctttcgggggccagaagtgtgggaacagatttgtggaagaaggagaggagtgtgactgtggggagccagaggaatgtatgaatcgctgctgcaatgccaccacctgtaccctgaagccggacgctgtgtgcgcacatgggctgtgctgtgaagactgccagctgaagcctgcaggaacagcgtgcagggactccagcaactcctgtgacctcccagagttctgcacaggggccagccctcactgcccagccaacgtgtacctgcacgatgggcactcatgtcaggatgtggacggctactgctacaatggcatctgccagactcacgagcagcagtgtgtcacgctctggggaccaggtgctaaacctgcccctgggatctgctttgagagagtcaattctgcaggtgatccttatggcaactgtggcaaagtctcgaagagttcctttgccaaatgcgagatgagagatgctaaatgtggaaaaatccagtgtcaaggaggtgccagccggccagtcattggtaccaatgccgtttccatagaaacaaacatccccctgcagcaaggaggccggattctgtgccgggggacccacgtgtacttgggcgatgacatgccggacccagggcttgtgcttgcaggcacaaagtgtgcagatggaaaaatctgcctgaatcgtcaatgtcaaaatattagtgtctttggggttcacgagtgtgcaatgcagtgccacggcagaggggtgtgcaacaacaggaagaactgccactgcgaggcccactgggcacctcccttctgtgacaagtttggctttggaggaagcacagacagcggccccatccggcaagcagaagcaaggcaggaagctgcagagtccaacagggagcgcggccagggccaggagcccgtgggatcgcaggagcatgcgtctactgcctcactgacactcatctgagccctcccatgacatggagaccgtgaccagtgctgctgcagaggaggtcacgcgtccccaaggcctcctgtgactggcagcattgactctgtggctttgccatcgtttccatgacaacagacacaacacagttctcggggctcaggaggggaagtccagcctaccaggcacgtctgcagaaacagtgcaaggaagggcagcgacttcctggttgagcttctgctaaaacatggacatgcttcagtgctgctcctgagagagtagcaggttaccactctggcaggccccagccctgcagcaaggaggaagaggactcaaaagtctggcctttcactgagcctccacagcagtgggggagaagcaagggttgggcccagtgtcccctttccccagtgacacctcagccttggcagccctgatgactggtctctggctgcaacttaatgctctgatatggcttttagcatttattatatgaaaatagcagggttttagtttttaatttatcagagaccctgccacccattccatctccatccaagcaaactgaatggcaatgaaacaaactggagaagaaggtaggagaaagggcggtgaactctggctctttgctgtggacatgcgtgaccagcagtactcaggtttgagggtttgcagaaagccagggaacccacagagtcaccaacccttcatttaacaagtaagaatgttaaaaagtgaaaacaatgtaagagcctaactccatcccccgtggccattactgcataaaatagagtgcatttgaaat

SEQ ID NO: 2613 - protein, 738 aa, Homo sapiens
MAARPLPVSPARALLLALAGALLAPCEARGVSLWNQGRADEVVSASVGSGDLWIPVKSFDSKNHPEVLNIRLQRESKELIINLERNEGLIASSFTETHYLQDGTDVSLARNYTVILGHCYYHGHVRGYSDSAVSLSTCSGLRGLIVFENESYVLEPMKSATNRYKLFPAKKLKSVRGSCGSHHNTPNLAAKNVFPPPSQTWARRHKRETLKATKYVELVIVADNREFQRQGKDLEKVKQRLIEIANHVDKFYRPLNIRIVLVGVEVWNDMDKCSVSQDPFTSLHEFLDWRKMKLLPRKSHDNAQLVSGVYFQGTTIGMAPIMSMCTADQSGGIVMDHSDNPLGAAVTLAHELGHNFGMNHDTLDRGCSCQMAVEKGGCIMNASTGYPFPMVFSSCSRKDLETSLEKGMGVCLFNLPEVRESFGGQKCGNRFVEEGEECDCGEPEECMNRCCNATTCTLKPDAVCAHGLCCEDCQLKPAGTACRDSSNSCDLPEFCTGASPHCPANVYLHDGHSCQDVDGYCYNGICQTHEQQCVTLWGPGAKPAPGICFERVNSAGDPYGNCGKVSKSSFAKCEMRDAKCGKIQCQGGASRPVIGTNAVSIETNIPLQQGGRILCRGTHVYLGDDMPDPGLVLAGTKCADGKICLNRQCQNISVFGVHECAMQCHGRGVCNNRKNCHCEAHWAPPFCDKFGFGGSTDSGPIRQAEARQEAAESNRERGQGQEPVGSQEHASTASLTLI

SEQ ID NO: 2614 - DNA, 3097 bp, Homo sapiens
attctgagcctagccacagaggtaaactccggacatttttttctttcatgtcgccaaatacatccttgtcattaaaagacctttgaaactgagtaaaatggctttgaaacctcagtagaatatgctcaaactgtctggagaaggattacgggacagctaccacagtagaagagatcaaattgcccttaaaaatctccagtctgatgtcacagaggcaaaatctgacttcaccaaggagaccctggcatcacaaaacacaaaaatgatttcatccatagtcatctcccagatgattgatgagaataagtcaagagaaaacagggcctccttgcccctaccgtgtgccattgctcagtctcgtgcacatcacgccaagcaatctctggctaaccgcagcggagtcaacattcacagagcatttgcgttacttccgggcagattaggaatcccggcaccgtcagatgagcgaggacctgaggcagagctgccgcccaaagaggagagaccctgtgggggcccccgcagagggtttgcatccatcaccatcacggccagacgcgtgggccccccagcccgcgccctggtgtgggggactgctggggactctctgtgccccaagtgcagggctgaggacacactgttccaggcgcccccggctctggccaatggcgcccatccaggtcggcatcagagatcttttgcctgcacagagttctccagaaacagctccgtggtgcggctgaaggttcccgaggcccacactgggttgtgtgagagacgcaagtactgggtcacccatgcagacgacaaagagaccagtttttctccagacaccccactgtcaggaaagagcccgctggtgttcagttcctgtgtccacctcagggtgtctcagcagtgtccagattcaatctattacgtagacaagtctctctccgtccccattgagccacctcaaattgccagccccaaaatgcacagatccgtcctgtcgctcaacctcaattgtagttcccacagattaacagcagatggagtagatggcctagtgaacagagagccaataagcgaagccctgaagcaggagctcctggagggagaccaggacctcgtaggccagcgctggaacccaggtttacaagaaagtcacttgaaggaaaccccatcgttgaggcgggtgcatttggggaccggcgcttgtccttggagtggttcttttccattggaaaacacagaattggcaaatgtgggagctaaccaagtcactgtaagaaaaggggaaaaggaccatacaactcattgtcacgccagcgatcatgccaaccaactgtccattcacattcctggctggagttacagggcagtacacacaaaagtattttctggaagcagcaagaggcaacaaggagaagtatgtatgactgtgtctgctcctccagtggaacagaagcccactagacatttccttcccattggggatagctctccaagcgatgactgtctgtctagagacctttctgagcccacagagagacgacatcaaagcttcctgaaacccagaatcctttttcctgggtttctttgccccttacaagatgtatgtgcatctctgcaggaagacaatggtgttcagatagaaagcaagttccccaaaggagattacacatgctgtgacttggttgtaaaaataaaggaatgtaagaagagtgaggaccccaccacacctgagccctccccagcagcaccctcgccagcaccccgcgatggagcagggagccctggcctgtccgaagactgttctgagtctcagcaaacgcctgcaagatctttgaccttgcaagaagcactggaagttcgtaagcctcagttcatttctcgctcacaagaacggctgaagaagcttgaacacatggtccagcagaggaaagcccagcggaaggaggacctgaggcagaagcagagcctccttcccatccgcaccagcaagaagcagttcacgattccccatcctctgagtgataacttgttcaaacccaaagaacggtgcatttcagagaaggagatgcatatgcgatctaagagaatctatgataacttgccggaagttaaaaagaaaaaagaagaacaaaggaaaagggtgatcttacaaagtaacagactccgtgccgaagtcttcaaaaagcaattactggaccagctccttcaaaggaatgcggtctaaccacaggctgccctgctgaccacactacctggacctgggaggacttcgaatgctggataagccattaaacttagcattatcttcatcatgggaaaacacttattttactttcgattttttttttccataaaggaaaacatcacttcctgaattactgacccaagccaaacagaaacaataaccctcgagaaaataggtcaacaatctgttgtggggaaaccacctccatgtaacccactggatacagtccccttaatgtttttgcttctaaattgtaccttttgcttctgatttcttctcccctgctgtttcctgcccatcagagaggcctgatacaagcaagtttgtttacatccctggggaatcttttacatcaaacttttgggatccaaatccatctccttttaaatttcaatctcagcacctgccagttatgcaaatgccaaaatgtgggtcatcatatagtatatttgaaacctttctgaacatgtacaccacccaatgctagaggctgacttggaaaccggtgggtgcaatgcccgaggctgtggaacaatcagcccatctctttgtgacctggagcagtcagagggccctcagtcaccccgccccattcctcaccagagaaaagaatccatttctatggaagctctgacgtaacttcagtgttttctacaatactcctcctgccccgccccattaaaacagttcttttgttaagaaatagcctaatggtccaactttgctgtctgttcttccaaatgtttataatacacattatttataaatatgtctgtttgggaagctaagaacaagctagtttttacaacacaaatggaaataaatgcaattattataaaaaaaaaaaaaaaaaaa

SEQ ID NO: 2615 - protein, 699 aa, Homo sapiens
MLKLSGEGLRDSYHSRRDQIALKNLQSDVTEAKSDFTKETLASQNTKMISSIVISQMIDENKSRENRASLPLPCAIAQSRAHHAKQSLANRSGVNIHRAFALLPGRLGIPAPSDERGPEAELPPKEERPCGGPRRGFASITITARRVGPPARALVWGTAGDSLCPKCRAEDTLFQAPPALANGAHPGRHQRSFACTEFSRNSSVVRLKVPEAHTGLCERRKYWVTHADDKETSFSPDTPLSGKSPLVFSSCVHLRVSQQCPDSIYYVDKSLSVPIEPPQIASPKMHRSVLSLNLNCSSHRLTADGVDGLVNREPISEALKQELLEGDQDLVGQRWNPGLQESHLKETPSLRRVHLGTGACPWSGSFPLENTELANVGANQVTVRKGEKDHTTHCHASDHANQLSIHIPGWSYRAVHTKVFSGSSKRQQGEVCMTVSAPPVEQKPTRHFLPIGDSSPSDDCLSRDLSEPTERRHQSFLKPRILFPGFLCPLQDVCASLQEDNGVQIESKFPKGDYTCCDLVVKIKECKKSEDPTTPEPSPAAPSPAPRDGAGSPGLSEDCSESQQTPARSLTLQEALEVRKPQFISRSQERLKKLEHMVQQRKAQRKEDLRQKQSLLPIRTSKKQFTIPHPLSDNLFKPKERCISEKEMHMRSKRIYDNLPEVKKKKEEQRKRVILQSNRLRAEVFKKQLLDQLLQRNAV

SEQ ID NO: 2616 - DNA, 2141 bp, Homo sapiens
ctacggggcgggttccaccgcccagaagagcgcacggcgggcgctgccggccccgagcgctcccgctaccactgccgctcccggccctgccggccggccatgccccgagttccggctgccgcgcgcacccagacccggcgatgaggagtggcgccgagcgcaggggcagcagcgccgcggcgtccccgggctcgccgccccccggccgcgcgcgccccgccggctccgacgcgccctcggccctgccgccgcccgctgctggccagccccgggcccgggactcgggcgatgtccgctcgcagccgcgccccctgtttcagtggagcaagtggaagaagaggatgggctcgtccatgtcggcggccaccgcgcggaggccggtgtttgacgacaaggaggacgtgaacttcgaccacttccagatccttcgggccattgggaagggcagctttggcaaggtgtgcattgtgcagaagcgggacacggagaagatgtacgccatgaagtacatgaacaagcagcagtgcatcgagcgcgacgaggtccgcaacgtcttccgggagctggagatcctgcaggagatcgagcacgtcttcctggtgaacctctggtactccttccaggacgaggaggacatgttcatggtcgtggacctgctactgggcggggacctgcgctaccacctgcagcagaacgtgcagttctccgaggacacggtgaggctgtacatctgcgagatggcactggctctggactacctgcgcggccagcacatcatccacagagatgtcaagcctgacaacattctcctggatgagagaggacatgcacacctgaccgacttcaacattgccaccatcatcaaggacggggagcgggcgacggcattagcaggcaccaagccgtacatggctccggagatcttccactcttttgtcaacggcgggaccggctactccttcgaggtggactggtggtcggtgggggtgatggcctatgagctgctgcgaggatggaggccctatgacatccactccagcaacgccgtggagtccctggtgcagctgttcagcaccgtgagcgtccagtatgtccccacgtggtccaaggagatggtggccttgctgcggaagctcctcactgtgaaccccgagcaccggctctccagcctccaggacgtgcaggcagccccggcgctggccggcgtgctgtgggaccacctgagcgagaagagggtggagccgggcttcgtgcccaacaaaggccgtctgcactgcgaccccacctttgagctggaggagatgatcctggagtccaggcccctgcacaagaagaagaagcgtctggccaagaacaagtcccgggacaacagcagggacagctcccagtccgagaatgactatcttcaagactgcctcgatgccatccagcaagacttcgtgatttttaacagagaaaagctgaagaggagccaggacctcccgagggagcctctccccgcccctgagtccagggatgctgcggagcctgtggaggacgaggcggaacgctccgccctgcccatgtgcggccccatttgcccctcggccgggagcggctaggccgggacgcccgtggtcctcaccccttgagctgctttggagactcggctgccagagggagggccatgggccgaggcctggcattcacgttcccacccagcctggctggcggtgcccacagtgccccggacacatttcacacctcaggctcgtggtggtgcaggggacaagaggctgtgggtgcaggggacacctgtggagggcatttcccgtgggcccccgagacccgcctagatggaggaagcgctgctgggcgccctcttaccgctcacggggagctggggccatggatgggacaggagtctttgtccctgctcagcccggaggctgtgcacggccctcgtcacaaggtgacccttgcagcacaggccgcgggtgccccaggctcggctcaggtcttggaggtcaagggcatgggttggggtagtgggtggggaggtgaatgttttctagagattcaaactgctccagcaatttctgtagttttcacctctgagaattacaatgtgagaaccgctaaaaaaaaaaaaaaaaaaaaaa

SEQ ID NO: 2617 - protein, 486 aa, Homo sapiens
MRSGAERRGSSAAASPGSPPPGRARPAGSDAPSALPPPAAGQPRARDSGDVRSQPRPLFQWSKWKKRMGSSMSAATARRPVFDDKEDVNFDHFQILRAIGKGSFGKVCIVQKRDTEKMYAMKYMNKQQCIERDEVRNVFRELEILQEIEHVFLVNLWYSFQDEEDMFMVVDLLLGGDLRYHLQQNVQFSEDTVRLYICEMALALDYLRGQHIIHRDVKPDNILLDERGHAHLTDFNIATIIKDGERATALAGTKPYMAPEIFHSFVNGGTGYSFEVDWWSVGVMAYELLRGWRPYDIHSSNAVESLVQLFSTVSVQYVPTWSKEMVALLRKLLTVNPEHRLSSLQDVQAAPALAGVLWDHLSEKRVEPGFVPNKGRLHCDPTFELEEMILESRPLHKKKKRLAKNKSRDNSRDSSQSENDYLQDCLDAIQQDFVIFNREKLKRSQDLPREPLPAPESRDAAEPVEDEAERSALPMCGPICPSAGSG

SEQ ID NO: 2618 - DNA, 6382 bp, Homo sapiens
ggctgctgctctcagcggcggggctcgccagcgcttcagtgggcggggacgcggcaggtgactccagaccaaggaggatgagctgctgtccctggaagagaacggatggagggaagcagctcctacgaagttccctctgtggctgctgctgatctggaggagggtgctggtcagactaggagcttgcctgccaccccctccaaagatgttcacaagggtgttggaggcatcatcttttcctcctcaccgattttagacttgagtgaaagtggtctgtgccgtttggaggaggtctttagaatccccagccttcaacaattgcatctgcaaaggaatgccctgtgtgtgattcctcaagatttctttcagttgcttccgaacctgacttggctggacctccggtacaatagaattaaagcgcttccttctgggattggagctcaccagcatttgaaaactttgcttttagaaagaaatcctatcaaaatgttacctgtggagctggggagcgtaaccacgctgaaagcactgaacctaagacactgccctctggaattccctcctcagctcgttgtgcagaagggattggtggctatccagcgcttcctgcggatgtgggcagtagaacactctctccccagaaatccaacttctcaagaggctccaccggttagagagatgaccctccgtgacctcccgagcccaggactggagttgtctggagaccacgcgtctaaccaaggagctgtgaacgctcaggacccagagggggctgtgatgaaagagaaggccagctttctcccacctgtggaaaagccagacctgagtgaactcaggaagtctgcggactcctcagagaactggcccagcgaggaggagatcaggcgcttttggaagctgaggcaggagattgttgagcacgtgaaggcagacgttctgggagatcagctcttgacgagggaattacctccaaatctcaaggcggccttgaacattgagaaagaactaccaaagccaagacacgttttcagaaggaagacagcctcctccaggagcatcttacccgacctcttgtcaccgtaccaaatggcgatccgagcaaaaagactggaagagagccgagcggcggcgctccgagagctccaggagaagcaggctctgatggagcagcagagacgagagaaaagggcactgcaggagtggagagagcgagcccagaggatgaggaagaggaaggaagagctcagcaaactcctgcctccgcggaggagcatggtggcatcaaagattccctctgccacagatctgatagataacaggaaagtaccactgaatccgcctggaaaaatgaaaccaagcaaagagaaatcgccacaagcaagtaaagaaatgagtgccctgcaggagagaaatttagaagagaagataaaacagcacgtcctccaaatgcgtgagcaaagaagattccatggccaggccccactggaggagatgaggaaggctgccgaggatctggaaattgccacagagctacaggatgaagtattgaagctaaaattgggattaaccttgaacaaagatcgtcgacgggcggccctcactggaaacctttcgcttggcctgccggcagcacagcctcaaaatacattttttaacacaaaatatggagaatcaggaaatgttcgcagataccagtgacaccaggtggctggactgatggagacgtcttcagacaggagccgctcagtcttctttcccgggcgtcgcctcctgtgtggtgccggaagagcgccaggttcagtgttaccctgagggctgatttcgcgcagcctgttgttttccttagacaggtccacgtccctctcctgaggctgtggaagatttcagccgtattaaaagaaaggacactgtgagcacgtggtctcgccttcccttcttcctgcaggttcccgccaagccatgtgacagagtgctcacactcaggcacttgcctctctcctgtcctggagcccttgttacaaaagtactcacagctttccttcacttagttatttgagtgtgggagaggagaccaggtcacccgattcccgccaagccggaagtccctgcagcaccacctttggctaggagggaggggtgacagccaaaaagggcttcgggggagtggttaccctgctccctgcccagtgacaagccctcctttcccctgggggccctcctttcccctgctccctgcccagctacggggccctcctttcagccttgaccccttcctggttgctaccactcaggctgccactcagtggactccaccccagggacacggcagggtctgcagacctccccatgctagatcagccgtatttcatgctctgtctgcccaggctgtgtagattctgtgtgacttagtctcttgtgctgagtgtttgcttggatcttgaaaacatctttggtttgatttctttaacagaggtgagactattcagactttgtttatttttgtgttaattttggtaaatatggtttcagtgagtttcctcatttcatccaagttgtgcaatgtatcagcataaagttcctcttattttcagtatctttaggatccgtaataatgtcccctcttttattcttgacctggtgttcttcatcattcttgctatggatttatcaattttgttcctcttttccaaaagccccaggttttggcttcactggatttgctgtttgtcttctgtctcatgggtctctgcgccctgcacttcgtactttccgagagtttaactggtgcttagagagaaatgcatcacttccaaacccatgtattagagaagaagggcgtgaaatttatcacctaagctttccattcaggaagctagaaaaggtgtcagtgacctgttgcggcccagcggctggagcagcagacgtttgccatttctcacgcctgagggcaggcgttggagcagctcagccggcgttgctggtcagggtctcccgtgaggctggagtcagccgtgggttgagctgctctcctctgaaggtttaactgggcttggggctcagcttccaaggtgctcacctggttgttgatcagagagcgtgtccgttgtgatcccagtcctttgaaactgtgaagcctcgccccgcggcctgccgcaggatatgttttggtaaatgtagactgtgcacttgagaagaatgtattttgagttgttgggtacattgttttgtgtgtgtcaggtgacattgactaatcctgttgctcagagctcctgtacccttactgactgacttaagcctggtttctcagttactgagagaggcctgtgaacagttctagctatgatcatgaacatgtgttttcttcttagttatgtgagtttttgctatacgtgttttggggctattttgtcagatgcctacaaatttaggattgttttatcttcctgtcgaactgaccttgtcattattatgaactatttctcttcgcctctccttttcacttcttgccttctgtggattttgtctgatactaatccaggcacactgctgctgttttggtcagcgttttcataatgcatcttcttccctccttctactgtactggatttaaagcgcaccttatagagacatcatatactcgggactccttttctttctctagctgccagttctgtgtttcagttacagtgtttggccctcacatttaaggtgcgtgtgcgtacggcggattccgtgcccatctcatgtttttattccctttattcttcttttgctgctttctgatagtgatcaatttttttatttatatctcttgtattagagttttagtaatatcttttaatattattctcttgggtgttgccttagagatttcatacatgcccttgagttcattagcatttcctgaatgagccaatgaccctgagaaggtccctcccatctgccagttccctgcccttgatgctgttgctctcgtccgcctcccttccacaggtaagcacgcaagacacaggtaccgtgtgccccaacggtgtcttgactcgctgttcctagacatcagtgtttgcttcactttacccatcccgatgctcttccttcctgcagcttcatgctccaatgagggctgattttcatttagctaaataacttttttttaagtatttctttgtatcatggttatgctttgactggccgtaagttctctcagcttttgtttgtctgaaaataaatttagttcgcctttattctgcacaggacagaattctaggtggatgatttttgccattcccagaactttaaagatgggctccactgtcttctggctcccatgtgttttgttaaaaattcagtgttcaggccgggtgctgtggctcacgcctgtaatcccagcactttgggaggccgaggcgagtggatcacgaggtcaggagatcgagaccatcctggctaacacggtgaaaccccgtctctactaaaaaatacaaaaaattagccgggcgtggtggcaggcacctgtagtcgcagctactcaggaggctgaggcgggagaatggcgtgaacccaggagacggagcttgcagtgagccgagatcgcgccactgcactccagcctgggcgacagagcgagactccgtctcaaaaaaaaaaaaaaaaagattcaatgttcattgttatttgttgctcctttgaaggtaatgtgtcttttttctttgtcttaaaattgtttctccttatctttggttttcagcagtctgtgctgtgcctggatgtgattttctttttacgtatttttcttggaatatacagaactcaaatctgggagttagcatctttcatcagttttggaaaattcttagccattttttttttttttactattttttcccctgttctccctcttctccctgagacttcagttttgtgtgtgtgtgcacatgtatgtatgcattcgtgcgtacgagtgtgtgcatgtgtgcgcccgtgtgtatgtgcatatgtgagtgtgtgtggctgtaacctgcacgtctcttctgtcatgtgttctatttttcattcctctctgtacatcaggctagatgcctcctgtctacgtggttttagatttacgaatcctgtcttctgttgtgtcccacagaaaaacccatgaggttttttaacattaaaaacagcagctttatgatagagaaaaaaacacaaacatagacgattgtaccattgcactcagaagaaacatcccaggccctgagcagcgtgtctttcctcggccgagtcaggcttcctggtgagcctcagggagtgcatggtctcagatgccatccttctcttctccagcatttccactcacctccgtgttcttggggagtgcgtggtgtcagatcccatcctgctcctctccagagtttccggtcacctccgtgttctcagggagtgcgtggtcttggatgccatcctgctcatctccagcatttcctctcacctccgtgttctcggggagtgcgtggtgtcagatcccatcctgctcatctccagcatttcctctcacctctgtgttctcggggagtgcgtggtgtcagatcccatcctgctcctctccagcatttcctctcacctccgtgttctcggggagtgcgtggtgtcagatcccatcctgctcctctccagagtttcctctcacctccgtgttctcggggagtgcgtggtctcagatcccatcctgctcctctccagagtttcctctcacctccgtgttctcagggagtgcgtggtcttggatgccatcctgctcatctccagcatttcctctcacctccgtgttctcggggagtgcgtggtgtcagatcccatcctgctcctctccagcatttcctctcacctccgagctctcggggagtgcgtggtctcagatcccatcctgctcctctccagagtttcctctcacctccgtgttctcgttctcatctctgccggaattccacatctgctcgtgcatgccatccaccttttccactagatccttttacatcatcattataatgatttttttttaataagtgttttctttcagttttaaatttcagatgttgtgtttttcaggtctaaggtgtctggtaattttttgtggatgccgattctctgttgaaattctccatcttttcatttcctttatatctcttttcttcttttttctataatatattacatttttctaataagtttttagtgagtgtccagcattgtataagttgacccttgaacaagagtttgaattataagggtccacttataagtggatttttaaaaaaatatatattgcaaaaatttttggaaatttgcaacaatttgaaaaactttgcagatgagccacatagcctagaaatatctg

SEQ ID NO: 2619 - protein, 530 aa, Homo sapiens
MEGSSSYEVPSVAAADLEEGAGQTRSLPATPSKDVHKGVGGIIFSSSPILDLSESGLCRLEEVFRIPSLQQLHLQRNALCVIPQDFFQLLPNLTWLDLRYNRIKALPSGIGAHQHLKTLLLERNPIKMLPVELGSVTTLKALNLRHCPLEFPPQLVVQKGLVAIQRFLRMWAVEHSLPRNPTSQEAPPVREMTLRDLPSPGLELSGDHASNQGAVNAQDPEGAVMKEKASFLPPVEKPDLSELRKSADSSENWPSEEEIRRFWKLRQEIVEHVKADVLGDQLLTRELPPNLKAALNIEKELPKPRHVFRRKTASSRSILPDLLSPYQMAIRAKRLEESRAAALRELQEKQALMEQQRREKRALQEWRERAQRMRKRKEELSKLLPPRRSMVASKIPSATDLIDNRKVPLNPPGKMKPSKEKSPQASKEMSALQERNLEEKIKQHVLQMREQRRFHGQAPLEEMRKAAEDLEIATELQDEVLKLKLGLTLNKDRRRAALTGNLSLGLPAAQPQNTFFNTKYGESGNVRRYQ

SEQ ID NO: 2620 - DNA, 2624 bp, Homo sapiens
ggggacggcctgggacgcggcgggagcatggagccgcgcgccggctgccggctgccggtgcgggtggagcaggtcgtcaacggcgcgctggtggtcacggtgagctgcggcgagcggagcttcgcggggatcctgctggactgcacgaaaaagtccggcctctttggcctacccccgttggctccgctgccccaggtcgatgagtcccctgtcaacgacagccatggccgggctcccgaggagggggatgcagaggtgatgcagctggggtccagctccccccctcctgcctgcggggttcagccccccgagaccaccggccccgagccacccccgcccctcgtgccgccgctgcccgccggaagcctgcccccgtaccctccctacttcgaaggcgcccccttccctcacccgctgtggctccgggacacgtacaagctgtgggtgccccagccgccgcccaggaccatcaagcgcacgcggcggcgtctgtcccgcaaccgcgacccggggcgcctcatcctcagcaccatccgcctgcggccgcgccaggtgctctgtgagaagtgcaagagcacgctgagccccccggaggccagccccggacccccagccgcgcccagggcccgcaggaggctgggcagcggcccggacagggagctccgcaagccggaggagccggagaacggcgagcccacggctgcggccaccgccaggaggagcaagagggagaggcgcgaggaggacagggccccggcagagcaggtcccgcggagcccggtcatcaagatctcctacagcacgccccagggcaagggagaggtggtcaagatcccctcccgcgtgcacggctctctggagcccttccgtccccagcaggccccgcaggacgacggcagccaggaccccgaggtgctggacagagagtcccgggaccggccgtcctgcgcgccctcggcctccatccccaagttgaaactgacacggcctgtgccggccggcgcggacctgccgccccctaagatccgcctgaagccccaccgtctgggggacagcgagcacgagcccgtgtaccgggccgagctggtgggggagctgaacgggtacctgcgggacagctcgccggcgccctgtgcggacggccctgccggtgggctggcggacttgtcttctggaagttcgggtgaggacgatgacttcaagagctgtccccagggtccacagggacgcgagggcttggcttttctcgtcagctgccctgaggggagagcggactgtgccagtgagtcggcgtgcagcagcgacagcctggacgaggccagatcgtccggctcggaagggacgccggcagacacgggtgacctctcgcctggccacggcgcgtcagcgccctcggtgtccagagaggctcgccaaacggtgccgcccctgacggtcaggctgcacacacagagcgtgtcggagtgcatcacggaggacggcaggactgtggccgtgggggacatcgtctggggtaagatccatggttttccttggtggccggcgcgtgttcttgacatcagtctcggccagaaggaggacggagagccgtcttggcgagaagcgaaggtctcgtggtttggttctccgactacgtcgttcttgtctatttcaaaactctcccctttctctgaatttttcaaactgagatttaatcgtaagaagaaggggatgtatcggaaagctataaccgaggctgcaaatgccgcaagacacgtggccccggaaatcagggagctcttaacccagtttgaaacgtaactggttccctgaccaggtcaccgacgatgagggcgcacctgctgtcctggagcttccgatctctgttcggggaccctgtgagccttctggccggctgcgtgcagagcccactgggcacggtggtcggcctggtgtgaggccccccggggaccggcagtgtgtccagggaggggatggccctgagcccagcggctcctcccgctgagtgtatttcttcccaccactcagcgcatggctgccctggctcacgaggcagtcgggactcgtgacttgctggctgctggctgctgctgcctcgcgcgctggggttccatggaggaactgggcctgccgccccggcctcacctgctgcccgcatgctggggtcccatggaggaaccaggcctggcgccccggcctcgcccagcggctggtgtgggcagctgttccctgcctcgcagtgtcctggaggcagctgtctcgcagactcagcttggtctcccgcaggcttcagaaaaacccaattgcacgtgtgggattcttccccagcccttgggtgcggggtctctgtgcacttgagagctgggggacccacccaccgtctcccactccaagttcatcccagagcgtggggcccgctgggcacctggcacctggcctgcagatgctgctacgagtgaccagtgctgtgtggaggaggccaagggcggcccctgggaaaccgggcttcaacagtacaaggaaaagaaacttgctctgttttgtaagagcgtgttccttttcctcttttttgtcactttaaagaccaaaaagaataaagaaagaaaagaaaaaaaaaaaaaaaa

SEQ ID NO: 2621 - protein, 513 aa, Homo sapiens
MQLGSSSPPPACGVQPPETTGPEPPPPLVPPLPAGSLPPYPPYFEGAPFPHPLWLRDTYKLWVPQPPPRTIKRTRRRLSRNRDPGRLILSTIRLRPRQVLCEKCKSTLSPPEASPGPPAAPRARRRLGSGPDRELRKPEEPENGEPTAAATARRSKRERREEDRAPAEQVPRSPVIKISYSTPQGKGEVVKIPSRVHGSLEPFRPQQAPQDDGSQDPEVLDRESRDRPSCAPSASIPKLKLTRPVPAGADLPPPKIRLKPHRLGDSEHEPVYRAELVGELNGYLRDSSPAPCADGPAGGLADLSSGSSGEDDDFKSCPQGPQGREGLAFLVSCPEGRADCASESACSSDSLDEARSSGSEGTPADTGDLSPGHGASAPSVSREARQTVPPLTVRLHTQSVSECITEDGRTVAVGDIVWGKIHGFPWWPARVLDISLGQKEDGEPSWREAKVSWFGSPTTSFLSISKLSPFSEFFKLRFNRKKKGMYRKAITEAANAARHVAPEIRELLTQFET

SEQ ID NO: 2622 - DNA, 738 bp, Homo sapiens
aagggaggcaggaggcttctctgggtataaagcagctgaaatgtggagtttcctcccaggagctgagagcgtgtccatgggcccagtgcctggcgtgtcctccctgggagcttgctggacgcatgaccaggattctgggagggcagaggacagaccacaggcacccaggataactcagtacacatgggttctcagcttcctgttcacagagaaacctcagacaagaagcacgtcgcccatttctcatcaaggccaaccccagaccacgagagcgctttctctgcgtcagccccagcaccccagcgcccctgcctccgggcgcccgcggcctccgcactccagtggcccagacctggctgaggcagctcccgtggtagatcaagcctcacaggcggctggaagagccagttctgggctgggcctgtgggaacaggcgtctgttagtcagggtttcaggaatgcggccttcgaagcctgaagcggggaatggcggctctgggccctcaaggggcaggcggtgagcctgggaggccaggccgggctgacccaaggggagaggaccctctccgcccactgccgctggccctgggcaggtctagagcctgggggtctccagaggcacaatcccttatctccgggagaaggcagagggcagaggcaggaaacaaatctcctgtcaaaattcctaattaaaatactaagtaagtgatggctccaggctgaaacaccggacactga

SEQ ID NO: 2623 - protein, 145 aa, Homo sapiens
MWSFLPGAESVSMGPVPGVSSLGACWTHDQDSGRAEDRPQAPRITQYTWVLSFLFTEKPQTRSTSPISHQGQPQTTRALSLRQPQHPSAPASGRPRPPHSSGPDLAEAAPVVDQASQAAGRASSGLGLWEQASVSQGFRNAAFEA

SEQ ID NO: 2624 - DNA, 2938 bp, Homo sapiens
gcgcgggccgctgtgaggcgcggcggcgagcgacgggcgcggggccgcggagcagcgagcgagcgagcgagcgcgaggccggagccccggccaggcccggccgacccgccgagcccgcgatgcgccccggggccgccccccggcgcagctgacgccccgcggccccgcgaagaccccggccggccggtcccggaggaagcggccgccgccgccgccgcccagcccagcgcccgcgccgcccgggcaccatggcggggaaggcggccgccccgggcaccgcggtgctgctggtcacggccaacgtgggctcgctcttcgacgacccagaaaacctgcagaagaactggcttcgggaattttaccaggtcgtgcacacacacaagccgcacttcatggccttgcactgtcaggagtttggagggaagaactacgaggcctccatgtcccacgtggacaagttcgtcaaagaactattgtcgagtgatgcgatgaaagaatataacagggctcgagtctacctggatgaaaactacaaatcccaggagcacttcacggcactaggaagcttttattttcttcatgagtccttaaaaaacatctaccagtttgactttaaagctaagaagtatagaaaggtcgctggcaaagagatctactcggataccttagagagcacgcccatgctggagaaggagaagtttccgcaggactacttccccgagtgcaaatggtcaagaaaaggcttcatccggacgaggtggtgcattgcagactgtgcctttgacttggtgaatatccatcttttccatgatgcttccaatctggtcgcctgggaaacaagcccttccgtgtactcgggaatccggcacaaggcactgggctacgtgctggacagaatcattgatcagcgattcgagaaggtttcctactttgtatttggtgatttcaacttccggctggattccaagtccgtcgtggagacgctctgcacaaaagccaccatgcagacggtccgggccgccgacaccaatgaagtggtgaagctcatatttcgtgagtcggacaacgaccggaaggttatgctccagttagaaaagaaactcttcgactacttcaaccaggaggttttccgagacaacaacggcaccgcgctcttggagtttgacaaggagttgtctgtctttaaggacagactgtatgaactggacatctcgttccctcccagctacccgtacagtgaggacgcccgccagggtgagcagtacatgaacacccggtgcccagcctggtgtgaccgcatcctcatgtccccgtctgccaaggagctggtgctgcggtcggagagcgaggagaaggttgtcacctatgaccacattgggcccaacgtctgcatgggagaccacaagcccgtgttcctggccttccgaatcatgcccggggcaggtaaacctcatgcccatgtgcacaagtgttgtgtcgtgcagtgacgtggtgggaagagatgccagcgccacgagaggacacttcgtgagcctccctgtagccgtggaccgaatacgcactcttgaaagctgcatcgagaacccgcccaagcgccacctgctagacggccagccccacacttcgcttcagcctccggaccattccggagcagcctcacatacctcactgtctcgtctgtctatgtgacattaagtagaaatattggttttttttttttttttttaaataagtcacagtcctgttgtcaaaactctaatagacagcaaagagggtctgtaccgtagacttcacagttttcagtttttaatgattgccagtggaggggcttcttcagcacagagaccccccactgtgtccagggaccccctctgccaggtggaggtgtgtccaggggctggggaagccgagacgggcactccctctgccggccggcagcgtggccctgagcatggcaagggggtctgtctctgccgatgctccttccgcggcactgactctgcgccgtgtcacatggtttttgaatcacactgcagctgctttccatttttatatatatataaatatatataaatatatactttttaaaaataatttataaatcttaccaaaacttatgctaaatatactttccagtatgaacgcacaggagagtcccatcagcaggcggcattggagtctaggagctcagctgtgtgtccatcaacacacaaattcgtaaaaaacacacatggcctcgccatcgtgggtaaaatcggccccacagcacgtctgcaccagcgggccgttactcccatgccgttcttctgtgtaatattaagaactgaatgtgaagtttatagctagcctgggtgtaccttttaagaattttgtaaaccgtttgtctgtcttttgttactgttttatggtgccaagtatcctacgttacaacaataatatcatgggagaaatagaaatagcctagtttgcttccaatagaaactgcttttaacatgggctgtatataaaaatattaaagagaaacaaaactgtacatttcctcattgctccgctacagacaacccatgtcataaccttgttgcaaatatttttctcctatagcagtaagtacagcattagaaggtgattagagagtctgttgatgaaacacaaatgtatgttttattgattttactttagaacactacagagttcctggaccgggtgaaggcattagctgggtgtttgtgtgggataaatactaccactgcaagtgactgctgtccgctgcggaatctgttcttggtggaagcacaggtccgtgtcgctgctgtggttgccgctgtccgcggttcaacacggagtccgccccgcgggtttcagctgttggtcgttctgaggggcctttggaagtgaccggtctggttcctaagcaataaaattgaccgtggtgaaaata

SEQ ID NO: 2625 - protein, 412 aa, Homo sapiens
MAGKAAAPGTAVLLVTANVGSLFDDPENLQKNWLREFYQVVHTHKPHFMALHCQEFGGKNYEASMSHVDKFVKELLSSDAMKEYNRARVYLDENYKSQEHFTALGSFYFLHESLKNIYQFDFKAKKYRKVAGKEIYSDTLESTPMLEKEKFPQDYFPECKWSRKGFIRTRWCIADCAFDLVNIHLFHDASNLVAWETSPSVYSGIRHKALGYVLDRIIDQRFEKVSYFVFGDFNFRLDSKSVVETLCTKATMQTVRAADTNEVVKLIFRESDNDRKVMLQLEKKLFDYFNQEVFRDNNGTALLEFDKELSVFKDRLYELDISFPPSYPYSEDARQGEQYMNTRCPAWCDRILMSPSAKELVLRSESEEKVVTYDHIGPNVCMGDHKPVFLAFRIMPGAGKPHAHVHKCCVVQ

SEQ ID NO: 2626 - DNA, 7777 bp, Homo sapiens
agaggggaaaagaacgtcaggagagtgaacgggagcaaataaaacgctgtccattctgactggaagggccagagccgtgtctaagggcgggggccgggaggtggcccgcggtggtgtctctaccaggacgaggcctggggtatctgaagaggggatgacgtccaggcgctttgctaaagggaagccagaagggtatgagttgctagggtcagagatggggctttcggctcgagtctttccctgcagggcagagagtccgaagagcccgagaaggcagggaggacagtgggcctggtccttccccggccggcagagggagtcccgagatggaacgtccagctctcctctaacgaaaagcgtttgcatggctgtctcgccaattctgtacctcccggggctgaggaagagccgaggtgactagaagctagcgacaagtgccggccacctccgacgccaggcgccgggcttggagcccgacgggccgaattctcgcgagagcggccgccgccatttttccattgattgcagcgggctgggggaggggccgacgacgaaggcggctgtggtagcggcggcggcggcggcggagccctgggtcggtgtctgcgcgctggtgtctgaggcccaggctgaggcctccgctattgctggagcgcaggcggcggagaggatgactgccgctgccattctctcttgagctagcgagccgccgccaccctccaccctcccccggcagggcggagaggagcggccggagtcagcgatggtgcccggcgaggagaaccaactggtcccgaaagaggcaccactggatcataccagtgacaagtcacttctcgacgctaattttgagccaggaaagaagaactttctgcatttgacagataaagatggtgaacaacctcaaatactgctggaggattccagtgctggggaagacagtgttcatgacaggtttataggtccgcttccaagagaaggttctgggggttctaccagtgattatgtcagccaaagctactcctactcatctattttgaataaatcagaaactggatatgtgggactagtaaaccaagcaatgacttgctatttgaatagccttttgcaaacactttttatgactcctgaatttaggaatgcattatataagtgggaatttgaagaatctgaagaagatccagtgacaagtattccataccaacttcaaaggctttttgttttgttacaaaccagcaaaaagagagcaattgaaaccacagatgttacaaggagctttggatgggatagtagtgaggcttggcagcagcatgatgtacaagaactatgcagagtcatgtttgatgctttggaacagaaatggaagcaaacagaacaggctgatcttataaatgagctatatcaaggcaagctgaaggactacgtgagatgtctggaatgtggttatgagggctggcgaatcgacacatatcttgatattccattggtcatccgaccttatgggtccagccaagcatttgctagtgtggaagaagcattgcatgcatttattcagccagagattctggatggcccaaatcagtatttttgtgaacgttgtaagaagaagtgtgatgcacggaagggccttcggtttttgcattttccttatctgctgaccttacagctgaaaagattcgattttgattatacaaccatgcataggattaaactgaatgatcgaatgacatttcccgaggaactagatatgagtacttttattgatgttgaagatgagaaatctcctcagactgaaagttgcactgacagtggagcagaaaatgaaggtagttgtcacagtgatcagatgagcaacgatttctccaatgatgatggtgttgatgaaggaatctgtcttgaaaccaatagtggaactgaaaagatctcaaaatctggacttgaaaagaattccttgatctatgaacttttctctgttatggttcattctgggagcgctgctggtggtcattattatgcatgtataaagtcattcagtgatgagcagtggtacagcttcaatgatcaacatgtcagcaggataacacaagaggacattaagaaaacacatggtggatcttcaggaagcagaggatattattctagtgctttcgcaagttccacaaatgcatatatgctgatctatagactgaaggatccagccagaaatgcaaaatttctagaagtggatgaatacccagaacatattaaaaacttggtgcagaaagagagagagttggaagaacaagaaaagagacaacgagaaattgagcgcaatacatgcaagataaaattattctgtttgcatcctacaaaacaagtaatgatggaaaataaattggaggttcataaggataagacattaaaggaagcagtagaaatggcttataagatgatggatttagaagaggtaatacccctggattgctgtcgccttgttaaatatgatgagtttcatgattatctagaacggtcatatgaaggagaagaagatacaccaatggggcttctactaggtggcgtcaagtcaacatatatgtttgatctgctgttggagacgagaaagcctgatcaggttttccaatcttataaacctggagaagtgatggtgaaagttcatgttgttgatctaaaggcagaatctgtagctgctcctataactgttcgtgcttacttaaatcagacagttacagaattcaaacaactgatttcaaaggccatccatttacctgctgaaacaatgagaatagtgctggaacgctgctacaatgatttgcgtcttctcagtgtctccagtaaaaccctgaaagctgaaggattttttagaagtaacaaggtgtttgttgaaagctccgagactttggattaccagatggcctttgcagactctcatttatggaaactcctggatcggcatgcaaatacaatcagattatttgttttgctacctgaacaatccccagtatcttattccaaaaggacagcataccagaaagctggaggcgattctggtaatgtggatgatgactgtgaaagagtcaaaggacctgtaggaagcctaaagtctgtggaagctattctagaagaaagcactgaaaaactcaaaagcttgtcactgcagcaacagcaggatggagataatggggacagcagcaaaagtactgagacaagtgactttgaaaacatcgaatcacctctcaatgagagggactcttcagcatcagtggataatagagaacttgaacagcatattcagacttctgatccagaaaattttcagtctgaagaacgatcagactcagatgtgaataatgacaggagtacaagttcagtggacagtgatattcttagctccagtcatagcagtgatactttgtgcaatgcagacaatgctcagatccctttggctaatggacttgactctcacagtatcacaagtagtagaagaacgaaagcaaatgaagggaaaaaagaaacatgggatacagcagaagaagactctggaactgatagtgaatatgatgagagtggcaagagtaggggagaaatgcagtacatgtatttcaaagctgaaccttatgctgcagatgaaggttctggggaaggacataaatggttgatggtgcatgttgataaaagaattactctggcagctttcaaacaacatttagagccctttgttggagttttgtcctctcacttcaaggtctttcgagtgtatgccagcaatcaagagtttgagagcgtccggctgaatgagacactttcatcattttctgatgacaataagattacaattagactggggagagcacttaaaaaaggagaatacagagttaaagtataccagcttttggtcaatgaacaagagccatgcaagtttctgctagatgctgtgtttgctaaaggaatgactgtacggcaatcaaaagaggaattaattcctcagctcagggagcaatgtggtttagagctcagtattgacaggtttcgtctaaggaaaaaaacatggaagaatcctggcactgtctttttggattatcatatttatgaagaagatattaatatttccagcaactgggaggttttccttgaagttcttgatggggtagagaagatgaagtccatgtcacagcttgcagttttgtcaagacggtggaagccttcagagatgaagttggatcccttccaggaggttgtattggaaagcagtagtgtggacgaattgcgagagaagcttagtgaaatcagtgggattcctttggatgatattgaatttgctaagggtagaggaacatttccctgtgatatttctgtccttgatattcatcaggatttagactggaatcctaaagtttctaccctgaatgtctggcctctttatatctgtgatgatggtgcggtcatattttatagggataaaacagaagaattaatggaattgacagatgagcaaagaaatgaactgatgaaaaaagaaagcagtcgactccagaagactggacatcgtgtaacatactcacctcgtaaagagaaagcactaaaaatatatctggatggagcaccaaataaagatctgactcaagactgactctgatagtgtagcattttccctgggggagttttggttttaattagatggttcactaccactgggtagtgccattttggccggacatggttggggtaacccagtgacaccagcactgattggactgccctacaccaatcagaagctcagtgcccaatgggccactgttttgactcggaatcatgttgtgcactatagtcaaatgtactgtaaagtgaaaagggatgtgcaaaaaaataaaaaaaaacaacaaaaaaagctaaccttctattagaaaaggggacaggggaatgagtaaacttcttttattgcggacaaatgtgcacatagccgctagtaaaactagcctcaaacaggatgctcatagcttaataataaaagctgtgcaaaggccatgaatgaatgaattttctgtttatttcactgatgcacacattacctcattgacaattcagaagtaaatccaacgtgtgttgactcttggaaagcagcaaaaacaggagctgaagaaaagaaattcttggaaccagccgtaacccagtaaggaattgtgaagttgtgtttttattttgtttcattttttgcagagtattaagaacattattctggaacatcagaacgtttcccttagaccgatcccagcaggtggcagctcagattgctgcagtgttgtaattataactgattgtacttaagttatggatgtagagaatatgtttcattcatttattcagcatgtaaataaaattgatcctgttgagttatcataattgcagttcaactatctgccatgattattcttttcacgtatcattcattctgtacatttgtgtacattgagaagtatagcaatctatgtaaatgtaatcctcagtgaggttcctcagtgctaggtcccataggattgtcgttgcccttgttaatgaggtttctctgttcagcggcttcaatttttttctctttgtacatctagttttgaagatttacttcaagtttgaatcttctagaatgcttgtaagtccagttttaatttttagagtcaatttgtagttacatgtagtttaacttttgggaaacgtcttaacattgttctgaataaacttgctaatgaggtcaggtcatggtacagactgatgcagtcaacatgatttcattgcagagtttattagtatcagcaagtttttgctttgctaaataaaagtactcaatgaacacaattctacataaattttgacataccatctaatttataaaaatcaataaaaaaggttttggtaaaactttttcatgccagatgctgtttacaacaatgaacatgccaataaaacatttgttcattctgttgtgttattttagtcattaaacttctgtggatgaagaatctgggttaagaatagatttgtcatctttaaatatgacattttgtaatgtgtattggatatctcatttctatgataaaggtatatttacagtaaagttctcataagagaaatgaaaagctgtgttaatatctaactttggggaaccctgtcagtatttcagatccgatttttaccctttttttcttataagaaagataaaattagaaaatactgttagcaaatgtggctctgccatttgaatataatcaccgagaattccatgtcttaaaagtctcctggaatccacaatgaaaaaaaaaatcttttctaaggtatttttctggctaatttttatttgaagaaagctatagcatttagcgaaatttgactgaagtaatgttctgagtttgcattagtgggattggtgatgttctcagaagaaaattggaaacacttgtgatgaattgtctttcagatcacttagattttctgatgtaagaggacagctgtttggttctgatacaggcctgcttacttgggatgtagggttagtaaatggggtttctgctttaaaggactgacttgctatcacacaaaagaggcagacttgtaaacacaatgggctttggagtttggtctgattgggtttggtttagtattcctatgagcgtaaatggtaaaattcttctgatacccactctttagactgtgccttctgctctgttctttgttttatgtttaactgctgtttctaattgcaggtgtattacagatacaaataagagtaaagaaaatatatttcattatagaaaagaaaaaattaaaagcttcttgcttttcagtgcctgatagagtgaaaacacaaagttgcactttaataatttcaataaaagctaatctgtgtcagcctccctctgcttcagagagtcaggtgagcatccataacctaacaggcagagccctagcgatgtggatcaagtttcctgagcccgggggcggtggagcctcatgatctcttatcttttgaggctgaggcaggtcacatgcaacaaattgtgaccctgctccccacaagtcatgcaaaggttttgaagagcttttaccgtggggcagatgaacttgtgtcaaccatgcacaccctgtgagaaccaagtacctgtgtttctaaggcgggcactcaaggtgaggggtgcattctggccaaagaaacaaaagctgtggtttcaggaccatgccgtgtgtagctgatctgtacgggacgtgtatgtaaggaagagcaatcatgatagataagaacagtgtgtgaagcagccttcacactagagtgtttggtcatctcttataatgtaagggaaggtactttaaaattctgggaagatgcgatgaactcatgtcccagtcagaaaataatccaatgaaataagcattggttgccaggccacagttaggaattgtattgtgatacatctagaggccaagagagcaggagagagctaccaacttacactgtggtttaagctaaatgaccgcacagcatcatagcattgcagtgttgttactaaatctggaagtgacctgtgaatgtatggaatacaataaagtcttttattctggttcatttgctagtacttcctttttgattggatactgtagttcttcctctggattttattttgttcagcgtcaaggccctaattttgcaaatgtagtctaaaccacattacgtggactagaggatactctgaattagcaagttttttgtttgctgaataaaactattccatcttaa

SEQ ID NO: 2627 - protein, 1287 aa, Homo sapiens
MVPGEENQLVPKEAPLDHTSDKSLLDANFEPGKKNFLHLTDKDGEQPQILLEDSSAGEDSVHDRFIGPLPREGSGGSTSDYVSQSYSYSSILNKSETGYVGLVNQAMTCYLNSLLQTLFMTPEFRNALYKWEFEESEEDPVTSIPYQLQRLFVLLQTSKKRAIETTDVTRSFGWDSSEAWQQHDVQELCRVMFDALEQKWKQTEQADLINELYQGKLKDYVRCLECGYEGWRIDTYLDIPLVIRPYGSSQAFASVEEALHAFIQPEILDGPNQYFCERCKKKCDARKGLRFLHFPYLLTLQLKRFDFDYTTMHRIKLNDRMTFPEELDMSTFIDVEDEKSPQTESCTDSGAENEGSCHSDQMSNDFSNDDGVDEGICLETNSGTEKISKSGLEKNSLIYELFSVMVHSGSAAGGHYYACIKSFSDEQWYSFNDQHVSRITQEDIKKTHGGSSGSRGYYSSAFASSTNAYMLIYRLKDPARNAKFLEVDEYPEHIKNLVQKERELEEQEKRQREIERNTCKIKLFCLHPTKQVMMENKLEVHKDKTLKEAVEMAYKMMDLEEVIPLDCCRLVKYDEFHDYLERSYEGEEDTPMGLLLGGVKSTYMFDLLLETRKPDQVFQSYKPGEVMVKVHVVDLKAESVAAPITVRAYLNQTVTEFKQLISKAIHLPAETMRIVLERCYNDLRLLSVSSKTLKAEGFFRSNKVFVESSETLDYQMAFADSHLWKLLDRHANTIRLFVLLPEQSPVSYSKRTAYQKAGGDSGNVDDDCERVKGPVGSLKSVEAILEESTEKLKSLSLQQQQDGDNGDSSKSTETSDFENIESPLNERDSSASVDNRELEQHIQTSDPENFQSEERSDSDVNNDRSTSSVDSDILSSSHSSDTLCNADNAQIPLANGLDSHSITSSRRTKANEGKKETWDTAEEDSGTDSEYDESGKSRGEMQYMYFKAEPYAADEGSGEGHKWLMVHVDKRITLAAFKQHLEPFVGVLSSHFKVFRVYASNQEFESVRLNETLSSFSDDNKITIRLGRALKKGEYRVKVYQLLVNEQEPCKFLLDAVFAKGMTVRQSKEELIPQLREQCGLELSIDRFRLRKKTWKNPGTVFLDYHIYEEDINISSNWEVFLEVLDGVEKMKSMSQLAVLSRRWKPSEMKLDPFQEVVLESSSVDELREKLSEISGIPLDDIEFAKGRGTFPCDISVLDIHQDLDWNPKVSTLNVWPLYICDDGAVIFYRDKTEELMELTDEQRNELMKKESSRLQKTGHRVTYSPRKEKALKIYLDGAPNKDLTQD

SEQ ID NO: 2628 - DNA, 2587 bp, Homo sapiens
cgcgcctctgatcgcgttccgggacacacaggcggcggctgcgggcgcagagcggagatgcagcggcttggggccaccctgctgtgcctgctgctggcggcggcggtccccacggcccccgcgcccgctccgacggcgacctcggctccagtcaagcccggcccggctctcagctacccgcaggaggaggccaccctcaatgagatgttccgcgaggttgaggaactgatggaggacacgcagcacaaattgcgcagcgcggtggaagagatggaggcagaagaagctgctgctaaagcatcatcagaagtgaacctggcaaacttacctcccagctatcacaatgagaccaacacagacacgaaggttggaaataataccatccatgtgcaccgagaaattcacaagataaccaacaaccagactggacaaatggtcttttcagagacagttatcacatctgtgggagacgaagaaggcagaaggagccacgagtgcatcatcgacgaggactgtgggcccagcatgtactgccagtttgccagcttccagtacacctgccagccatgccggggccagaggatgctctgcacccgggacagtgagtgctgtggagaccagctgtgtgtctggggtcactgcaccaaaatggccaccaggggcagcaatgggaccatctgtgacaaccagagggactgccagccggggctgtgctgtgccttccagagaggcctgctgttccctgtgtgcacacccctgcccgtggagggcgagctttgccatgaccccgccagccggcttctggacctcatcacctgggagctagagcctgatggagccttggaccgatgcccttgtgccagtggcctcctctgccagccccacagccacagcctggtgtatgtgtgcaagccgaccttcgtggggagccgtgaccaagatggggagatcctgctgcccagagaggtccccgatgagtatgaagttggcagcttcatggaggaggtgcgccaggagctggaggacctggagaggagcctgactgaagagatggcgctgagggagcctgcggctgccgccgctgcactgctgggaggggaagagatttagatctggaccaggctgtgggtagatgtgcaatagaaatagctaatttatttccccaggtgtgtgctttaggcgtgggctgaccaggcttcttcctacatcttcttcccagtaagtttcccctctggcttgacagcatgaggtgttgtgcatttgttcagctcccccaggctgttctccaggcttcacagtctggtgcttgggagagtcaggcagggttaaactgcaggagcagtttgccacccctgtccagattattggctgctttgcctctaccagttggcagacagccgtttgttctacatggctttgataattgtttgaggggaggagatggaaacaatgtggagtctccctctgattggttttggggaaatgtggagaagagtgccctgctttgcaaacatcaacctggcaaaaatgcaacaaatgaattttccacgcagttctttccatgggcataggtaagctgtgccttcagctgttgcagatgaaatgttctgttcaccctgcattacatgtgtttattcatccagcagtgttgctcagctcctacctctgtgccagggcagcattttcatatccaagatcaattccctctctcagcacagcctggggagggggtcattgttctcctcgtccatcagggatctcagaggctcagagactgcaagctgcttgcccaagtcacacagctagtgaagaccagagcagtttcatctggttgtgactctaagctcagtgctctctccactaccccacaccagccttggtgccaccaaaagtgctccccaaaaggaaggagaatgggatttttcttttgaggcatgcacatctggaattaaggtcaaactaattctcacatccctctaaaagtaaactactgttaggaacagcagtgttctcacagtgtggggcagccgtccttctaatgaagacaatgatattgacactgtccctctttggcagttgcattagtaactttgaaaggtatatgactgagcgtagcatacaggttaacctgcagaaacagtacttaggtaattgtagggcgaggattataaatgaaatttgcaaaatcacttagcagcaactgaagacaattatcaaccacgtggagaaaatcaaaccgagcagggctgtgtgaaacatggttgtaatatgcgactgcgaacactgaactctacgccactccacaaatgatgttttcaggtgtcatggactgttgccaccatgtattcatccagagttcttaaagtttaaagttgcacatgattgtataagcatgctttctttgagttttaaattatgtataaacataagttgcatttagaaatcaagcataaatcacttcaactgctcttctgtagttcttggatttcttttcccttttgactttgaataaatgtaaaatcctttcagccagaaaaagtaaaatagaaacaacctgtattaaaaatcttccatagaaaaaaaaaaa

SEQ ID NO: 2629 - protein, 350 aa, Homo sapiens
MQRLGATLLCLLLAAAVPTAPAPAPTATSAPVKPGPALSYPQEEATLNEMFREVEELMEDTQHKLRSAVEEMEAEEAAAKASSEVNLANLPPSYHNETNTDTKVGNNTIHVHREIHKITNNQTGQMVFSETVITSVGDEEGRRSHECIIDEDCGPSMYCQFASFQYTCQPCRGQRMLCTRDSECCGDQLCVWGHCTKMATRGSNGTICDNQRDCQPGLCCAFQRGLLFPVCTPLPVEGELCHDPASRLLDLITWELEPDGALDRCPCASGLLCQPHSHSLVYVCKPTFVGSRDQDGEILLPREVPDEYEVGSFMEEVRQELEDLERSLTEEMALREPAAAAAALLGGEEI

SEQ ID NO: 2630 - DNA, 2755 bp, Homo sapiens
ggcggagagggagcctggtgggcgggcggggcgcgtcttgcgggctccctcgggtaccggcgctgccgcaccccgccgcgctcccgcacccgcggcccgcccaccgcgccgctcccgcatctgcacccgcagcccggcggcctcccggcgggagcgagcagatccagtccggcccgcagcgcaactcggtccagtcggggcggcggctgcgggcgcagagcggagatgcagcggcttggggccaccctgctgtgcctgctgctggcggcggcggtccccacggcccccgcgcccgctccgacggcgacctcggctccagtcaagcccggcccggctctcagctacccgcaggaggaggccaccctcaatgagatgttccgcgaggttgaggaactgatggaggacacgcagcacaaattgcgcagcgcggtggaagagatggaggcagaagaagctgctgctaaagcatcatcagaagtgaacctggcaaacttacctcccagctatcacaatgagaccaacacagacacgaaggttggaaataataccatccatgtgcaccgagaaattcacaagataaccaacaaccagactggacaaatggtcttttcagagacagttatcacatctgtgggagacgaagaaggcagaaggagccacgagtgcatcatcgacgaggactgtgggcccagcatgtactgccagtttgccagcttccagtacacctgccagccatgccggggccagaggatgctctgcacccgggacagtgagtgctgtggagaccagctgtgtgtctggggtcactgcaccaaaatggccaccaggggcagcaatgggaccatctgtgacaaccagagggactgccagccggggctgtgctgtgccttccagagaggcctgctgttccctgtgtgcacacccctgcccgtggagggcgagctttgccatgaccccgccagccggcttctggacctcatcacctgggagctagagcctgatggagccttggaccgatgcccttgtgccagtggcctcctctgccagccccacagccacagcctggtgtatgtgtgcaagccgaccttcgtggggagccgtgaccaagatggggagatcctgctgcccagagaggtccccgatgagtatgaagttggcagcttcatggaggaggtgcgccaggagctggaggacctggagaggagcctgactgaagagatggcgctgagggagcctgcggctgccgccgctgcactgctgggaggggaagagatttagatctggaccaggctgtgggtagatgtgcaatagaaatagctaatttatttccccaggtgtgtgctttaggcgtgggctgaccaggcttcttcctacatcttcttcccagtaagtttcccctctggcttgacagcatgaggtgttgtgcatttgttcagctcccccaggctgttctccaggcttcacagtctggtgcttgggagagtcaggcagggttaaactgcaggagcagtttgccacccctgtccagattattggctgctttgcctctaccagttggcagacagccgtttgttctacatggctttgataattgtttgaggggaggagatggaaacaatgtggagtctccctctgattggttttggggaaatgtggagaagagtgccctgctttgcaaacatcaacctggcaaaaatgcaacaaatgaattttccacgcagttctttccatgggcataggtaagctgtgccttcagctgttgcagatgaaatgttctgttcaccctgcattacatgtgtttattcatccagcagtgttgctcagctcctacctctgtgccagggcagcattttcatatccaagatcaattccctctctcagcacagcctggggagggggtcattgttctcctcgtccatcagggatctcagaggctcagagactgcaagctgcttgcccaagtcacacagctagtgaagaccagagcagtttcatctggttgtgactctaagctcagtgctctctccactaccccacaccagccttggtgccaccaaaagtgctccccaaaaggaaggagaatgggatttttcttttgaggcatgcacatctggaattaaggtcaaactaattctcacatccctctaaaagtaaactactgttaggaacagcagtgttctcacagtgtggggcagccgtccttctaatgaagacaatgatattgacactgtccctctttggcagttgcattagtaactttgaaaggtatatgactgagcgtagcatacaggttaacctgcagaaacagtacttaggtaattgtagggcgaggattataaatgaaatttgcaaaatcacttagcagcaactgaagacaattatcaaccacgtggagaaaatcaaaccgagcagggctgtgtgaaacatggttgtaatatgcgactgcgaacactgaactctacgccactccacaaatgatgttttcaggtgtcatggactgttgccaccatgtattcatccagagttcttaaagtttaaagttgcacatgattgtataagcatgctttctttgagttttaaattatgtataaacataagttgcatttagaaatcaagcataaatcacttcaactgctcttctgtagttcttggatttcttttcccttttgactttgaataaatgtaaaatcctttcagccagaaaaagtaaaatagaaacaacctgtattaaaaatcttccatagaaaaaaaaaaa

SEQ ID NO: 2631 - protein, 350 aa, Homo sapiens; identical to SEQ ID NO: 2629

SEQ ID NO: 2632 - DNA, 2769 bp, Homo sapiens
cgacgccaaggggagggggctgacctgtgcttggtccaccccaggtaggggctgagagaggcttgaggtggaagtgggggtcgggcactctgacctggtcgaggaggggctagggtttgaaccggggacagagtctaggtgagctggggcttgggagctattagcgtagaggatccgggttcggttgctctggcgagggctccagcatcacaggcggcggctgcgggcgcagagcggagatgcagcggcttggggccaccctgctgtgcctgctgctggcggcggcggtccccacggcccccgcgcccgctccgacggcgacctcggctccagtcaagcccggcccggctctcagctacccgcaggaggaggccaccctcaatgagatgttccgcgaggttgaggaactgatggaggacacgcagcacaaattgcgcagcgcggtggaagagatggaggcagaagaagctgctgctaaagcatcatcagaagtgaacctggcaaacttacctcccagctatcacaatgagaccaacacagacacgaaggttggaaataataccatccatgtgcaccgagaaattcacaagataaccaacaaccagactggacaaatggtcttttcagagacagttatcacatctgtgggagacgaagaaggcagaaggagccacgagtgcatcatcgacgaggactgtgggcccagcatgtactgccagtttgccagcttccagtacacctgccagccatgccggggccagaggatgctctgcacccgggacagtgagtgctgtggagaccagctgtgtgtctggggtcactgcaccaaaatggccaccaggggcagcaatgggaccatctgtgacaaccagagggactgccagccggggctgtgctgtgccttccagagaggcctgctgttccctgtgtgcacacccctgcccgtggagggcgagctttgccatgaccccgccagccggcttctggacctcatcacctgggagctagagcctgatggagccttggaccgatgcccttgtgccagtggcctcctctgccagccccacagccacagcctggtgtatgtgtgcaagccgaccttcgtggggagccgtgaccaagatggggagatcctgctgcccagagaggtccccgatgagtatgaagttggcagcttcatggaggaggtgcgccaggagctggaggacctggagaggagcctgactgaagagatggcgctgagggagcctgcggctgccgccgctgcactgctgggaggggaagagatttagatctggaccaggctgtgggtagatgtgcaatagaaatagctaatttatttccccaggtgtgtgctttaggcgtgggctgaccaggcttcttcctacatcttcttcccagtaagtttcccctctggcttgacagcatgaggtgttgtgcatttgttcagctcccccaggctgttctccaggcttcacagtctggtgcttgggagagtcaggcagggttaaactgcaggagcagtttgccacccctgtccagattattggctgctttgcctctaccagttggcagacagccgtttgttctacatggctttgataattgtttgaggggaggagatggaaacaatgtggagtctccctctgattggttttggggaaatgtggagaagagtgccctgctttgcaaacatcaacctggcaaaaatgcaacaaatgaattttccacgcagttctttccatgggcataggtaagctgtgccttcagctgttgcagatgaaatgttctgttcaccctgcattacatgtgtttattcatccagcagtgttgctcagctcctacctctgtgccagggcagcattttcatatccaagatcaattccctctctcagcacagcctggggagggggtcattgttctcctcgtccatcagggatctcagaggctcagagactgcaagctgcttgcccaagtcacacagctagtgaagaccagagcagtttcatctggttgtgactctaagctcagtgctctctccactaccccacaccagccttggtgccaccaaaagtgctccccaaaaggaaggagaatgggatttttcttttgaggcatgcacatctggaattaaggtcaaactaattctcacatccctctaaaagtaaactactgttaggaacagcagtgttctcacagtgtggggcagccgtccttctaatgaagacaatgatattgacactgtccctctttggcagttgcattagtaactttgaaaggtatatgactgagcgtagcatacaggttaacctgcagaaacagtacttaggtaattgtagggcgaggattataaatgaaatttgcaaaatcacttagcagcaactgaagacaattatcaaccacgtggagaaaatcaaaccgagcagggctgtgtgaaacatggttgtaatatgcgactgcgaacactgaactctacgccactccacaaatgatgttttcaggtgtcatggactgttgccaccatgtattcatccagagttcttaaagtttaaagttgcacatgattgtataagcatgctttctttgagttttaaattatgtataaacataagttgcatttagaaatcaagcataaatcacttcaactgctcttctgtagttcttggatttcttttcccttttgactttgaataaatgtaaaatcctttcagccagaaaaagtaaaatagaaacaacctgtattaaaaatcttccatagaaaaaaaaaaa

SEQ ID NO: 2633 - protein, 350 aa, Homo sapiens; identical to SEQ ID NO: 2629

SEQ ID NO: 2634 - DNA, 8192 bp, Homo sapiens
aggaggaaatttgcaagaggcggcagcccctgagcgcccagagctcttgaaaggccacccaggagaggtgtgagacccggcggcagcatccgtccaggtgggacccgctgagcgccgtggccagtcccccattcccatcccggcaccccaaaggcgcgctcgcccgattgcttcgagttccccgacctggggattttttttttagccgctggtggtgggcgcctcgtgggctaaggcccggcgcctgctctgctacccgcgctgcctttagcggtcgcccccgccgccgctgccagggacgtgctgggaaagcccaagccccgggagaagatgccggccatcctggtcgcctccaaaatgaagtcgggactgcccaaacccgtgcacagcgccgcgcccatcctgcacgtgcccccggcccgggcgggcccccagccctgctacctgaagttgggaagcaaggtggaggtgagcaagaccacctatcctagccagatccccctgaaatcgcaggtgctgcaggggctgcaggagccagcgggggaggggctcccgctgcggaagagcggctcggtggaaaacgggttcgatacccagatctacacagactgggccaatcattacctagccaaatccggccacaagcgtctcatcagggatctccagcaagatgtgacagatggcgtcctcctggcccagattatccaggttgtggcaaatgaaaagattgaagacatcaatggctgtccgaagaacagatcccaaatgattgaaaacatagatgcctgcttgaatttcctggcagctaagggaataaacatccaggggctgtctgcagaagagatcaggaatggaaacctcaaggccattctaggcctcttcttcagcctctcccgatacaagcagcagcagcagcagccccagaagcagcacctctcctcacctctgccgcccgccgtatcccaggtggccggggccccctcccagtgccaggctggcacccctcagcagcaggtgccagtcactccccaagccccgtgccagcctcaccagccagcgccacatcagcagtcaaaagcacaagctgaaatgcagtccagacttccaggtcctaccgcgagggtatccgctgcaggcagcgaggccaaaacacgcggagggtcaactactgctaacaaccgacgcagccagagctttaacaactatgataaatccaaaccagtcacctccccacccccaccgccaagcagccacgagaaagagcctttggcaagttcagcctcctcccaccccggaatgagtgacaatgcacctgcttccttggagagcggcagcagctccacccctactaattgcagtacctcctcggccatcccgcagcccggtgcagccaccaagccttggcgcagcaaatccctcagcgtgaagcacagtgccacggtatccatgctctcggtcaagcctcctgggcctgaggcccccaggcccacacctgaagccatgaagccggcccccaacaatcagaagtccatgctggaaaagctgaaacttttcaacagtaaagggggctcaaaggcaggtgaggggccggggtcccgggacacaagctgtgagcggctggagactctgcccagcttcgaagagagcgaggagctggaggccgccagtcgcatgctcaccaccgtgggccctgcttccagcagccccaagattgcactcaagggcattgcccagaggacttttagccgggcactgaccaacaagaagagttctctgaaaggcaatgagaaagagaaggagaaacaacagcgggagaaggataaggagaaaagcaaggaccttgccaagagagcctctgtgacggagaggctggacctcaaggaggagccaaaagaagaccccagtggagcagctgtgcccgagatgccaaaaaagtcctccaagattgccagcttcatccccaaaggggggaagctcaacagtgccaagaaggagcccatggccccttcccacagtggaataccaaaaccaggaatgaagagcatgcccgggaaatccccaagtgccccagcgccttccaaggaaggggagcggagccggagtgggaagctgagctcaggactcccccagcagaagccccagctggacggcagacactccagttcctcttccagcctggcgtcctcagaaggaaaaggcccaggagggaccaccctgaaccacagcatcagcagccagactgtcagtgggtctgtcgggaccacccagaccacaggaagcaataccgtcagtgttcagctacctcagccccagcagcaatacaaccatcccaacactgccacggttgcacctttcctgtacaggtctcagacggacactgaagggaatgttactgccgagtcaagctcaacaggtgtgagcgtggagcccagccacttcaccaagactggacagcctgctctggaagaactcactggggaagatcctgaggctcggcggctgcggacagtgaagaacatcgctgatctgcggcagaatttggaggaaaccatgtccagtttaaggggaactcaggttacacacagcacattggaaaccacgtttgacaccaatgtcaccacggagatgagtggccgtagcatactcagcttgacagggaggcccacacctctgtcctggagactgggccagtccagccctcggctccaagcaggagacgccccctcaatgggcaatgggtatccccctcgagccaacgccagcaggttcatcaacactgagtcaggtcgctatgtgtactccgcccctctgagaaggcagctggcctcccggggcagtagtgtctgccatgtggacgtctcagacaaggcaggagatgagatggacctggaaggcatcagcatggacgcccccggctacatgagcgatggggatgttctgagcaagaacatccggaccgatgacattacaagcggatacatgactgatggtggacttggcctctatacccgtcgcctgaaccggctccctgatgggatggctgtggtacgggagaccctgcaacgaaatacctccctgggcctcggagacgctgacagctgggacgacagcagctccgtcagcagcggcatcagcgacaccatagacaacctcagcactgatgacatcaacaccagctcctccatcagctcttatgccaacacacctgcctcctctcgaaaaaacctggatgtgcagactgatgctgagaagcactcacaggtggagaggaattccctgtggtctggtgatgatgtcaagaaatcagacggaggctcagacagcggcataaaaatggagccaggttccaagtggaggcggaatccttctgatgtgtctgacgagtccgacaaaagcacgtcgggcaagaagaatcctgtcatctcccagacaggctcatggcggcgaggcatgacagctcaggtgggcatcaccatgccaaggacgaagccttcagccccggcaggcgcactgaagaccccaggaactggaaaaacagacgacgcaaaggtgtctgagaaaggaaggctttctcctaaagcctcccaggtgaagcgctccccatcagatgcaggccggagcagtggtgacgaatccaaaaagcccctccccagcagctctaggacacctactgccaatgccaacagctttgggttcaagaagcagagtggttccgccgccggcctggccatgatcacagccagcggggtgactgtcaccagcaggtcagccacactgggcaaaatcccaaagtcatctgcactcgtcagtcggtctgctggtcggaagtcaagtatggatggggctcagaatcaggatgacgggtatctagccctaagctcccggacaaaccttcagtaccggagtttgccgaggcccagtaagtccaacagccggaacggggctgggaacaggtctagcaccagcagcatagattccaacattagcagcaagtccgcaggcctgccagtgcccaaactgagggagccttccaaaacagccctaggcagctctctaccaggtctggtcaaccaaacagacaaggagaaaggcatctcatcagacaacgagagtgtggcttcctgtaactcggtgaaagtgaatccggcagcccagcctgtgtccagtccggctcagaccagtctccagcctggagccaagtacccagatgtggcctctcccacactccgcagactctttggtgggaagcctaccaagcaagtgcccatcgccacagctgaaaacatgaaaaattcggtggtcatctccaatcctcatgccaccatgactcagcaaggtaacctagactccccgtcaggcagtggcgtcctgagcagtgggagcagcagtcctctctacagcaagaatgtggacctcaaccagtctccgctagcctccagccccagctcagcccactcggccccttccaacagcctcacctggggcaccaacgccagcagctcctccgcagttagcaaggatggcctgggctttcagtctgtcagcagcctccacaccagctgtgagtccatcgacatctccctcagcagtggaggggtccccagccacaattcttccactggcctcatcgcctcctccaaggacgactccttgactccctttgtcagaactaacagtgtgaagaccacactgtcagaaagccctctctcttcccctgctgctagccctaagttctgcagaagtactctgcccaggaaacaggacagtgacccgcaccttgataggaacactttgcctaagaaaggactcaggtatactcccacctcccagcttcgcacgcaagaagatgcaaaagaatggttacggtcccattctgcaggaggccttcaggacaccgctgccaattcccccttttcctctggctccagcgtgacttctccctccggaacaagattcaacttttcccagcttgcgagtcccaccactgtcacccagatgagcttgtccaacccgaccatgctgaggactcacagcctctccaatgctgatgggcagtatgatccatacactgacagccgcttccggaatagctccatgtccctggatgagaagagcagaaccatgagccgttcaggctcattccgggatgggtttgaagaagttcatggatcctcactctccttggtttccagcacatcgtcagtttattctacaccagaagaaaaatgccagtcagagattcgcaagctgcggcgggaactggatgcctcccaggagaaagtttcagctttgaccacccagctgacagcaaatgctcaccttgtggcagcctttgaacagagtcttggtaacatgacaatcaggctccagagtctgaccatgacagctgagcagaaggactcagaactgaatgagttaagaaaaaccattgagctgctaaagaaacagaacgcagctgcccaggctgccattaatggagtaattaacacacctgagctcaactgcaaaggaaacggcactgcccagtctgcagacctccgcatccgcaggcagcactcctcagacagcgtctccagcatcaacagtgccaccagccactccagcgtgggcagcaacatagagagtgactcaaagaagaagaagcggaagaactggttacgcagctccttcaagcaagctttcgggaagaagaagtccccaaaatctgcgtcctctcattcagatattgaggagatgacggattcttctttgccttcctcaccaaagttaccgcacaatgggtccacaggttccaccccactgctgaggaattctcactccaactctctaatttcagaatgcatggatagtgaagctgagaccgtcatgcagctccgaaatgagttaagagacaaggagatgaagctgacggatatccgcttagaagctctcagttctgcccaccagctggaccagctccgggaggccatgaacaggatgcagagtgaaatagagaagctgaaagctgagaatgatcggctgaagtcagagtctcaaggcagtggctgcagccgggctccttcccaagtgtccatctctgcctccccgaggcagtccatgggcctctcccagcacagcttgaacctcactgagtcaaccagcctggacatgttgctggatgacactggtgaatgctcggctcggaaggaaggaggcaggcatgttaagatagttgtcagctttcaggaggaaatgaagtggaaggaggattccagaccacatctctttcttattggctgcattggagttagtggcaagacgaagtgggatgtgctcgatggggtggttagacggctgttcaaagaatacatcattcatgtcgacccagtgagtcagctagggctgaattcagacagcgttcttggctacagcattggagaaatcaagcgcagcaacacttccgaaacaccggagctgcttccttgtggctatctggttggagagaacacgaccatctcagtgactgtgaaagggctcgcagaaaacagcctggactcactggtgtttgagtccttgattcccaagcccatcctgcagcgctacgtctccctcctgatagagcaccgtcggatcattctctctggccccagcggcactgggaaaacctacctggccaaccggctgtctgagtatatagtgcttcgagagggacgggagttgacagacggggttatcgccacctttaacgtggaccataagtccagcaaggaattgcgccagtacctgtccaaccttgctgaccagtgcaacagtgagaacaatgctgtggacatgcccctcgtcatcatcctggacaacctacaccacgtgagctctctgggcgagatcttcaatgggctgctcaactgcaagtaccacaaatgcccttacataattggcacaatgaaccaggctacctcttcgactcccaacctgcagcttcaccataacttcagatgggtgctttgtgccaaccacacggagcctgtgaagggtttccttggccgattcctgaggaggaagctcatggaaacagagatcagtgggcgggtgcgcaatatggagctggtaaaaatcattgactggattcccaaggtctggcatcacctcaaccgcttcctggaggctcacagttcctcggacgtcaccatcggcccccggctcttcctgtcatgccccatcgatgtggacggctcgagagtgtggttcaccgacttgtggaactattccattatcccctatctcctggaagccgtcagagaaggactccagctctatggaaggcgcgccccctgggaggatcctgccaagtgggtgatggacacatatccatgggcagccagcccacaacagcacgagtggcctcccctgctgcagttacggcctgaggatgtcggcttcgacggctactccatgcctcgggagggatcgacaagcaagcagatgccccccagtgatgctgaaggtgacccgctgatgaacatgctgatgaggctgcaggaggcagccaactactccagcccccagagctatgacagcgactccaacagcaacagccatcacgatgacatcttggactcctctttggagtccactctgtgacaggggcccggagcccagcgccctcctcttctcctcaccgcattccacctgcatcccccacatcaccctgaagatgacttcctgagccagcccccagccacagccttagagctgcgggaacaccgagaccccccgtccttcagcctcgacctgggtgcaggcatcccgggccagctgcctgcggaccgcttccttccacagcgagaactgcactaccttctgttgtactttaattattgttttgccttgttgctgtgacctccctaagacactgaagatacttctcgggaaaggatcatcgccgttgaaatgaaaagagagacagagagaaaaaaaaaaagagaacccacatgaagctctgaaaccaaacagcatcctgccatgagcttcccagagacagaagagactggagcaaagtcggaaacacagagaagcacggcttcccctcagcacagaccctccagactgggtctcagagccgtgccacccaccctcccacacagccggccacagggagaactggtgctaaccagggtgcttgctttggtcacgttcaacgcactacagagcta

SEQ ID NO: 2635 - protein, 2429 aa, Homo sapiens
MPAILVASKMKSGLPKPVHSAAPILHVPPARAGPQPCYLKLGSKVEVSKTTYPSQIPLKSQVLQGLQEPAGEGLPLRKSGSVENGFDTQIYTDWANHYLAKSGHKRLIRDLQQDVTDGVLLAQIIQVVANEKIEDINGCPKNRSQMIENIDACLNFLAAKGINIQGLSAEEIRNGNLKAILGLFFSLSRYKQQQQQPQKQHLSSPLPPAVSQVAGAPSQCQAGTPQQQVPVTPQAPCQPHQPAPHQQSKAQAEMQSRLPGPTARVSAAGSEAKTRGGSTTANNRRSQSFNNYDKSKPVTSPPPPPSSHEKEPLASSASSHPGMSDNAPASLESGSSSTPTNCSTSSAIPQPGAATKPWRSKSLSVKHSATVSMLSVKPPGPEAPRPTPEAMKPAPNNQKSMLEKLKLFNSKGGSKAGEGPGSRDTSCERLETLPSFEESEELEAASRMLTTVGPASSSPKIALKGIAQRTFSRALTNKKSSLKGNEKEKEKQQREKDKEKSKDLAKRASVTERLDLKEEPKEDPSGAAVPEMPKKSSKIASFIPKGGKLNSAKKEPMAPSHSGIPKPGMKSMPGKSPSAPAPSKEGERSRSGKLSSGLPQQKPQLDGRHSSSSSSLASSEGKGPGGTTLNHSISSQTVSGSVGTTQTTGSNTVSVQLPQPQQQYNHPNTATVAPFLYRSQTDTEGNVTAESSSTGVSVEPSHFTKTGQPALEELTGEDPEARRLRTVKNIADLRQNLEETMSSLRGTQVTHSTLETTFDTNVTTEMSGRSILSLTGRPTPLSWRLGQSSPRLQAGDAPSMGNGYPPRANASRFINTESGRYVYSAPLRRQLASRGSSVCHVDVSDKAGDEMDLEGISMDAPGYMSDGDVLSKNIRTDDITSGYMTDGGLGLYTRRLNRLPDGMAVVRETLQRNTSLGLGDADSWDDSSSVSSGISDTIDNLSTDDINTSSSISSYANTPASSRKNLDVQTDAEKHSQVERNSLWSGDDVKKSDGGSDSGIKMEPGSKWRRNPSDVSDESDKSTSGKKNPVISQTGSWRRGMTAQVGITMPRTKPSAPAGALKTPGTGKTDDAKVSEKGRLSPKASQVKRSPSDAGRSSGDESKKPLPSSSRTPTANANSFGFKKQSGSAAGLAMITASGVTVTSRSATLGKIPKSSALVSRSAGRKSSMDGAQNQDDGYLALSSRTNLQYRSLPRPSKSNSRNGAGNRSSTSSIDSNISSKSAGLPVPKLREPSKTALGSSLPGLVNQTDKEKGISSDNESVASCNSVKVNPAAQPVSSPAQTSLQPGAKYPDVASPTLRRLFGGKPTKQVPIATAENMKNSVVISNPHATMTQQGNLDSPSGSGVLSSGSSSPLYSKNVDLNQSPLASSPSSAHSAPSNSLTWGTNASSSSAVSKDGLGFQSVSSLHTSCESIDISLSSGGVPSHNSSTGLIASSKDDSLTPFVRTNSVKTTLSESPLSSPAASPKFCRSTLPRKQDSDPHLDRNTLPKKGLRYTPTSQLRTQEDAKEWLRSHSAGGLQDTAANSPFSSGSSVTSPSGTRFNFSQLASPTTVTQMSLSNPTMLRTHSLSNADGQYDPYTDSRFRNSSMSLDEKSRTMSRSGSFRDGFEEVHGSSLSLVSSTSSVYSTPEEKCQSEIRKLRRELDASQEKVSALTTQLTANAHLVAAFEQSLGNMTIRLQSLTMTAEQKDSELNELRKTIELLKKQNAAAQAAINGVINTPELNCKGNGTAQSADLRIRRQHSSDSVSSINSATSHSSVGSNIESDSKKKKRKNWLRSSFKQAFGKKKSPKSASSHSDIEEMTDSSLPSSPKLPHNGSTGSTPLLRNSHSNSLISECMDSEAETVMQLRNELRDKEMKLTDIRLEALSSAHQLDQLREAMNRMQSEIEKLKAENDRLKSESQGSGCSRAPSQVSISASPRQSMGLSQHSLNLTESTSLDMLLDDTGECSARKEGGRHVKIVVSFQEEMKWKEDSRPHLFLIGCIGVSGKTKWDVLDGVVRRLFKEYIIHVDPVSQLGLNSDSVLGYSIGEIKRSNTSETPELLPCGYLVGENTTISVTVKGLAENSLDSLVFESLIPKPILQRYVSLLIEHRRIILSGPSGTGKTYLANRLSEYIVLREGRELTDGVIATFNVDHKSSKELRQYLSNLADQCNSENNAVDMPLVIILDNLHHVSSLGEIFNGLLNCKYHKCPYIIGTMNQATSSTPNLQLHHNFRWVLCANHTEPVKGFLGRFLRRKLMETEISGRVRNMELVKIIDWIPKVWHHLNRFLEAHSSSDVTIGPRLFLSCPIDVDGSRVWFTDLWNYSIIPYLLEAVREGLQLYGRRAPWEDPAKWVMDTYPWAASPQQHEWPPLLQLRPEDVGFDGYSMPREGSTSKQMPPSDAEGDPLMNMLMRLQEAANYSSPQSYDSDSNSNSHHDDILDSSLESTL

SEQ ID NO: 2636 - DNA, 8192 bp, Homo sapiens
aggaggaaatttgcaagaggcggcagcccctgagcgcccagagctcttgaaaggccacccaggagaggtgtgagacccggcggcagcatccgtccaggtgggacccgctgagcgccgtggccagtcccccattcccatcccggcaccccaaaggcgcgctcgcccgattgcttcgagttccccgacctggggattttttttttagccgctggtggtgggcgcctcgtgggctaaggcccggcgcctgctctgctacccgcgctgcctttagcggtcgcccccgccgccgctgccagggacgtgctgggaaagcccaagccccgggagaagatgccggccatcctggtcgcctccaaaatgaagtcgggactgcccaaacccgtgcacagcgccgcgcccatcctgcacgtgcccccggcccgggcgggcccccagccctgctacctgaagttgggaagcaaggtggaggtgagcaagaccacctatcctagccagatccccctgaaatcgcaggtgctgcaggggctgcaggagccagcgggggaggggctcccgctgcggaagagcggctcggtggaaaacgggttcgatacccagatctacacagactgggccaatcattacctagccaaatccggccacaagcgtctcatcagggatctccagcaagatgtgacagatggcgtcctcctggcccagattatccaggttgtggcaaatgaaaagattgaagacatcaatggctgtccgaagaacagatcccaaatgattgaaaacatagatgcctgcttgaatttcctggcagctaagggaataaacatccaggggctgtctgcagaagagatcaggaatggaaacctcaaggccattctaggcctcttcttcagcctctcccgatacaagcagcagcagcagcagccccagaagcagcacctctcctcacctctgccgcccgccgtatcccaggtggccggggccccctcccagtgccaggctggcacccctcagcagcaggtgccagtcactccccaagccccgtgccagcctcaccagccagcgccacatcagcagtcaaaagcacaagctgaaatgcagtccagtgcatcatccaaggactcatctcaaagcaaaatcatccgcttcactctgggtcagaaaaagatctctagacttccaggtcctaccgcgagggtatccgctgcaggcagcgaggccaaaacacgcggagggtcaactactgctaacaaccgacgcagccagagctttaacaactatgataaatccaaaccagtcacctccccacccccaccgccaagcagccacgagaaagagcctttggcaagttcagcctcctcccaccccggaatgagtgacaatgcacctgcttccttggagagcggcagcagctccacccctactaattgcagtacctcctcggccatcccgcagcccggtgcagccaccaagccttggcgcagcaaatccctcagcgtgaagcacagtgccacggtatccatgctctcggtcaagcctcctgggcctgaggcccccaggcccacacctgaagccatgaagccggcccccaacaatcagaagtccatgctggaaaagctgaaacttttcaacagtaaagggggctcaaaggcaggtgaggggccggggtcccgggacacaagctgtgagcggctggagactctgcccagcttcgaagagagcgaggagctggaggccgccagtcgcatgctcaccaccgtgggccctgcttccagcagccccaagattgcactcaagggcattgcccagaggacttttagccgggcactgaccaacaagaagagttctctgaaaggcaatgagaaagagaaggagaaacaacagcgggagaaggataaggagaaaagcaaggaccttgccaagagagcctctgtgacggagaggctggacctcaaggaggagccaaaagaagaccccagtggagcagctgtgcccgagatgccaaaaaagtcctccaagattgccagcttcatccccaaaggggggaagctcaacagtgccaagaaggagcccatggccccttcccacagtggaataccaaaaccaggaatgaagagcatgcccgggaaatccccaagtgccccagcgccttccaaggaaggggagcggagccggagtgggaagctgagctcaggactcccccagcagaagccccagctggacggcagacactccagttcctcttccagcctggcgtcctcagaaggaaaaggcccaggagggaccaccctgaaccacagcatcagcagccagactgtcagtgggtctgtcgggaccacccagaccacaggaagcaataccgtcagtgttcagctacctcagccccagcagcaatacaaccatcccaacactgccacggttgcacctttcctgtacaggtctcagacggacactgaagggaatgttactgccgagtcaagctcaacaggtgtgagcgtggagcccagccacttcaccaagactggacagcctgctctggaagaactcactggggaagatcctgaggctcggcggctgcggacagtgaagaacatcgctgatctgcggcagaatttggaggaaaccatgtccagtttaaggggaactcaggttacacacagcacattggaaaccacgtttgacaccaatgtcaccacggagatgagtggccgtagcatactcagcttgacagggaggcccacacctctgtcctggagactgggccagtccagccctcggctccaagcaggagacgccccctcaatgggcaatgggtatccccctcgagccaacgccagcaggttcatcaacactgagtcaggtcgctatgtgtactccgcccctctgagaaggcagctggcctcccggggcagtagtgtctgccatgtggacgtctcagacaaggcaggagatgagatggacctggaaggcatcagcatggacgcccccggctacatgagcgatggggatgttctgagcaagaacatccggaccgatgacattacaagcggatacatgactgatggtggacttggcctctatacccgtcgcctgaaccggctccctgatgggatggctgtggtacgggagaccctgcaacgaaatacctccctgggcctcggagacgctgacagctgggacgacagcagctccgtcagcagcggcatcagcgacaccatagacaacctcagcactgatgacatcaacaccagctcctccatcagctcttatgccaacacacctgcctcctctcgaaaaaacctggatgtgcagactgatgctgagaagcactcacaggtggagaggaattccctgtggtctggtgatgatgtcaagaaatcagacggaggctcagacagcggcataaaaatggagccaggttccaagtggaggcggaatccttctgatgtgtctgacgagtccgacaaaagcacgtcgggcaagaagaatcctgtcatctcccagacaggctcatggcggcgaggcatgacagctcaggtgggcatcaccatgccaaggacgaagccttcagccccggcaggcgcactgaagaccccaggaactggaaaaacagacgacgcaaaggtgtctgagaaaggaaggctttctcctaaagcctcccaggtgaagcgctccccatcagatgcaggccggagcagtggtgacgaatccaaaaagcccctccccagcagctctaggacacctactgccaatgccaacagctttgggttcaagaagcagagtggttccgccgccggcctggccatgatcacagccagcggggtgactgtcaccagcaggtcagccacactgggcaaaatcccaaagtcatctgcactcgtcagtcggtctgctggtcggaagtcaagtatggatggggctcagaatcaggatgacgggtatctagccctaagctcccggacaaaccttcagtaccggagtttgccgaggcccagtaagtccaacagccggaacggggctgggaacaggtctagcaccagcagcatagattccaacattagcagcaagtccgcaggcctgccagtgcccaaactgagggagccttccaaaacagccctaggcagctctctaccaggtctggtcaaccaaacagacaaggagaaaggcatctcatcagacaacgagagtgtggcttcctgtaactcggtgaaagtgaatccggcagcccagcctgtgtccagtccggctcagaccagtctccagcctggagccaagtacccagatgtggcctctcccacactccgcagactctttggtgggaagcctaccaagcaagtgcccatcgccacagctgaaaacatgaaaaattcggtggtcatctccaatcctcatgccaccatgactcagcaaggtaacctagactccccgtcaggcagtggcgtcctgagcagtgggagcagcagtcctctctacagcaagaatgtggacctcaaccagtctccgctagcctccagccccagctcagcccactcggccccttccaacagcctcacctggggcaccaacgccagcagctcctccgcagttagcaaggatggcctgggctttcagtctgtcagcagcctccacaccagctgtgagtccatcgacatctccctcagcagtggaggggtccccagccacaattcttccactggcctcatcgcctcctccaaggacgactccttgactccctttgtcagaactaacagtgtgaagaccacactgtcagaaagccctctctcttcccctgctgctagccctaagttctgcagaagtactctgcccaggaaacaggacagtgacccgcaccttgataggaacactttgcctaagaaaggactcaggtatactcccacctcccagcttcgcacgcaagaagatgcaaaagaatggttacggtcccattctgcaggaggccttcaggacaccgctgccaattcccccttttcctctggctccagcgtgacttctccctccggaacaagattcaacttttcccagcttgcgagtcccaccactgtcacccagatgagcttgtccaacccgaccatgctgaggactcacagcctctccaatgctgatgggcagtatgatccatacactgacagccgcttccggaatagctccatgtccctggatgagaagagcagaaccatgagccgttcaggctcattccgggatgggtttgaagaagaatcatgggagaaaagttctgtggacaactttgtcagccgtcttcacagctcacttcatttctctcttcctttgttccatcacgcaaggtatgagttagttcatggatcctcactctccttggtttccagcacatcgtcagtttattctacaccagaagaaaaatgccagtcagagattcgcaagctgcggcgggaactggatgcctcccaggagaaagtttcagctttgaccacccagctgacagcaaatgctcaccttgtggcagcctttgaacagagtcttggtaacatgacaatcaggctccagagtctgaccatgacagctgagcagaaggactcagaactgaatgagttaagaaaaaccattgagctgctaaagaaacagaacgcagctgcccaggctgccattaatggagtaattaacacacctgagctcaactgcaaaggaaacggcactgcccagtctgcagacctccgcatccgcaggcagcactcctcagacagcgtctccagcatcaacagtgccaccagccactccagcgtgggcagcaacatagagagtgactcaaagaagaagaagcggaagaactgggtcaatgagttacgcagctccttcaagcaagctttcgggaagaagaagtccccaaaatctgcgtcctctcattcagatattgaggagatgacggattcttctttgccttcctcaccaaagttaccgcacaatgggtccacaggttccaccccactgctgaggaattctcactccaactctctaatttcagaatgcatggatagtgaagctgagaccgtcatgcagctccgaaatgagttaagagacaaggagatgaagctgacggatatccgcttagaagctctcagttctgcccaccagctggaccagctccgggaggccatgaacaggatgcagagtgaaatagagaagctgaaagctgagaatgatcggctgaagtcagagtctcaaggcagtggctgcagccgggctccttcccaagtgtccatctctgcctccccgaggcagtccatgggcctctcccagcacagcttgaacctcactgagtcaaccagcctggacatgttgctggatgacactggtgaatgctcggctcggaaggaaggaggcaggcatgttaagatagttgtcagctttcaggaggaaatgaagtggaaggaggattccagaccacatctctttcttattggctgcattggagttagtggcaagacgaagtgggatgtgctcgatggggtggttagacggctgttcaaagaatacatcattcatgtcgacccagtgagtcagctagggctgaattcagacagcgttcttggctacagcattggagaaatcaagcgcagcaacacttccgaaacaccggagctgcttccttgtggctatctggttggagagaacacgaccatctcagtgactgtgaaagggctcgcagaaaacagcctggactcactggtgtttgagtccttgattcccaagcccatcctgcagcgctacgtctccctcctgatagagcaccgtcggatcattctctctggccccagcggcactgggaaaacctacctggccaaccggctgtctgagtatatagtgcttcgagagggacgggagttgacagacggggttatcgccacctttaacgtggaccataagtccagcaaggaattgcgccagtacctgtccaaccttgctgaccagtgcaacagtgagaacaatgctgtggacatgcccctcgtcatcatcctggacaacctacaccacgtgagctctctgggcgagatcttcaatgggctgctcaactgcaagtaccacaaatgcccttacataattggcacaatgaaccaggctacctcttcgactcccaacctgcagcttcaccataacttcagatgggtgctttgtgccaaccacacggagcctgtgaagggtttccttggccgattcctgaggaggaagctcatggaaacagagatcagtgggcgggtgcgcaatatggagctggtaaaaatcattgactggattcccaaggtctggcatcacctcaaccgcttcctggaggctcacagttcctcggacgtcaccatcggcccccggctcttcctgtcatgccccatcgatgtggacggctcgagagtgtggttcaccgacttgtggaactattccattatcccctatctcctggaagccgtcagagaaggactccagctctatggaaggcgcgccccctgggaggatcctgccaagtgggtgatggacacatatccatgggcagccagcccacaacagcacgagtggcctcccctgctgcagttacggcctgaggatgtcggcttcgacggctactccatgcctcgggagggatcgacaagcaagcagatgccccccagtgatgctgaaggtgacccgctgatgaacatgctgatgaggctgcaggaggcagccaactactccagcccccagagctatgacagcgactccaacagcaacagccatcacgatgacatcttggactcctctttggagtccactctgtgacaggggcccggagcccagcgccctcctcttctcctcaccgcattccacctgcatcccccacatcaccctgaagatgacttcctgagccagcccccagccacagccttagagctgcgggaacaccgagaccccccgtccttcagcctcgacctgggtgcaggcatcccgggccagctgcctgcggaccgcttccttccacagcgagaactgcactaccttctgttgtactttaattattgttttgccttgttgctgtgacctccctaagacactgaagatacttctcgggaaaggatcatcgccgttgaaatgaaaagagagacagagagaaaaaaaaaaagagaacccacatgaagctctgaaaccaaacagcatcctgccatgagcttcccaga

SEQ ID NO: 2637 - protein, 2488 aa, Homo sapiens
MPAILVASKMKSGLPKPVHSAAPILHVPPARAGPQPCYLKLGSKVEVSKTTYPSQIPLKSQVLQGLQEPAGEGLPLRKSGSVENGFDTQIYTDWANHYLAKSGHKRLIRDLQQDVTDGVLLAQIIQVVANEKIEDINGCPKNRSQMIENIDACLNFLAAKGINIQGLSAEEIRNGNLKAILGLFFSLSRYKQQQQQPQKQHLSSPLPPAVSQVAGAPSQCQAGTPQQQVPVTPQAPCQPHQPAPHQQSKAQAEMQSSASSKDSSQSKIIRFTLGQKKISRLPGPTARVSAAGSEAKTRGGSTTANNRRSQSFNNYDKSKPVTSPPPPPSSHEKEPLASSASSHPGMSDNAPASLESGSSSTPTNCSTSSAIPQPGAATKPWRSKSLSVKHSATVSMLSVKPPGPEAPRPTPEAMKPAPNNQKSMLEKLKLFNSKGGSKAGEGPGSRDTSCERLETLPSFEESEELEAASRMLTTVGPASSSPKIALKGIAQRTFSRALTNKKSSLKGNEKEKEKQQREKDKEKSKDLAKRASVTERLDLKEEPKEDPSGAAVPEMPKKSSKIASFIPKGGKLNSAKKEPMAPSHSGIPKPGMKSMPGKSPSAPAPSKEGERSRSGKLSSGLPQQKPQLDGRHSSSSSSLASSEGKGPGGTTLNHSISSQTVSGSVGTTQTTGSNTVSVQLPQPQQQYNHPNTATVAPFLYRSQTDTEGNVTAESSSTGVSVEPSHFTKTGQPALEELTGEDPEARRLRTVKNIADLRQNLEETMSSLRGTQVTHSTLETTFDTNVTTEMSGRSILSLTGRPTPLSWRLGQSSPRLQAGDAPSMGNGYPPRANASRFINTESGRYVYSAPLRRQLASRGSSVCHVDVSDKAGDEMDLEGISMDAPGYMSDGDVLSKNIRTDDITSGYMTDGGLGLYTRRLNRLPDGMAVVRETLQRNTSLGLGDADSWDDSSSVSSGISDTIDNLSTDDINTSSSISSYANTPASSRKNLDVQTDAEKHSQVERNSLWSGDDVKKSDGGSDSGIKMEPGSKWRRNPSDVSDESDKSTSGKKNPVISQTGSWRRGMTAQVGITMPRTKPSAPAGALKTPGTGKTDDAKVSEKGRLSPKASQVKRSPSDAGRSSGDESKKPLPSSSRTPTANANSFGFKKQSGSAAGLAMITASGVTVTSRSATLGKIPKSSALVSRSAGRKSSMDGAQNQDDGYLALSSRTNLQYRSLPRPSKSNSRNGAGNRSSTSSIDSNISSKSAGLPVPKLREPSKTALGSSLPGLVNQTDKEKGISSDNESVASCNSVKVNPAAQPVSSPAQTSLQPGAKYPDVASPTLRRLFGGKPTKQVPIATAENMKNSVVISNPHATMTQQGNLDSPSGSGVLSSGSSSPLYSKNVDLNQSPLASSPSSAHSAPSNSLTWGTNASSSSAVSKDGLGFQSVSSLHTSCESIDISLSSGGVPSHNSSTGLIASSKDDSLTPFVRTNSVKTTLSESPLSSPAASPKFCRSTLPRKQDSDPHLDRNTLPKKGLRYTPTSQLRTQEDAKEWLRSHSAGGLQDTAANSPFSSGSSVTSPSGTRFNFSQLASPTTVTQMSLSNPTMLRTHSLSNADGQYDPYTDSRFRNSSMSLDEKSRTMSRSGSFRDGFEEESWEKSSVDNFVSRLHSSLHFSLPLFHHARYELVHGSSLSLVSSTSSVYSTPEEKCQSEIRKLRRELDASQEKVSALTTQLTANAHLVAAFEQSLGNMTIRLQSLTMTAEQKDSELNELRKTIELLKKQNAAAQAAINGVINTPELNCKGNGTAQSADLRIRRQHSSDSVSSINSATSHSSVGSNIESDSKKKKRKNWVNELRSSFKQAFGKKKSPKSASSHSDIEEMTDSSLPSSPKLPHNGSTGSTPLLRNSHSNSLISECMDSEAETVMQLRNELRDKEMKLTDIRLEALSSAHQLDQLREAMNRMQSEIEKLKAENDRLKSESQGSGCSRAPSQVSISASPRQSMGLSQHSLNLTESTSLDMLLDDTGECSARKEGGRHVKIVVSFQEEMKWKEDSRPHLFLIGCIGVSGKTKWDVLDGVVRRLFKEYIIHVDPVSQLGLNSDSVLGYSIGEIKRSNTSETPELLPCGYLVGENTTISVTVKGLAENSLDSLVFESLIPKPILQRYVSLLIEHRRIILSGPSGTGKTYLANRLSEYIVLREGRELTDGVIATFNVDHKSSKELRQYLSNLADQCNSENNAVDMPLVIILDNLHHVSSLGEIFNGLLNCKYHKCPYIIGTMNQATSSTPNLQLHHNFRWVLCANHTEPVKGFLGRFLRRKLMETEISGRVRNMELVKIIDWIPKVWHHLNRFLEAHSSSDVTIGPRLFLSCPIDVDGSRVWFTDLWNYSIIPYLLEAVREGLQLYGRRAPWEDPAKWVMDTYPWAASPQQHEWPPLLQLRPEDVGFDGYSMPREGSTSKQMPPSDAEGDPLMNMLMRLQEAANYSSPQSYDSDSNSNSHHDDILDSSLESTL

SEQ ID NO: 2638 - DNA, 1149 bp, Homo sapiens
atgatgttccccggcctcctcgcgccccccgccgggtaccctagcctcctgcggcccacgcccaccttgacgctgccccagtccttgcagtcggcattttccggccactccagcttcctggtggaggatctgatccgcatcagccgaccccccgcctacctgccccgcagcgtgcccaccgccagcatgtcgccgcccaggcagggggcccccacggccctcaccgacacgggggcctcggacctgggctccccgggtcccggcagccgacggggcggctctccgccgactgccttctcccctgccagcgagacgacgtttctgaagtttggagtgaacgccatcctctcctcggggcccagaacagaaacatccccagccttgctccagagcgtccctcccaagaccttcgcctttccctacttcgaagggtcttttcagcctttcatcagatcttcttatttcccagcttcctccagcgtggtgcccatccccgggaccttctcctggccgctggccgcgcgcgggaagcctcggcggggcatgctgcgtcgagcagtcttctccgacgtgcagcggaaggcgctggagaagatgttccagaagcagaagtacatcagcaagcccgaccgcaagaagctggcggccaagctgggcctgaaagactcgcaggacacagcccgaaggacagagcctgcacccgactccactccccgcccccgtgcgtcccccggagcccctgatctgacctctgcttctcccttcttctcgccggccgggacattccaggtgaaaatctggttccagaaccgacgcatgaaatggcggaactccaaggagcgcgaactcctgtctagcgggggctgtcgcgagcagaccctgcccaccaagctcaatccgcacccggacctcagcgacgtgggccagaagggccctgggaacgaagaggaggaggagggcccgggcagccccagccaccgcctggcctaccacgcgtcctccgacccccagcacctgcgggacccgcggctgccagggccgctgcccccctcgcccgcgcactcgagcagtcccgggaaaccttcggacttctcagattccgaggaggaagaggagggcgaggaacaggaggaaatcaccgtgtcctag

SEQ ID NO: 2639 - protein, 382 aa, Homo sapiens
MMFPGLLAPPAGYPSLLRPTPTLTLPQSLQSAFSGHSSFLVEDLIRISRPPAYLPRSVPTASMSPPRQGAPTALTDTGASDLGSPGPGSRRGGSPPTAFSPASETTFLKFGVNAILSSGPRTETSPALLQSVPPKTFAFPYFEGSFQPFIRSSYFPASSSVVPIPGTFSWPLAARGKPRRGMLRRAVFSDVQRKALEKMFQKQKYISKPDRKKLAAKLGLKDSQDTARRTEPAPDSTPRPRASPGAPDLTSASPFFSPAGTFQVKIWFQNRRMKWRNSKERELLSSGGCREQTLPTKLNPHPDLSDVGQKGPGNEEEEEGPGSPSHRLAYHASSDPQHLRDPRLPGPLPPSPAHSSSPGKPSDFSDSEEEEEGEEQEEITVS

SEQ ID NO: 2640 - DNA, 1438 bp, Homo sapiens
ggatgctctgatggccgggcctgcggcgctgagcgcggcggcggcggctgctctggcggccgccctgctcctgctgcgtcgtgaggacccggggccgggggctggccccagcatggccgaaacagaagccctgtcgaagcttcgggaagacttcaggatgcagaataaatccgtctttattttgggcgccagcggagaaaccggcagagtgctcttaaaggaaatcctggagcagggcctgttttccaaagtcacgctcattggccggaggaagctcaccttcgacgaggaagcttataaaaatgtgaatcaagaagtggtggactttgaaaagttggatgactacgcctctgcctttcaaggtcatgatgttggattctgttgcctgggtaccaccagagggaaagctggggcggagggatttgttcgtgttgaccgagattatgtgctgaagtctgcagagctggcaaaagctggagggtgcaaacatttcaacttgctatcctctaaaggagctgataaatcaagcaattttttatatctacaagttaagggagaagtagaagccaaggttgaagaattaaaatttgatcgttactctgtatttaggcctggagttctgttatgtgataggcaagaatctcgcccaggtgaatggctggttagaaagttctttggctccttaccagactcttgggccagggggcattctgtgcctgtggtgaccgtggttagagcaatgctgaacaatgtggtgagaccaagagacaagcagatggaactgctggagaacaaggccatccatgacctggggaaagcgcatggctctctcaagccatgaccacactggagaaatggtttttattgtcaaccttaacacccatcaccaaatcggtaatttcagggtctaaaaaaagtcagcatgttttaactttgttgttttactatcctcaggcatccattccaatcaagaaatgatggtgctctgcatcagtggttcagagcctggttatacatatagatcactcagggagctttggaaaaataaagatttgtcagccctatctcaaacttgaatcaaaatttctggggtgtgggcacaataatctgtaattttctttgtttatacttcccctgatgccactggttccgatgccactggctggggggcctgctttgaaatgcttgtctgcagagtcacagcagccatgaaaaccttatgaccgtgcaaatgagctctgctctaaaattgttgacattcatgtctctgagttacaaaagtgctaattcactacatgtaattgtgtaagtaaacattgtgcctttactacttctttatgtaatagaagttatatacctaagcttatataatacatggggaggattaaataaaggaataaagatgaatggacaactccaaaaaaaaaaaaaaaaaaaa

SEQ ID NO: 2641 - protein, 242 aa, Homo sapiens
MAETEALSKLREDFRMQNKSVFILGASGETGRVLLKEILEQGLFSKVTLIGRRKLTFDEEAYKNVNQEVVDFEKLDDYASAFQGHDVGFCCLGTTRGKAGAEGFVRVDRDYVLKSAELAKAGGCKHFNLLSSKGADKSSNFLYLQVKGEVEAKVEELKFDRYSVFRPGVLLCDRQESRPGEWLVRKFFGSLPDSWARGHSVPVVTVVRAMLNNVVRPRDKQMELLENKAIHDLGKAHGSLKP

SEQ ID NO: 2642 - DNA, 2632 bp, Homo sapiens
ggggaagcgattgcgagccagcgcgcgcgcttcggcgttcccggcggtctgcgaagtttccggagccccggtcccgccgcgggttcgcgcttgtgctcgcgctcgttcctggagtcggcggccgctgcgcgcgctcgttgcccaacccggtccccgcccccagacacgccgggctctcggggcaccacagccatgtgctcgttagcgtcaggcgctaccggcggccggggcgctgtggagaatgaggaggacctgccagaactgtcggacagcggggacgaggccgcctgggaggatgaggacgatgcagatctcccccacggcaagcagcagaccccctgcctgttctgtaacaggttattcacatctgctgaagaaacattttcacactgtaagtctgagcatcagtttaatattgacagcatggttcataaacatggacttgaattttatggatacattaagctaataaattttattagacttaagaatcctacagttgagtacatgaattccatatacaacccagtgccttgggagaaagaagagtatttgaagccagtattagaagatgaccttttacttcaatttgatgtagaagatctttatgaaccggtgtcagtacccttctcataccccaatggactcagtgaaaatacatctgttgttgaaaaattgaaacatatggaagccagggcactgtctgctgaagccgcattggccagagcacgtgaggatctgcaaaaaatgaaacaatttgctcaggattttgtgatgcacacagatgtcagaacctgctcgtcatctactagtgtcattgcggacctccaggaggatgaggatggtgtttatttcagctcatacgggcattatgggatacatgaagaaatgctaaaggacaaaatacgaacagaaagctaccgagatttcatataccaaaatccacatatcttcaaagacaaggtagttttggatgttgggtgtggaactggaattctctctatgtttgctgctaaagctggggcgaagaaggttcttggagttgatcaatctgaaatactttaccaggcaatggatattataagactaaataaacttgaagatactattacactaattaaaggaaagattgaagaagttcatcttcctgtagaaaaagtagatgttatcatatctgagtggatgggctattttcttctgtttgagtctatgttagattctgtcctttatgcaaagaacaaatacttggcaaaaggaggctcggtctaccctgacatttgcactatcagccttgtagcagtgagtgatgtgaataaacatgctgatagaattgctttttgggatgatgtctatggcttcaagatgtcctgcatgaagaaagcagttattccagaagctgttgtggaagttttagatccgaagactcttatttcagaaccttgtggtattaagcatatagattgccatacgacgtctatctcagatttggaattttcatcagattttaccctgaaaatcacaaggacatccatgtgcacggcaattgctggctactttgatatatattttgagaagaattgccacaacagggtcgtgttctctacgggccctcagagcaccaaaacacactggaaacaaacagtatttctactggaaaaaccattttcagttaaagcaggtgaagccttgaaaggaaaggtcacagttcacaagaataagaaagatccacgttctctcaccgtgaccctcacgttgaataattcaactcaaacttatggtctccagtgaaacagccataaaagcacactaccttgtagtttttaatgtgggggtagagtgggtcagcaggagggagctggttttatgtgagcagatggatggatgatggaccctttcctaatgagcctcctcaataagagagaagttctcattgtgggaatctgacatagttcagctgaggaagagaatcagctgatcctcatggtctgccacgtaatcattttcttagacgtttgctccaccagatttaaccaaatgtaactcccacattgagtttatctatattgaaaatcatttacattggcctatatttggaagagagatagtcttttgtttttaataagtttcttactataaattttaaacaaattggttagttatttggatattttattaaactagtaacacaggtactacacattttattatggactcctctgaggaggagtttttaattgtatttgctagaaaatcaggatgtaataaagatttgtataaaaaaactaaaatatggaaaagagcttcagccttcatatacaaatcatatatgcagacagcctagttgattatctagcatacttagggttctcattttgtagtttcttccctctttgtgactattccttagccttatagatttctagtactgcccaggaaatctaatttcaatacatttatcctaggtttcatgaaagtttttaaagattgggataaatatgtacttatttactaacgtattatctttttcaaaccagatttatgtgcaaaggttaaacatgtaactgttactaagcagtctataaagttgtcatttacaattactaaaaaaaaaaaaaaaaaaaaaaaaaaaaaa

SEQ ID NO: 2643 - protein, 531 aa, Homo sapiens
MCSLASGATGGRGAVENEEDLPELSDSGDEAAWEDEDDADLPHGKQQTPCLFCNRLFTSAEETFSHCKSEHQFNIDSMVHKHGLEFYGYIKLINFIRLKNPTVEYMNSIYNPVPWEKEEYLKPVLEDDLLLQFDVEDLYEPVSVPFSYPNGLSENTSVVEKLKHMEARALSAEAALARAREDLQKMKQFAQDFVMHTDVRTCSSSTSVIADLQEDEDGVYFSSYGHYGIHEEMLKDKIRTESYRDFIYQNPHIFKDKVVLDVGCGTGILSMFAAKAGAKKVLGVDQSEILYQAMDIIRLNKLEDTITLIKGKIEEVHLPVEKVDVIISEWMGYFLLFESMLDSVLYAKNKYLAKGGSVYPDICTISLVAVSDVNKHADRIAFWDDVYGFKMSCMKKAVIPEAVVEVLDPKTLISEPCGIKHIDCHTTSISDLEFSSDFTLKITRTSMCTAIAGYFDIYFEKNCHNRVVFSTGPQSTKTHWKQTVFLLEKPFSVKAGEALKGKVTVHKNKKDPRSLTVTLTLNNSTQTYGLQ

SEQ ID NO: 2644 - DNA, 2863 bp, Homo sapiens
cacgccaaacacgcagccccctcccgctggagtgacaactggccagcatactctaggctgttgtccctttaaaacttgaatccaagggggtaatgatttatcaaacttgtattatcaagaaaatgtcaaaccaagggcaccttgctttgcactgacgcaaacccggcctttcccaaggagatatagaaagcgcctctcctgcctgagccaaacccagtcttgtcaatagcgggtttcaccctccaccagttcagtctgttgcctgtgtcagacatggattgcagtgctcccaaggaaatgaataaactgccagccaacagcccggaggcggcggcggcgcagggccacccggatggcccatgcgctcccaggacgagcccggagcaggagcttcccgcggctgccgccccgccgccgccacgtgtgcccaggtccgcttccaccggcgcccaaactttccagtcagcggacgcgcgagcctgcgaggctgagcggccaggagtggggtcttgcaaactcagtagcccgcgggcgcaggcggcctctgcagctctgcgggacttgagagaggcgcaaggcgcgcaggcctcgccccctcccgggagctccgggcccggcaacgcgctgcactgtaagatcccttttctgcgaggcccggagggggatgcgaacgtgagtgtgggcaagggcaccctggagcggaacaatacccctgttgtgggctgggtgaacatgagccagagcaccgtggtgctggccacggatggaatcacgtccgtgctcccgggcagcgtggccaccgttgccacccaggaggacgagcaaggggatgagaataaggcccgagggaactggtccagcaaactggacttcatcctgtccatggtggggtacgcagtggggctgggcaatgtctggaggtttccctacctggccttccagaacgggggaggtgctttcctcatcccttacctgatgatgctggctctggctggattacccatcttcttcttggaggtgtcgctgggccagtttgccagccagggaccagtgtctgtgtggaaggccatcccagctctacaaggctgtggcatcgcgatgctgatcatctctgtcctaatagccatatactacaatgtgattatttgctatacacttttctacctgtttgcctcctttgtgtctgtactaccctggggctcctgcaacaacccttggaatacgccagaatgcaaagataaaaccaaacttttattagattcctgtgttatcagtgaccatcccaaaatacagatcaagaactcgactttctgcatgaccgcttatcccaacgtgacaatggttaatttcaccagccaggccaataagacatttgtcagtggaagtgaagagtacttcaagtactttgtgctgaagatttctgcagggattgaatatcctggcgagatcaggtggccactagctctctgcctcttcctggcttgggtcattgtgtatgcatcattggctaaaggaatcaagacttcaggaaaagtggtgtacttcacggccacgttcccgtatgtcgtactcgtgatcctcctcatccgaggagtcaccctgcctggagctggagctgggatctggtacttcatcacacccaagtgggagaaactcacggatgccacggtgtggaaagatgctgccactcagattttcttctctttatctgctgcatggggaggcctgatcactctctcttcttacaacaaattccacaacaactgctacagggacactctaattgtcacctgcaccaacagtgccacaagcatctttgccggcttcgtcatcttctccgttatcggcttcatggccaatgaacgcaaagtcaacattgagaatgtggcagaccaagggccaggcattgcatttgtggtttacccggaagccttaaccaggctgcctctctctccgttctgggccatcatctttttcctgatgctcctcactcttggacttgacactatgtttgccaccatcgagaccatagtgacctccatctcagacgagtttcccaagtacctacgcacacacaagccagtgtttactctgggctgctgcatttgtttcttcatcatgggttttccaatgatcactcagggtggaatttacatgtttcagcttgtggacacctatgctgcctcctatgcccttgtcatcattgccatttttgagctcgtggggatctcttatgtgtatggcttgcaaagattctgtgaagatatagagatgatgattggattccagcctaacatcttctggaaagtctgctgggcatttgtaaccccaaccattttaacctttatcctttgcttcagcttttaccagtgggagcccatgacctatggctcttaccgctatcctaactggtccatggtgctcggatggctaatgctcgcctgttccgtcatctggatcccaattatgtttgtgataaaaatgcatctggcccctggaagatttattgagaggctgaagttggtgtgctcgccacagccggactggggcccattcttagctcaacaccgcggggagcgttacaagaacatgatcgaccccttgggaacctcttccttgggactcaaactgccagtgaaggatttggaactgggcactcagtgctagtccagtggtgtgggatggtccagacttgatcctgtttttcctctctgcctcctcctaatgttttccatagctctcctcccatttttcttcatctttcttcctacatcttggttcacatccacgcatgagagtgattatgtagaaaagtaggcatagtgtcgcatgctgcagtaaagagctacatagaccacctgaa

SEQ ID NO: 2645 - protein, 797 aa, Homo sapiens
MDCSAPKEMNKLPANSPEAAAAQGHPDGPCAPRTSPEQELPAAAAPPPPRVPRSASTGAQTFQSADARACEAERPGVGSCKLSSPRAQAASAALRDLREAQGAQASPPPGSSGPGNALHCKIPFLRGPEGDANVSVGKGTLERNNTPVVGWVNMSQSTVVLATDGITSVLPGSVATVATQEDEQGDENKARGNWSSKLDFILSMVGYAVGLGNVWRFPYLAFQNGGGAFLIPYLMMLALAGLPIFFLEVSLGQFASQGPVSVWKAIPALQGCGIAMLIISVLIAIYYNVIICYTLFYLFASFVSVLPWGSCNNPWNTPECKDKTKLLLDSCVISDHPKIQIKNSTFCMTAYPNVTMVNFTSQANKTFVSGSEEYFKYFVLKISAGIEYPGEIRWPLALCLFLAWVIVYASLAKGIKTSGKVVYFTATFPYVVLVILLIRGVTLPGAGAGIWYFITPKWEKLTDATVWKDAATQIFFSLSAAWGGLITLSSYNKFHNNCYRDTLIVTCTNSATSIFAGFVIFSVIGFMANERKVNIENVADQGPGIAFVVYPEALTRLPLSPFWAIIFFLMLLTLGLDTMFATIETIVTSISDEFPKYLRTHKPVFTLGCCICFFIMGFPMITQGGIYMFQLVDTYAASYALVIIAIFELVGISYVYGLQRFCEDIEMMIGFQPNIFWKVCWAFVTPTILTFILCFSFYQWEPMTYGSYRYPNWSMVLGWLMLACSVIWIPIMFVIKMHLAPGRFIERLKLVCSPQPDWGPFLAQHRGERYKNMIDPLGTSSLGLKLPVKDLELGTQC

SEQ ID NO: 2646 - DNA, 3147 bp, Homo sapiens
agagcgcccaggagcgctaccggctgagggtggggaagcgcagggccaagcgcgcgaagcaggttgtgggggaccgggtcgagtggaagtacccgccggagaggaaggccggctggctgtggcgcccagagacggtggagtccgaggaggaggagaaggaggcctgcagaaggaagagcaggcccttagaagtccagcagcagcaactccggcggcccacagtcagattcagcacctgcctcagatctccacgtctgtctcagctgcccctctcctgctgcctctcaggcaccagtgccattaacgagctggcgaagatgggcgacccggatctcctggaagtgttggcggaggaaggggaaaaagtcaataagcatatagactactctttccaaatgagtgagcagagcctgagcagcagagagaccagctttctcatcaatgaagaaacaatgcctgcaaagcgattcaatttgttcctgaggcggcggcttatgtttcaaaaaaatcagcaaagcaaagattctatcttcttccgagatgggattaggcaaattgattttgtgctttcctacgttgatgacgtaaagaaagacgcagagttaaaggcggaaagaagaaaagagtttgaaactaatctcagaaaaacaggtcttgagttggaaatagaagacaaaagggactcggaagatggaagaacttattttgtcaagatccatgccccttgggaggtattagttacctatgctgaagtcttgggaatcaaaatgcctattaaggagagtgatattccccgccctaagcacactcctataagctatgtgcttggacctgtaagactcccactgagtgtgaagtatccccatcctgaatattttactgcacaattcagcagacatcggcaggagctcttcctcatcgaagatcaggcaaccttctttccatcctcatcaagaaacagaattgtgtactatattctctcaagatgtccttttggcatagaagatgggaagaaaaggtttgggattgaaagactgctaaactctaacacttactcatctgcctatccactccatgatggccaatattggaagccatcagaacctcccaatcctaccaatgaaagatacacacttcaccagaattgggctcgattttcctatttctacaaggagcagcctttagacttgattaagaattattatggagaaaaaattggtatctattttgtctttcttggattttacacagaaatgctattctttgcagctgtagttggcttagcttgttttatttatggcttattatcaatggaacataacacaagcagcactgaaatctgtgaccctgagattggtggtcagatgatcatgtgcccactctgtgatcaagtgtgtgattattggagactaaatagtacgtgtttggcttcaaagttctcccatttgtttgataatgagtcaacagtgttctttgcaatattcatgggaatttgggtcaccttatttttggagttttggaaacaacgacaagccagactggaatatgaatgggacctggtggactttgaagaggaacagcagcagcttcagctgagaccagaatttgaagctatgtgtaaacacaggaaattgaatgcagtgactaaggagatggaaccttacatgcctctatacacgcgtattccatggtactttctttcaggagccacagtgacattatggatgtctcttgtcgtcaccagtatggtagctgtaattgtgtaccgcctgtcagtctttgctacatttgctagtttcatggaaagtgatgcatccttaaagcaggtcaaaagcttccttactcctcagataaccacatcactcacaggatcatgcttgaactttattgtcatcttgatcttgaatttcttttatgaaaagatatctgcctggatcacaaaaatggaaattcctcgaacataccaggagtatgagagcagtcttaccttgaaaatgttcctgtttcagtttgtaaatttttactcatcctgcttctacgtagctttctttaaagggaagttcgtaggctatcctggaaaatacacatatttatttaatgagtggagaagtgaagagtgtgatcctggaggctgtcttatagaattgacaacccaattgaccattataatgaccgggaaacagatttttggaaacattaaagaagccatttatcccttggctttgaattggtggagacgccgaaaagctcggacaaactctgagaagctgtatagtcgatgggagcaggatcatgaccttgaaagttttggaccccttgggcttttctatgagtacttagaaacagttactcaatttggatttgttacactatttgtggcctcttttcctttggctcctcttcttgctctcataaataatattgtagagattcgagtggatgcctggaaacttaccactcaatacaggagaactgtagcttctaaagctcatagcataggtgtttggcaagacattctttatggaatggctgtcctttctgttgcaactaatgcctttattgttgcatttacgtcagacatcattccccgtctagtttactactatgcttactcaacaaatgccacacagcctatgacaggatatgtgaataatagcctgtcagtattcctgatagctgattttccaaaccacactgcaccttcggaaaaacgagacttcatcacttgcaggtacagagattacagatatcctcctgatgacgagaataaatattttcataatatgcaattctggcatgtccttgctgccaagatgaccttcatcattgttatggaacatgttgtgtttttagttaaatttttgctggcctggatgatacctgatgttccaaaagatgttgtggagagaatcaagagagaaaagttaatgactatcaagattctccatgattttgagctcaacaaattaaaagagaacttgggaattaattctaatgaatttgccaagcatgtcatgattgaggaaaacaaagcacagctggctaaatcaacactctaatcagtatagtgaggaagcagcaggtgatctgccttacttcactttatcctctggttttagggccagacgccagaagccatgtgtcaat

SEQ ID NO: 2647 - protein, 913 aa, Homo sapiens
MGDPDLLEVLAEEGEKVNKHIDYSFQMSEQSLSSRETSFLINEETMPAKRFNLFLRRRLMFQKNQQSKDSIFFRDGIRQIDFVLSYVDDVKKDAELKAERRKEFETNLRKTGLELEIEDKRDSEDGRTYFVKIHAPWEVLVTYAEVLGIKMPIKESDIPRPKHTPISYVLGPVRLPLSVKYPHPEYFTAQFSRHRQELFLIEDQATFFPSSSRNRIVYYILSRCPFGIEDGKKRFGIERLLNSNTYSSAYPLHDGQYWKPSEPPNPTNERYTLHQNWARFSYFYKEQPLDLIKNYYGEKIGIYFVFLGFYTEMLFFAAVVGLACFIYGLLSMEHNTSSTEICDPEIGGQMIMCPLCDQVCDYWRLNSTCLASKFSHLFDNESTVFFAIFMGIWVTLFLEFWKQRQARLEYEWDLVDFEEEQQQLQLRPEFEAMCKHRKLNAVTKEMEPYMPLYTRIPWYFLSGATVTLWMSLVVTSMVAVIVYRLSVFATFASFMESDASLKQVKSFLTPQITTSLTGSCLNFIVILILNFFYEKISAWITKMEIPRTYQEYESSLTLKMFLFQFVNFYSSCFYVAFFKGKFVGYPGKYTYLFNEWRSEECDPGGCLIELTTQLTIIMTGKQIFGNIKEAIYPLALNWWRRRKARTNSEKLYSRWEQDHDLESFGPLGLFYEYLETVTQFGFVTLFVASFPLAPLLALINNIVEIRVDAWKLTTQYRRTVASKAHSIGVWQDILYGMAVLSVATNAFIVAFTSDIIPRLVYYYAYSTNATQPMTGYVNNSLSVFLIADFPNHTAPSEKRDFITCRYRDYRYPPDDENKYFHNMQFWHVLAAKMTFIIVMEHVVFLVKFLLAWMIPDVPKDVVERIKREKLMTIKILHDFELNKLKENLGINSNEFAKHVMIEENKAQLAKSTL

SEQ ID NO: 2648 - DNA, 3946 bp, Homo sapiens
cgtttaaaagccatcagatttgagagcaataagtcttcaaaaccgggaatttacattgtttttcagctgaccgacttccaggaaaaggactcaaccgcatctacccaaataccgtggcactgcttgcgctctttgccaccggatactccccttccaatgagactttctgattgtgtctaccaactctcctattaggaaacccgtgggttgcatgcagctattctgttgtattctcattctcactctccctcccttctctcactctcactcttgctggaggcgagccactaccattctgctgagaaggaaaagcccgcaactactttaagagattaagacaatatgcgcaatcctcgcctttcctagcaatcactatttaaatctggcaagaactgacaacagtctttgcaagaatggaatccgtaaaacaaaggattttggccccaggaaaagaggggctaaagaattttgctggaaaatcactcggccagatctacagggtgctggagaagaagcaagacaccggggagacaatcgagctgacggaggatgggaagcccctagaggtgcccgagaggaaggcgccgctgtgcgactgcacgtgcttcggcctgccccgccgctacattatcgccatcatgagcggcctgggcttctgcatctccttcggtatccgctgcaacctgggcgtggccattgtggacatggtcaacaacagcaccatccaccgcgggggcaaggtcatcaaggagaaagccaaattcaactgggacccggaaaccgtggggatgatccacggttccttcttttggggctacatcatcactcagattccgggaggctacatcgcgtctcggctggcagccaacagggttttcggagctgccatacttcttacctctaccctaaatatgctaattccatcagcagccagagtgcattatggatgtgtcatctttgtcagaatactgcagggacttgttgagggtgtgacctacccagcatgtcatgggatatggagcaaatgggccccacctctagagaggagtagactggcaaccacctccttttgtggttcctatgccggagctgtgattgcaatgcctttagctggcattcttgtgcagtacactggctggtcttcagtgttttatgtctacggaagctttggaatggtctggtacatgttttggcttttggtgtcttatgaaagtcctgcaaagcatcctactattacagatgaagaacgtaggtacatagaagaaagcattggagagagtgcaaatcttttaggtgcaatggaaaaattcaagactccatggaggaagttttttacatccatgccagtctatgcaataattgttgcaaacttctgcagaagctggactttttatttattgcttattagtcagccagcatattttgaggaagtctttggatttgaaattagcaaggttggtatgctatctgctgtgccacacttagtaatgacaattattgtgcctattgggggacaaattgcagattttctaagaagcaagcagattctttcaactacgacagtgagaaagatcatgaattgtggtggttttggcatggaagccacactgctcctggtcgttggctattctcatactagaggggtagcaatctcattcttggtacttgcagtgggattcagtggatttgctatatctggtttcaatgttaaccacttggatatcgctccaagatatgccagtatcttaatgggcatttcgaatggtgttggcacattgtcaggaatggtttgtcctatcattgttggtgcaatgacaaagaataagtcacgtgaagagtggcagtatgtcttcctgatcgctgccctagtccactatggtggagttatattttatgcaatatttgcctcaggagagaaacaaccctgggcagacccggaggaaacaagtgaagaaaaatgtggatttattcatgaagatgaactcgatgaagaaacaggggacattactcaaaattatataaattatggtaccaccaagtcttatggtgccacaacacaggccaatggaggttggcctagtggttgggaaaagaaagaggaatttgtacaaggagaagtacaagactcacatagctataaggaccgagttgattattcataacaaaactaattactggatttatttttagtgtttgtgattaaattcattgtgattgcacaaaaattttaaaaacacgtgatgtaaacttgcaagcatatcaaccaggcaagtcttgctgtaaaaatgaaaacaaaacaaacccatgaggttaccatcaagtgcaatctgtaaaattgtgaagttccatcatttccattcaagtcatccattcttgcatttgtgacttaaaggttgactggtcaaaattgtagaaacaagtagttacccattggattcatatgagctaaaactcatcactatttactaaagcacaacatctcatcctacaaaagttaagaagccaaagctacttgatcatgcaaaatgcacttatatatttgttacactgtattgcaagatagcacacagaagttggctgcgtcaagtagaggcgacatttattaagtgaaaatcatggagttgggatatctctcaattaaagaaatacattgtgaactatcagctacaaagttgtactgaataactattagaattgcataatgtgagatattttgttagtcctcaaaaggaatatcttgcagtgttttctatgaaatgcttgggcacaaacacttatttctgtgaaagagaacatgtaagttgaggggtatgcttcatgttcttccatccatttacctaatagtatgaaacagttcacatttcaataaaatcaaacttttcatgtagcgtatcacataacttttttgcaaaaaatataaaaagaaataaacttcaatgtattttttattacaactttgtactggttgtaacttgcattagaaaaaaaaaagagatatataaaccacaaagaatctaataagaaatttattatggagatatagcccttaaaatgcaatattaagaacaaagaaatagaaaatggtttagatatctttcttccttcataattaaatactatatgaaacttgtgccacagagctatatgtaatatgaaaagattaacttcatagagatattgtaagtaggtaattttattatttaaagtcctattaagaaatatttgtcttaaatatataggacaatacattatattaaaatggtctctctctatatatatctgtatatcttatacatgtccatacacagaaacataataaacaatcttcacacgaaaccaaaaatagcatacacctaatgttgggttagggaattgcaatttctactttcatagagtcatagaattttaggtggggaagaggcattttgcttgtcatttcttaatataactcaacaagaattgcaacatttgtgtaccaagcaataagtgcaatgcataaaatttcctgtctgtatattaccttcattttgcttgtagtagctgtttgggtggttggaataattttatttttcttttaaaaaagctaacatcagacccctttataatgtcctaaaattatgataatacatttcccaattcaactcaaaatattattggtgtattttgtctattctggatatttgatctgtttaatgtactgtgctagtgactggaggccctgctactgcaaatataaaacctaaagtttgtttaaaaaaatgcaaatcattctttaccttaagaaaaaaaaaataccctttgctttgtgcctcaaagtgatgtaatgtgatcacagcttttgttgtgttgaatgaaaatatgtggactgtcattttgttgcagcaaaaaagtgttaataaaatgctctatttatccttttttaaaaaaaaaaaaaaaaaaaaaaaaa

SEQ ID NO: 2649 - protein, 582 aa, Homo sapiens
MESVKQRILAPGKEGLKNFAGKSLGQIYRVLEKKQDTGETIELTEDGKPLEVPERKAPLCDCTCFGLPRRYIIAIMSGLGFCISFGIRCNLGVAIVDMVNNSTIHRGGKVIKEKAKFNWDPETVGMIHGSFFWGYIITQIPGGYIASRLAANRVFGAAILLTSTLNMLIPSAARVHYGCVIFVRILQGLVEGVTYPACHGIWSKWAPPLERSRLATTSFCGSYAGAVIAMPLAGILVQYTGWSSVFYVYGSFGMVWYMFWLLVSYESPAKHPTITDEERRYIEESIGESANLLGAMEKFKTPWRKFFTSMPVYAIIVANFCRSWTFYLLLISQPAYFEEVFGFEISKVGMLSAVPHLVMTIIVPIGGQIADFLRSKQILSTTTVRKIMNCGGFGMEATLLLVVGYSHTRGVAISFLVLAVGFSGFAISGFNVNHLDIAPRYASILMGISNGVGTLSGMVCPIIVGAMTKNKSREEWQYVFLIAALVHYGGVIFYAIFASGEKQPWADPEETSEEKCGFIHEDELDEETGDITQNYINYGTTKSYGATTQANGGWPSGWEKKEEFVQGEVQDSHSYKDRVDYS

SEQ ID NO: 2650 - DNA, 6641 bp, Homo sapiens
ctttcaaataaggtgttgatttatgtggtcttgagaaatctttgttgctctgatcttaagtttctttttataatattagaatcatagtttacctacattacagggcttttatgaagattaaatcgagcatcgtgggtagtgttttttcagcccctgtgactaagtaggttataaatggtcctcagtcatcatcatcataaatgattcaaggcctgaatggcagaagaagaagaggaaaactcaagtgaaaagtgctagacatagaacacagcttacctaataaaacatgctactggctaactaagctggggtggctttctgccccctctacttaaatttaagaaagaaaaacagaaacgtctctgcatctgccactgcataccctctcagagcacagaccaactttgcccttccttaaaagtcccagggtttacctaccaacttttaggaaataaataaccagcctcaaagcttggcaaagagggcatcagtatcagctctagaggtttgctccgatttatatctcctcctccagtaaagtcttctgctcccactcccagccaaccccgctcaacgcccacccctcactgcggcactggacgcgcgggggatgcggggttgttcccagagtagccgctaaggggagccggacgctagaccgccctcccgcgttcccatgacaacgacaccggcgggcgcgtagcctggagagcgaagtgccggctacagcaggtgtcggattgcagtgcgctcgctgaggctccggaccttggagcgtctagagtctggctactgttcctccgcctccctctcgggcagctccctaagccggctgggacgcgcagagtgaaaatggtccaccattcaggctccattcagtcctttaaacagcaaaaaggtatgaatataagcaagagtgagataacaaaagaaacttcgttaaaaccgtctcggagatccctgccttgcctcgcccagagctacgcttactcaaagagcttgagccagtctacttccctcttccagtcaaccgagagtgaatctcaggctcccacatctataaccttaatctccactgacaaagcagagcaagttaatactgaggagaataaaaacgactctgtgctgagatgttcatttgctgacctcagcgatttttgtttggccctaggaaaagataaggattacacggatgaatcagaacacgctacttatgaccgatctcgtctcattaatgactttgttatcaaagataaatctgaattcaagacaaaattatctaagaatgacatgaattacatagcatccagtggacctctgttcaaagatggcaaaaggagaattgattacatcttggtttatagaaagacaaatataccatatgataaaagaaacacatttgaaaagaacctcagagcagaaggcttgatgttggagaaggagccagctattgcaagccccgatatcatgtttattaaaattcacattccatgggacacgctgtgcaagtatgcagagaggctgaatatcaggatgcccttcaggaaaaaatgctattacactgacgggaggagcaaatcaatgggcaggatgcaaacttattttagaagaatcaaagactggatggcccaaaacccaatggttcttgacaagtcagcttttccagacctagaggagtcagactgctatactggccccttcagccgtgcacggattcaccacttcataataaataataaagacaccttcttcagcaatgctactcgaagcagaatagtctatcacatgctggaacgcaccaaatatgaaaatggaatatcaaaagtgggtatccgtaaacttataaacaatggctcatacatagcagcgtttccaccacatgagggagcctacaaaagtagccagcccattaaaacccatggacctcagaataacagacatctattatatgagcgctgggcacgctggggaatgtggtataagcatcagcctctggatttaatcaggctgtactttggtgagaagattggactatactttgcttggctgggatggtatactggaatgttgattcctgcagcaattgttggtttgtgcgttttcttctatggattatttacaatgaataatagtcaagtaagccaagaaatttgtaaagccactgaagtctttatgtgccctctctgtgacaagaactgctccctgcagagactcaacgacagctgtatctatgccaaggtgacatatttgttcgataatggagggacagtcttctttgctatttttatggcaatatgggccacagtcttcctggagttttggaaaaggagaaggagtatactgacctatacttgggaccttatcgaatgggaagaagaggaggaaacacttcgtccccagtttgaagccaagtattacaagatggagattgtaaatcccatcacgggaaaacctgaaccacatcagccttcctcagacaaagtcactcgtcttcttgtttctgtctcaggaatattcttcatgatatccttggtgatcactgcagtgtttggagttgtggtgtaccgcctggttgtcatggaacagtttgcatcattcaagtggaatttcatcaaacaatactggcagtttgcaacatctgctgctgctgtctgtatcaatttcataatcattatgttgctgaatcttgcttatgaaaaaattgcttacctcctcaccaatttagaatatcctcgaacagaatcagagtgggaaaacagcttcgccctgaagatgttcctcttccagtttgtcaatttaaacagttccatcttctatatcgctttctttttgggaagatttgtaggccacccaggaaaatacaataaactttttgaccggtggagactggaggaatgtcatcctagtggctgtttgatagacctctgcctccagatgggtgtcatcatgtttttgaagcaaatatggaacaacttcatggaactaggatacccgttgatccagaactggtggtcacgacataaaatcaagcggggaatacatgatgcttccatacctcagtgggaaaatgattggaatctgcagcccatgaaccttcatggactgatggatgagtacttagaaatggttttgcaatttggttttaccaccatctttgttgcggcttttcctctagcccctcttttggctttgttaaacaatatcattgaaatcaggctggatgcatacaaatttgtcactcaatggcggaggcctttgccagcccgagcaactgacataggtatctggcttggaattctcgaaggaatcggtatattggctgtgatcaccaatgcatttgtaattgctattacttctgattacatcccacgttttgtttatgaatacaaatatggcccctgtgcaaatcatgtagaaccaagtgaaaattgcttgaagggatatgtcaacaatagcctatccttctttgacctgagtgagcttggtatgggaaaatctggttattgcaggtacagagactacagaggcccgccttggagttccaaaccctatgagtttactttacaatactggcatatccttgctgctagattggccttcattattgtgtttgagcaccttgtttttgggattaagtcattcatcgcatacctgattccagacgtaccaaagggtctacatgaccgaatacgacgagagaagtacttagttcaagaaatgatgtatgaggctgaactggaacatttgcaacaacaacggagaaaaagtggtcagcctgttcaccatgaatggccttagttgacacctgttacccattaggggtgataacattaatgggaagaaatgatggcaactttgaatgctaggtgaaatctaggaggaaggcatacttggcaaaccacatgtataatatgctacttggaaatgtatcacagccatctctgggatttgaaatatccagacttgtagggaagaaaacaatgacttgacgaccttaaaaagggttagattgacattgcaggaagccaggatgtaattctcagaaccagtctcagggagatatatgcttggagaactctgccttccatcaactgcagtgtaatgggaaagagggtggtgaggttttgaaagacagatttccatgtaaatgtgcacaagccaggcatggcttaaaatatcatgcagtcttcactcacatactaatttgactttggaaagtatggttgagttcagatacttataagaaatgacttaaacaaatccttgccttggctgccagaactctacatcccttcagtttacaggttggtaggaattgcccatgtctcttgctgagattatggatctgtgccacaggggatttatgctgctttacattgactatgcagttgaagagttgcacatcacctttagtggtcaaaccaaaaatctaagattccaaaaagaacagcattcattgaaataatattccattgcattggctacttcaagtctcttttacccctggcagagccagttgcagtgcaattttttgtactaaatgccaataaagccacatacttataaactatgaatggctattcttatatagtttagaacacaactaatccatactttattgtggaaggctgttttatagtatatttaattttttctctatgatttattacaactctcacggaatattaacttgaaatgctgtaaatacgttggttttccttgtccctttgcaccttgacagtacgtagtatacattgtggtttatgcagctctgacaccagtttttgctattgtaatatgtttattcgggaaaactgaggccagatgctctgcaacacttacgctttttcaacaatgtgcactcttactcatgaactaatgaaaataatgcatgaatataaatctatattatttgctaaaaaaagaaaaaacatttgtgttttagtttcttttttcatgactgaagggagttttatgttattatttcttccatagttttgttttggtttatttttaacaacgctctagaaacaaagtcaaattaatcacaaaagacataattttgctttgttgtggaatttctatttcaacgtcaactctgtatctatgagtatgtctgttccacagacagatgaggcaggagtgatggggcactcaagaaagttcagaggaggcataagctatggaggttggaaaggaagaaagagaagagctgaagtaaatgtatggtagaaattaagacgtttctttgcaaaacaaggaaatcacacatatgcacacatacatatttatggttactatgattgttattatttgtccaatcaagcaaagcaccattatttctaacatataaaagaccagatcaaacacaatggaaataaagctactacatatatatgccagtatttctctagtaagattatgtttctcttactagaaaactattttctaaatattaacactgaaaatgttttgttagcttttccttctttctctccagaagaaacatggatagatgatagctgtttcattgtttgtttttgtcaagcatattcactttcctccttgtcctctgattctgagcaaagggcctcagactctgaacttccctcaagtgccgttgttatgtgaactcttccattcagattccagagaggttctcatgctccccccccctccttatttgtagcaatcgtagcaactaattccactaagtacaagggagttttttacactcctccatttttatagcatctgcattttttttttttgttaggtacatgtatacacctgcctgagtataaatactctctctacctaataataacatcaaccaacatcttttccaaattagggccacagaacagcaacatttgtctgacagtagtataaagaataatgatagctctatccttaagaagtatttcctttcctttttatatagtcccgttagggtttaaaaccatattgatcaactagaaagaaaaatatgaaaagagaaaaatattttaatttaaaaattgtaatacattgatttataaaatgccttctctgatacttttgaaacagatgtgaaaaacagaaaaagaaaaaattgtctgaaatgtttattttgcaaaacagtgcaatagaatctagttatgccttcatcactgttgacagtaaatactgacagccccttgcagtgtgttagttttagatcactctgttttagttgagagaaatgttttatatcatggtttttatatgaatacaaattatttctcaaagatttatagcacacactattctcaggaattctgtattacatgaatgctgcttatatattttcatattctaacttgtcttttcaagcaaataactaatatatatgtgcatgcagtctgccttgacaagttgttccaagctgaagagctttcactgtacaatgtgtggaaaatcaccatagatcatggctgaaatagtttgtaattgtctgagtctgtgcacgtacttttagataaaatgctgctgagtgactgcatgatgagatacaacttctgaatgctgcacattcttccaaaatgatccttagcacaatctattgtatgatggaatgaatagaaaactttttcactcaataaattattatttgatatggt

SEQ ID NO: 2651 - protein, 981 aa, Homo sapiens
MVHHSGSIQSFKQQKGMNISKSEITKETSLKPSRRSLPCLAQSYAYSKSLSQSTSLFQSTESESQAPTSITLISTDKAEQVNTEENKNDSVLRCSFADLSDFCLALGKDKDYTDESEHATYDRSRLINDFVIKDKSEFKTKLSKNDMNYIASSGPLFKDGKRRIDYILVYRKTNIPYDKRNTFEKNLRAEGLMLEKEPAIASPDIMFIKIHIPWDTLCKYAERLNIRMPFRKKCYYTDGRSKSMGRMQTYFRRIKDWMAQNPMVLDKSAFPDLEESDCYTGPFSRARIHHFIINNKDTFFSNATRSRIVYHMLERTKYENGISKVGIRKLINNGSYIAAFPPHEGAYKSSQPIKTHGPQNNRHLLYERWARWGMWYKHQPLDLIRLYFGEKIGLYFAWLGWYTGMLIPAAIVGLCVFFYGLFTMNNSQVSQEICKATEVFMCPLCDKNCSLQRLNDSCIYAKVTYLFDNGGTVFFAIFMAIWATVFLEFWKRRRSILTYTWDLIEWEEEEETLRPQFEAKYYKMEIVNPITGKPEPHQPSSDKVTRLLVSVSGIFFMISLVITAVFGVVVYRLVVMEQFASFKWNFIKQYWQFATSAAAVCINFIIIMLLNLAYEKIAYLLTNLEYPRTESEWENSFALKMFLFQFVNLNSSIFYIAFFLGRFVGHPGKYNKLFDRWRLEECHPSGCLIDLCLQMGVIMFLKQIWNNFMELGYPLIQNWWSRHKIKRGIHDASIPQWENDWNLQPMNLHGLMDEYLEMVLQFGFTTIFVAAFPLAPLLALLNNIIEIRLDAYKFVTQWRRPLPARATDIGIWLGILEGIGILAVITNAFVIAITSDYIPRFVYEYKYGPCANHVEPSENCLKGYVNNSLSFFDLSELGMGKSGYCRYRDYRGPPWSSKPYEFTLQYWHILAARLAFIIVFEHLVFGIKSFIAYLIPDVPKGLHDRIRREKYLVQEMMYEAELEHLQQQRRKSGQPVHHEWP

SEQ ID NO: 2652 - DNA, 2084 bp, Homo sapiens
ggttcctgggcgctctgttacacaagcaagatacagccagccccacctaattttgtttccctggcaccctcctgctcagtgcgacattgtcacacttaacccatctgttttctctaatgcacgacagattcctttcagacaggacaactgtgatatttcagttcctgattgtaaatacctcctaagcctgaagcttctgttactagccattgtgagcttcagtttcttcatctgcaaaatgggcataatacaatctattcttgccacatcaagggattgttattcctttaaaaaaaaaccaataccaaagaagcctacaatgttggccttagccaaaattctgttgatttcaacgttgttttattcacttctatcggggagccatggaaaagaaaatcaagacataaacacaacacagaacattgcagaagtttttaaaacaatggaaaataaacctatttctttggaaagtgaagcaaacttaaactcagataaagaaaatataaccacctcaaatctcaaggcgagtcattcccctcctttgaatctacccaacaacagccacggaataacagatttctccagtaactcatcagcagagcattctttgggcagtctaaaacccacatctaccatttccacaagccctcccttgatccatagctttgtttctaaagtgccttggaatgcacctatagcagatgaagatcttttgcccatctcagcacatcccaatgctacacctgctctgtcttcagaaaacttcacttggtctttggtcaatgacaccgtgaaaactcctgataacagttccattacagttagcatcctctcttcagaaccaacttctccatctgtgacccccttgatagtggaaccaagtggatggcttaccacaaacagtgatagcttcactgggtttaccccttatcaagaaaaaacaactctacagcctaccttaaaattcaccaataattcaaaactctttccaaatacgtcagatccccaaaaagaaaatagaaatacaggaatagtattcggggccattttaggtgctattctgggtgtctcattgcttactcttgtgggctacttgttgtgtggaaaaaggaaaacggattcattttcccatcggcgactttatgacgacagaaatgaaccagttctgcgattagacaatgcaccggaaccttatgatgtgagttttgggaattctagctactacaatccaactttgaatgattcagccatgccagaaagtgaagaaaatgcacgtgatggcattcctatggatgacatacctccacttcgtacttctgtatagaactaacagcaaaaaggcgttaaacagcaagtgtcatctacatcctagccttttgacaaattcatctttcaaaaggttacacaaaattactgtcacgtggattttgtcaaggagaatcataaaagcaggagaccagtagcagaaatgtagacaggatgtatcatccaaaggttttctttcttacaatttttggccatcctgaggcatttactaagtagccttaatttgtattttagtagtattttcttagtagaaaatatttgtggaatcagataaaactaaaagatttcaccattacagccctgcctcataactaaataataaaaattattccaccaaaaaattctaaaacaatgaagatgactctttactgctctgcctgaagccctagtaccataattcaagattgcattttcttaaatgaaaattgaaagggtgctttttaaagaaaatttgacttaaagctaaaaagaggacatagcccagagtttctgttattgggaaattgaggcaatagaaatgacagacctgtattctagtacgttataattttctagatcagcacacacatgatcagcccactgagttatgaagctgacaatgactgcattcaacggggccatggcaggaaagctgaccctacccaggaaagtaatagcttctttaaaagtcttcaaaggttttgggaattttaacttgtcttaatatatcttaggcttcaattatttgggtgccttaaaaactcaatgagaatcatggt

SEQ ID NO: 2653 - protein, 334 aa, Homo sapiens
MLALAKILLISTLFYSLLSGSHGKENQDINTTQNIAEVFKTMENKPISLESEANLNSDKENITTSNLKASHSPPLNLPNNSHGITDFSSNSSAEHSLGSLKPTSTISTSPPLIHSFVSKVPWNAPIADEDLLPISAHPNATPALSSENFTWSLVNDTVKTPDNSSITVSILSSEPTSPSVTPLIVEPSGWLTTNSDSFTGFTPYQEKTTLQPTLKFTNNSKLFPNTSDPQKENRNTGIVFGAILGAILGVSLLTLVGYLLCGKRKTDSFSHRRLYDDRNEPVLRLDNAPEPYDVSFGNSSYYNPTLNDSAMPESEENARDGIPMDDIPPLRTSV

SEQ ID NO: 2654 - DNA, 1896 bp, Homo sapiens
ggcttgtgtcatactttccaatatggaggtgaagaactttgcagtttgggattatgttgtatttgcagccctctttttcatttcctctggaattggggtgttctttgccattaaggagagaaaaaaggcaacttcccgagagttcctggttgggggaaggcaaatgagctttggccctgtcggcttgtctctgacagccagcttcatgtcagctgtcacggtcctggggaccccttctgaagtctaccgctttggggcatccttcctagtcttcttcattgcttacctatttgtcatcctcttaacatcagagctctttctccctgtgttctacagatctggtatcaccagcacttatgagtacttacaactacgattcaacaaaccagttcgctatgctgccacagtcatctacattgtacagacgattctctacacaggagtggtggtgtatgctcctgccctggcactcaatcaagtgactgggtttgatctctggggctctgtgtttgcaacaggaattgtttgcacattctactgtaccctgggaggattaaaagcagtggtgtggacagatgcatttcagatggttgtcatgattgtgggcttcttaacggttctcattcaaggatcaacccatgctgggggattccacaatgtattagagcaatcaacaaatggatctcgactacatatatttgactttgatgtagatcctctcaggcgacacactttttggactatcacagtgggaggaacttttacttggctcggaatctatggggtcaatcaatcaactattcagcgatgcatctcttgcaaaacagaaaagcatgctaagcttgccttgtattttaacttgctgggtctctgggtcattctggtgtgtgctgtcttctctggcttaatcatgtactctcactttaaagactgtgacccttggacttctggcatcatctcagcaccagaccagctgatgccgtactttgtcatggagatatttgccacaatgccaggactgccaggactttttgtggcttgtgccttcagtggaactctgagcaccgtggcttccagcatcaatgccttggcaacagtgacctttgaggattttgtcaagagctgttttcctcatctctccgacaagctgagcacctggatcagtaaaggcttatgtctcttatttggcgtgatgtgtacctctatgtctgtggctgcatctgtcatgggaggtgttgtgcaggcttccctcagcattcacggcatgtgtggaggaccaatgctgggcttattctccctgggaatcgtgttcccttttgtgaattggaagggtgcactaggaggtcttcttactggaatcaccttgtcattttgggtggccattggggccttcatttaccctgcaccagcctctaagacatggcctttgcctctatcaacagaccaatgtatcaaatcaaatgtgacagcaacagggcctccagtactatccagcagacctggaatagctgatacctggtactcgatttcctacctttactacagtgcagtgggctgcttaggatgcattgttgctggagtaatcatcagcctcataacaggtcgccaaagaggtgaggatattcaaccactgttaattagaccagtttgtaatttattttgcttttggtctaagaagtacaaaacactatgctggtgtggagttcagcatgacagtgggacagagcaggaaaaccttgagaatggcagtgcccggaaacagggggctgaatctgtcttacagaacggactcagaagagaaagcctggtacatgttccaggctatgatcctaaggacaaaagctacaacaatatggcatttgagactacccatttctaaggcaatacctgtaaagc

SEQ ID NO: 2655 - protein, 618 aa, Homo sapiens
MEVKNFAVWDYVVFAALFFISSGIGVFFAIKERKKATSREFLVGGRQMSFGPVGLSLTASFMSAVTVLGTPSEVYRFGASFLVFFIAYLFVILLTSELFLPVFYRSGITSTYEYLQLRFNKPVRYAATVIYIVQTILYTGVVVYAPALALNQVTGFDLWGSVFATGIVCTFYCTLGGLKAVVWTDAFQMVVMIVGFLTVLIQGSTHAGGFHNVLEQSTNGSRLHIFDFDVDPLRRHTFWTITVGGTFTWLGIYGVNQSTIQRCISCKTEKHAKLALYFNLLGLWVILVCAVFSGLIMYSHFKDCDPWTSGIISAPDQLMPYFVMEIFATMPGLPGLFVACAFSGTLSTVASSINALATVTFEDFVKSCFPHLSDKLSTWISKGLCLLFGVMCTSMSVAASVMGGVVQASLSIHGMCGGPMLGLFSLGIVFPFVNWKGALGGLLTGITLSFWVAIGAFIYPAPASKTWPLPLSTDQCIKSNVTATGPPVLSSRPGIADTWYSISYLYYSAVGCLGCIVAGVIISLITGRQRGEDIQPLLIRPVCNLFCFWSKKYKTLCWCGVQHDSGTEQENLENGSARKQGAESVLQNGLRRESLVHVPGYDPKDKSYNNMAFETTHF

SEQ ID NO: 2656 - DNA, 2315 bp, Homo sapiens
ctttaggagaggagcagacagctcttagctagggtcagatttcaaattctcatctcttggtgccaataccaccaccagattcttctttgaagtcaacttttgagatcttcactaagtacacgttggtgtctgaagattcacacgagtgcctctggtaatcattttcttcagggaatcacagtctctcctctcagcaaagcatccactgtactgaactttgcttttggaaacatcttcttcctgagacctcgttgaaagaaactctctggtgtcatactttccaatatggaggtgaagaactttgcagtttgggattatgttgtatttgcagccctctttttcatttcctctggaattggggtgttctttgccattaaggagagaaaaaaggcaacttcccgagagttcctggttgggggaaggcaaatgagctttggccctgtcggcttgtctctgacagccagcttcatgtcagctgtcacggtcctggggaccccttctgaagtctaccgctttggggcatccttcctagtcttcttcattgcttacctatttgtcatcctcttaacatcagagctctttctccctgtgttctacagatctggtatcaccagcacttatgagtacttacaactacgattcaacaaaccagttcgctatgctgccacagtcatctacattgtacagacgattctctacacaggagtggtggtgtatgctcctgccctggcactcaatcaagtgactgggtttgatctctggggctctgtgtttgcaacaggaattgtttgcacattctactgtaccctgggaggattaaaagcagtggtgtggacagatgcatttcagatggttgtcatgattgtgggcttcttaacggttctcattcaaggatcaactcatgctgggggattccacaatgtattagagcaatcaacaaatggatctcgactacatatatttgactttgatgtagatcctctcaggcgacacactttttggactatcacagtgggaggaacttttacttggctcggaatctatggggtcaatcaatcaactattcagcgatgcatctcttgcaaaacagaaaagcatgctaagcttgccttgtattttaacttgctgggtctctggatcattctggtgtgtgctgtcttctctggcttaatcatgtactctcactttaaagactgtgacccttggacttctggcatcatctcagcaccagaccagctgatgccgtactttgtcatggagatatttgccacaatgccaggactgccaggactttttgtggcttgtgccttcagtggaactctgagcaccgtggcttccagcatcaatgccttggcaacagtgacctttgaggattttgtcaagagctgttttcctcatctctccgacaagctgagcacctggatcagtaaaggcttatgtaggtacagctggtggactttctattccatatcatgaaatgtacatgtggtagatgtcaaaatcctgcatgtgctattcaggacacacttataaacacaaatgcactgtgagatatgtgaagaatcccacacatagattcttacacttccaaagatccagcagggtatcaggaaagaatgactagctagtttaccttaactgcctttattttcagatactcttctatacttaccctacactctagacgaggcttatccaacccacggcctgtgggccgcatgcggcccaggatggctttgaatgcagcccaacacaaattcgtaaactttcttaaaacattctggaatttttttgtaattttttaaatcttatcagctatcattagtgtttgtgtattttatgtgtactccaaggcaactccttctttcaacgtggcccagggaggccaaaagattggacacccctgcaaactaatcacatcaatctctcttgattacactgtgtgatggtcatattagtctctctacatgggaagatgttgtgcttactatggccagtcactttgacaaagaaaagccaaattcttttctaaagaattgttccttattaccaaactcccagtaaccccctcaaagaataattgccccttgcttaatcatgcaattgcatattatgtttatactcacttcagcacttatcagagataattgcagtttcacaaggtttactttttaaagtataaacaaattatgtatttacttactaatagaaaatataggtaatttggggaaatttatgtacattgttaaataaaattatatctatctaaaaaaaaaaaaaaaaaaaaaaaaaaaaaaaaaaaaaaaaaaaaaaaa

SEQ ID NO: 2657 - protein, 396 aa, Homo sapiens
MEVKNFAVWDYVVFAALFFISSGIGVFFAIKERKKATSREFLVGGRQMSFGPVGLSLTASFMSAVTVLGTPSEVYRFGASFLVFFIAYLFVILLTSELFLPVFYRSGITSTYEYLQLRFNKPVRYAATVIYIVQTILYTGVVVYAPALALNQVTGFDLWGSVFATGIVCTFYCTLGGLKAVVWTDAFQMVVMIVGFLTVLIQGSTHAGGFHNVLEQSTNGSRLHIFDFDVDPLRRHTFWTITVGGTFTWLGIYGVNQSTIQRCISCKTEKHAKLALYFNLLGLWIILVCAVFSGLIMYSHFKDCDPWTSGIISAPDQLMPYFVMEIFATMPGLPGLFVACAFSGTLSTVASSINALATVTFEDFVKSCFPHLSDKLSTWISKGLCRYSWWTFYSIS

SEQ ID NO: 2658 - DNA, 3218 bp, Homo sapiens
aattaattttgattacatttaaaattctatatggcaaaaataccataattaaagataaaaggcaaagaacaaattgggaaaaatatttttcaacatatataaccaagggctaatttctctaacacctaaaaagttcttataaatcaataaaaagaaaaccaacatctcaatggaaaaagaacaaagctcataaagagttcacagaaaaaggatatacaaatggctttaaacatgtgaaagaatgttcaacttcactcacaataagaaaaaatacaaattatgagttgcttcagcatcctggtgttgctgtgccgtgggtcctgtgcggtcacttagccaagatgcctgaggaaacccagacccaagaccaaccgatggaggaggaggaggttgagacattcgcctttcaggcagaaattgcccagttgatgtcattgatcatcaatactttctactcgaacaaagagatctttctgagagagctcatttcaaattcatcagatgcattggacaaaatctggtatgaaagcttgacagatcccagtaaattagactctgggaaagagctgcatattaaccttataccaaacaaacaagatcaaactctcactattgtggatactggaattggaatgaccaaggctgacttgatcaataaccttggtactatcgccaagtctgggaccaaagcgttcatggaagctttgcaggctggtgcagatatctctatgattggccagttcggtgttagtttttattctgcttatttggttgctgagaaagtaactgtgatcaccaaacataatgatgatgagcagtacgcctgggagtcctcagcagggggatcattcacagtgaggacagacacaggtgaacgtatgggtcgtggaacaaaggttatcctacacctgaaagaagaccaaactgagtacttggaggaacaaagaataaaggagattgtgaagaaacattctcagcttattggatatcccattactctttttgtggagaaggaatgtgataaagaagtcagcgacgatgagactgaagaaaaggaagacaaagaagaagaaaaagaaaaagaagagaaagagtccaaagacaaacctgaaattgaagatgttggttctgatgaggaagaagaaaagaaggatggtgacaagaagaagaagaagactaaggaaaagtacatcgaccaagaagaactcaacaaaacaaagcccatctggaccagaaatcccgacgatattactaatgaggagtacggagaattctgcaagaacttgaccaatgactgggaagatcacttggcagtgaagcatttttcagttgaaggacagttggaattcagagcccttctatttgtcccatgacgtgctccttttgacctgtttgaaaacagaaagaaaaagaacaacatcaaattgtatgtacgcagagatttcatcatggataactgtgaggagctaatccctgaatatctgaacttcattagaggggtggtagactcggaggatctccctctaaacatttcccgtgagatgttgcaacaaagtaaaattttgaaagttatcaggaaaaatttggtcaaaaaatgcttagaactctttacagaactggcggaagataaagagaactgcaagaaattctatgagcagttctctaaaaacataaagcttggaatacaagaagactctcaaaatcggaagaagctttcagagctgttaaggtactacacgtctgcctctggtgatgagatggtttctctcaaggactactgcaccagaatgaaggaaaaacagaaacatatctattatatcacaggtgagaccaaggaccaggtagctaactcagcctttgtggaacgtcttgggaaacatggcttagaagtgatctatatgattgagcccattgatgagtactgtgtccaacagctgaaggaatttgaggggaagactttagtgccagtcaccaaagaaggcctggaacttccagaggatgaagaaaagaaaaagaaataggaagagaaaaaacaatgtttgagaacctctgcaaaaccatgaaagacatattggagaaaaaagttgaaaaggtggttgtgtcaaaccgattggtgacgtctccatgctgtattgtcacaagcacatatggctggacagaaaacatggagagaatcatgaaagctcaagccctaagagacaactcaacaatgggttatatggcagccaagaaacacctggagataaatcctgatgattccattattgagaccttaaggcaaaaggcagaggctgataagaatgacaagtctgtgaaggatctgctcatcttgctttacgaaactgcactcctgtcttctggcttcagtctggaagatccccagacacatgctaacaggacctacaggatgatcaaacttggtctgggtattgatgaagatgatcctgctgctgatgataccagtgctgctgtaactgaagaaatgccgcccctcgaaggagatgacgacacatcatgcatggaagaagtagactaacctctggctaagggatgacttaactgttcaatactctacaattcctccgataatatatattcaaggatgtttttctttatttttgttaatattaaaaagtctgtacggcatgacaacaactactttaaggggaagataagatttctgtctactaagtgatgctgtgataccttaggcactaaagcagagctagtaatgctttttgagtttcacgtcggtttattttcacagattggggtaacgtgcgttgtaagatgtatgtaacatgatgttaactttgtggtctaaagtgtttagctgtcaagccggattcctaagtagaccaaatcttgttatcgaagtgttcctgagctataccttgatgtttagaaaagtatttgttacatcttgtaggatctactttttgaacttttcatcccctatagttgacaattctgcatgtactagtcctctagaaataggttaaactgaagcaacttgatggaaggatctctccacagggcttgttttccaaagaaaagtattgtttggaggagcaaagttataagcctacctaagcatatcataaagctgtttaaaaataactcagacccggtcttgtggatggaaatgtagtgctcgagtcacattcttcttatagttgtaacaaatacagatgagttaaaagaaaaaaaaagaaaaa

SEQ ID NO: 2659 - protein, 343 aa, Homo sapiens
MPEETQTQDQPMEEEEVETFAFQAEIAQLMSLIINTFYSNKEIFLRELISNSSDALDKIWYESLTDPSKLDSGKELHINLIPNKQDQTLTIVDTGIGMTKADLINNLGTIAKSGTKAFMEALQAGADISMIGQFGVSFYSAYLVAEKVTVITKHNDDEQYAWESSAGGSFTVRTDTGERMGRGTKVILHLKEDQTEYLEEQRIKEIVKKHSQLIGYPITLFVEKECDKEVSDDETEEKEDKEEEKEKEEKESKDKPEIEDVGSDEEEEKKDGDKKKKKTKEKYIDQEELNKTKPIWTRNPDDITNEEYGEFCKNLTNDWEDHLAVKHFSVEGQLEFRALLFVP

SEQ ID NO: 2660 - DNA, 3379 bp, Homo sapiens
ctggcctgggcctgaagtgagtgagaggcacatgaagagaagtattcaagtatttatacagataggaatcaagataatcaacaatgtctgtcactgaggaagacctgtgccaccatatgaaagtagtagttcgtgtacgtccggaaaacactaaagaaaaagcagctggatttcataaagtggttcatgttgtggataaacatatcctagtttttgatcccaaacaagaagaagtcagttttttccatggaaagaaaactacaaatcaaaatgttataaagaaacaaaataaggatcttaaatttgtatttgatgctgtttttgatgaaacgtcaactcagtcagaagtttttgaacacactactaagccaattcttcgtagttttttgaatggatataattgcacagtacttgcctatggtgccactggtgctgggaagacccacactatgctaggatcagctgatgaacctggagtgatgtatctaacaatgttacacctttacaaatgcatggatgagattaaagaagagaaaatatgtagtactgcagtttcatatctggaggtatataatgaacagattcgtgatctcttagtaaattcagggccacttgctgtccgggaagatacccaaaaaggggtggtcgttcatggacttactttacaccagcccaaatcctcagaagaaattttacatttattggataatggaaacaaaaacaggacacaacatcccactgatatgaatgccacatcttctcgttctcatgctgttttccaaatttacttgcgacaacaagacaaaacagcaagtatcaatcaaaatgtccgtattgccaagatgtcactcattgacctggcaggatctgagcgagcaagtacttccggtgctaaggggacccgatttgtagaaggcacaaatattaatagatcacttttagctcttgggaatgtcatcaatgccttagcagattcaaagagaaagaatcagcatatcccttacagaaatagtaagcttactcgcttgttaaaggattctcttggaggaaactgtcaaactataatgatagctgctgttagtccttcctctgtattctacgatgacacatataacactcttaagtatgctaaccgggcaaaggacattaaatcttctttgaagagcaatgttcttaatgtcaataatcatataactcaatatgtaaagatctgtaatgagcagaaggcagagattttattgttaaaagaaaaactaaaagcctatgaagaacagaaagccttcactaatgaaaatgaccaagcaaagttaatgatttcaaaccctcaggaaaaagaaatcgaaaggtttcaagaaatcctgaactgcttgttccagaatcgagaagaaattagacaagaatatctgaagttggaaatgttacttaaagaaaatgaacttaaatcattctaccaacaacagtgccataaacaaatagaaatgatgtgttctgaagacaaagtagaaaaggccactggaaaacgagatcatagacttgcaatgttgaaaactcgtcgctcctacctggagaaaaggagggaggaggaattgaagcaatttgatgagaatactaattggctccatcgtgtcgaaaaagaaatgggactcttaagtcaaaacggtcatattccaaaggaactcaagaaagatcttcattgtcaccatttgcacctccagaacaaagatttgaaagcacaaattagacatatgatggatctagcttgtcttcaggaacagcaacacaggcagactgaagcagtattgaatgctttacttccaaccctaagaaaacaatattgcacattaaaagaagccggcctgtcaaatgctgcttttgaatctgacttcaaagagatcgaacatttggtagagaggaaaaaagtggtagtttgggctgaccaaactggcgaacaaccaaagcaaaacgatctacccgggatttctgttcttatgaccttttcacaacttggaccagttcagcctattccttgttgctcatcttcaggtggaactaatctggttaagattcctacagaaaaaagaactcggagaaaactaatgccatctcccttgaaaggacagcatactctaaagtctccaccatctcaaagtgtgcagctcaatgattctcttagcaaagaacttcagcctattgtatatacaccagaagactgtagaaaagcttttcaaaatccgtctacagtaaccttaatgaaaccatcatcatttactacaagttttcaggctatcagctcaaacataaacagtgataattgtctgaaaatgttgtgtgaagtagctatccctcataatagaagaaaagaatgtggacaggaggacttggactctacatttactatatgtgaagacatcaagagctcgaagtgtaaattacccgaacaagaatcactaccaaatgataacaaagacattttacaacggcttgatccttcttcattctcaactaagcattctatgcctgtaccaagcatggtgccatcctacatggcaatgactactgctgccaaaaggaaacggaaattaacaagttctacatcaaacagttcgttaactgcagacgtaaattctggatttgccaaacgtgttcgacaagataattcaagtgagaagcacttacaagaaaacaaaccaacaatggaacataaaagaaacatctgtaaaataaatccaagcatggttagaaaatttggaagaaatatttcaaaaggaaatctaagataaatcacttcaaaaccaagcaaaatgaagttgatcaaatctgcttttcaaagtttatccaataccctttcaaaaatatatttaaaatctttgaaagaagacccatcttaaagctaagtttacccaagtactttcagcaagcagaaaaatgaaactctttgttttcttcttttgtgttctaaaaaaataaaatttcaaaagaaaaggttgtcttttaagttttttaaatatttgttgccttttaaaatccctgagtgtaagttaccatggtggcagcttagttttactatgccacaacaagttgactaggacattttagtaaatggtagtgagttaaattatctttattattttttaaaaataagaatttagaagtggtaaaattatggcccaagatgtatttggttctctattatgttttgatacattattttaatcatatatatgactttccttttcaaaaatactttaatgtacaagtgtaaatatatgtgcccataaaatcattgtaaatattatttagtcatcacaaataaaatattgtcccttgctacttgatatattaaagatgtagattttaaagtgaaaaaaaaaaaaaaaaa

SEQ ID NO: 2661 - protein, 898 aa, Homo sapiens
MSVTEEDLCHHMKVVVRVRPENTKEKAAGFHKVVHVVDKHILVFDPKQEEVSFFHGKKTTNQNVIKKQNKDLKFVFDAVFDETSTQSEVFEHTTKPILRSFLNGYNCTVLAYGATGAGKTHTMLGSADEPGVMYLTMLHLYKCMDEIKEEKICSTAVSYLEVYNEQIRDLLVNSGPLAVREDTQKGVVVHGLTLHQPKSSEEILHLLDNGNKNRTQHPTDMNATSSRSHAVFQIYLRQQDKTASINQNVRIAKMSLIDLAGSERASTSGAKGTRFVEGTNINRSLLALGNVINALADSKRKNQHIPYRNSKLTRLLKDSLGGNCQTIMIAAVSPSSVFYDDTYNTLKYANRAKDIKSSLKSNVLNVNNHITQYVKICNEQKAEILLLKEKLKAYEEQKAFTNENDQAKLMISNPQEKEIERFQEILNCLFQNREEIRQEYLKLEMLLKENELKSFYQQQCHKQIEMMCSEDKVEKATGKRDHRLAMLKTRRSYLEKRREEELKQFDENTNWLHRVEKEMGLLSQNGHIPKELKKDLHCHHLHLQNKDLKAQIRHMMDLACLQEQQHRQTEAVLNALLPTLRKQYCTLKEAGLSNAAFESDFKEIEHLVERKKVVVWADQTGEQPKQNDLPGISVLMTFSQLGPVQPIPCCSSSGGTNLVKIPTEKRTRRKLMPSPLKGQHTLKSPPSQSVQLNDSLSKELQPIVYTPEDCRKAFQNPSTVTLMKPSSFTTSFQAISSNINSDNCLKMLCEVAIPHNRRKECGQEDLDSTFTICEDIKSSKCKLPEQESLPNDNKDILQRLDPSSFSTKHSMPVPSMVPSYMAMTTAAKRKRKLTSSTSNSSLTADVNSGFAKRVRQDNSSEKHLQENKPTMEHKRNICKINPSMVRKFGRNISKGNLR

SEQ ID NO: 2662 - DNA, 3959 bp, Homo sapiens
ctagacgcgcggcgcattcaggttctcctggaccgtagtggtagtcgctggcccgagttagaggccagctgagaagtcttcgtgcttcagatttgtttacctacaaaatgcttcggtatccatatttttgtagaatgtataaagaatgcctttcatgttggttggaatctggcatacctaatttaggtgtctggccaaaaagaatacatactacagcagaaaaatatagagaatatgaagcccgggagcaaacagatcaaactcaagcccaggagttacacagatctcaagatagagattttgaaactatggctaaattacatattccagtaatggtggatgaagttgttcattgtttgtcaccacaaaaaggacagatttttctagatatgacatttggttcgggagggcacacaaaagccattctgcagaaggagtcagatattgttctctatgccttggacagagacccaacagcttatgcattagctgaacatctttcagagttgtatcctaaacaaatccgagctatgctgggccagttcagccaggcagaagccttattaatgaaagctggagtgcagccaggaacttttgatggagttcttatggatcttgggtgttcctccatgcaacttgatactcctgaaagaggtttttcccttcggaaagatggccctttggacgtgagaatggatggtggcaggtaccctgacatgcccactgctgctgatgttgtgaatgctttagatcaacaggcacttgcatctatcctaagaacatacggggaggagaagcatgccaagaaaatcgcttcagcaattgttcaggcacgcagcatctaccccatcaccagaacccagcagcttgccagcatcgttgcagaatactctgaaacatatttcccagtggcccaaactctttattaggaaaatggacgaattgaatagcaaatggagcatttcctccctctgctatttatacacggaaagacttactacagcgatctacccatattgccaccaagactttccaggctcttcgcatatttgtgaacaatgagctcaatgaactctacacgggactgaagacagctcagaagtttctgagacctggtggtcgtcttgttgccctctccttccattcactagaggatcgcatcgtcaaaagatttttgcttggaataagcatgacagaaagatttaacctaagtgttagacaacaagtgatgaaaacatctcaattgggttcagatcacgaaaacacggaagaagtctctatgagaagagctcctttaatgtgggaattgatacacaagaaggtacttagtccacaagatcaggatgtacaagataaccccagagggcgctcagccaagcttagagcagctatcaaattataagttatcatcatcttattcttcaaatttttttctcacaatttctctaatctttactcatgttatgtccctgaatgtcttggtataggtttaagtgtgggacagtctgaaaattgatagcatttagcatttcttttttctcaaaaagaaactgtaggaaatacatgacagagaaagttacactcagggagcagcagcacctccagactggaaaaatgtgttaatctttgcatcatattggactcttgaaggcaatccttcctctggccaggaaattttttaaaaaataatactgtgttgtgtttatctaaatacgtaaactcaagctaccaaagagaaagatgttgtaatcatatctgcatgtcctaaattttgaatttagatattccaatttgcatcagtctttctgtggctcaaataatgatgattatggaatgaattttaatgtccctacttgtgaataattagctttctcaaatgtaggctttttacaaattttaaattttaaaatattagtttaaatgtgtgttatactgataaaatttcatctttcaaattatagtctattattttaaagggatttttcagtatgatatgggccattttgttcatctatcgcaaagtaaaaatgtaaaatccttacagagaattgtttcacaaaacttatatttcatgtcaattgtatttattttaataatagctcacaatgcctttagtaagtaataaagtctcttattagaatcttgtattttttaattgagctaatcaaaataattcagccaagtctatttgaaatagaaaactgtctatttaatatagtaaaatcaatgctcccttaatgttgttacaaagatatggtaactgtaatatgggtaaaagtttattcaagaaaagagtacttggtagaagattctttaacaaattgaggagattgattcataattcacatgtcaattttttatagtaatatgtacttctaatttattatttatacttaaattgtgacctgaaagatgagttggagataattagtcaaagggcacatggagtatggaagggggcatgttgattaaccatacatagaaataaatattctcttagttatccttgaaatcatatttatactattaatttgctcagtgcacttttttcaaatacagaaaaaagattctccattatagttacaaattttaggttggtgaatccaagtgaatgaaatatcagcataactatgtgggcaaaatagatagaattaaatgcatgaattttcctcagacttattttatctgcctctgtaatatttaactttagtacccaggcttgttcactacttctgctttacaggctttatttaaatctgaacaatcctacagggaaatcagaattaggaaaaaaatctggagaacaatatggttgaaatagaaacaagagaatgcacctaggttaattccctgaatcctacttgaacattgtataaatttctctttgcatataatacatatttgtgaatgagacatattcccaaaaaattcttatctctgtatgtgattggaaaagaaaagatcacatttgtatattcaacaatctttcacctatttcataagtcattttttcaccctgtatagtatgggaattattttttatgttaaatagaaactgaatgtactgggttgaatggtgtcctctccaaaattcatgtacttcctggagcctcagtatgtgaccttatttggaaatactgtggttgtggttgtaagtagctaagatgaggtcatactggagcagggcaggcccttaatccaatatgactggtgttccttataagagaagatagggcgggcatggtggctcacgcctgtaatcccagcactgtgggaggccaagccaggcaaatcgcttgaggctgaggagttcaagaccagcctggccaacatggcgaaaacccatctctactaaaaataaaattagccatgcgtggtgcttgtaatgtcagctacccaggagtctgaggcacaagaatcactcgaacctgggaggtggaggttgcgagatcacaccactgcactccagtgtgagcaacagaacgagactctgtctcaaaaaaaaaaaaaaaaaagggaagaaagagaagatagagacacaggggagaatgccacatgaagctggaggcagagattggagtgatacattgtgggaaccctcagaagataggaaaaaagcatggaatagattctccctcagagttccagtagttgccaaccctgctaacatggttttgcacatctagcatccagaacagtgagaatgtatttctgctgttttaaggtacccagttcatggtaatttgttacagcaatcctaggaagctaatactctgacagaaaaaaatcttggataatatgcatgagaaaaatccttcaataaacacaaaattggtttcaaaatgttttcatgtaaaaataaattaacttttctgtaattagattgtgttttatagtaattcttgcctgcttcttagtctttgttgtaggatgcataataaaatacatgaatgagtttt

SEQ ID NO: 2663 - protein, 273 aa, Homo sapiens
MLRYPYFCRMYKECLSCWLESGIPNLGVWPKRIHTTAEKYREYEAREQTDQTQAQELHRSQDRDFETMAKLHIPVMVDEVVHCLSPQKGQIFLDMTFGSGGHTKAILQKESDIVLYALDRDPTAYALAEHLSELYPKQIRAMLGQFSQAEALLMKAGVQPGTFDGVLMDLGCSSMQLDTPERGFSLRKDGPLDVRMDGGRYPDMPTAADVVNALDQQALASILRTYGEEKHAKKIASAIVQARSIYPITRTQQLASIVAEYSETYFPVAQTLY

SEQ ID NO: 2664 - DNA, 532 bp, Homo sapiens
gatgatcacacccactttgcttcactttcatgtccagagctgcttagactgatttctgcaaagtgcacaggcattttcatgctgaggataaaggaccatgatcgcttgtctggacccagaaaatatttcccatttgctacacagatgccgtctcatccttccagagttcaagacttcagcagaaaaaaaaatcacctcattaaaggaaaattgtgccttatccccactactcgaagatgcaaccatctgcctggtcacagccacttttttcctttttttctcactccatcgtatgtgtgtgtggtggggcaggggataaggggaataatctctctccagtataagaagggatcaagaagcaacaggactgcgggatgggatagaaaataattttcatcttagcaatattgagtattccagtacatgagtattgtatgtttctcaattcacttagatccttaatttcccttagtcatgttttgtgattttcagtatacaaatcttgtactctgtattaaaccattcttgcatt

SEQ ID NO: 2665 - protein, 103 aa, Homo sapiens
MLRIKDHDRLSGPRKYFPFATQMPSHPSRVQDFSRKKNHLIKGKLCLIPTTRRCNHLPGHSHFFPFFLTPSYVCVVGQGIRGIISLQYKKGSRSNRTAGWDRK

SEQ ID NO: 2666 - DNA, 1693 bp, Homo sapiens
acgggccaaggcggcgcgtctcgggggtggagcctggaggtgaccgcgccgctgcaacgcccccaccccccgcggtcgcagtggttcagcccgagaacttttcattcataaaaagaaaagactccgcacggcgcgggtgagtcagaacccagcagccgtgtaccccgcagagccgccagccccgggcatgttccgagacttcggggaacccggcccgagctccgggaacggcggcgggtacggcggccccgcgcagcccccggccgcagcgcaggcagcccagcagaagttccacctggtgccaagcatcaacaccatgagtggcagtcaggagctgcagtggatggtacagcctcatttcctggggcccagcagttaccccaggcctctgacctaccctcagtacagccccccacaaccccggccaggagtcatccgggccctggggccgcctccaggggtacgtcgaaggccttgtgaacagatcagcccggaggaagaggagcgccgccgagtaaggcgcgagcggaacaagctggctgcggccaagtgcaggaaccggaggaaggaactgaccgacttcctgcaggcggagactgacaaactggaagatgagaaatctgggctgcagcgagagattgaggagctgcagaagcagaaggagcgcctagagctggtgctggaagcccaccgacccatctgcaaaatcccggaaggagccaaggagggggacacaggcagtaccagtggcaccagcagcccaccagccccctgccgccctgtaccttgtatctccctttccccagggcctgtgcttgaacctgaggcactgcacacccccacactcatgaccacaccctccctaactcctttcacccccagcctggtcttcacctaccccagcactcctgagccttgtgcctcagctcatcgcaagagtagcagcagcagcggagacccatcctctgacccccttggctctccaaccctcctcgctttgtgaggcgcctgagccctactccctgcagatgccaccctagccaatgtctcctccccttcccccaccggtccagctggcctggacagtatcccacatccaactccagcaacttcttctccatccctctaatgagactgaccatattgtgcttcacagtagagccagcttggggccaccaaagctgcccactgtttctcttgagctggcctctctagcacaatttgcactaaatcagagacaaaatatttcccatttgtgccagaggaatcctggcagcccagagactttgtagatccttagaggtcctctggagccctaaccccttccagatcactgccacactctccatcaccctcttcctgtgatccacccaaccctatctcctgacagaaggtgccactttacccacctagaacactaactcaccagccccactgccagcagcagcaggtgattggaccaggccattctgccgccccctcctgaaccgcacagctcaggaggcgcccttggcttctgtgatgagctgatctgcggatctcagctttgagaagccttcagctccagggaatccaagcctccacagcgagggcagctgctatttattttcctaaagagagtatttttatacaaacctaccaaaatggaataaaaggcttgaagctgtgaaaaaaaaaaaaaaaaaaaaaaaaa

SEQ ID NO: 2667 - protein, 271 aa, Homo sapiens
MFRDFGEPGPSSGNGGGYGGPAQPPAAAQAAQQKFHLVPSINTMSGSQELQWMVQPHFLGPSSYPRPLTYPQYSPPQPRPGVIRALGPPPGVRRRPCEQISPEEEERRRVRRERNKLAAAKCRNRRKELTDFLQAETDKLEDEKSGLQREIEELQKQKERLELVLEAHRPICKIPEGAKEGDTGSTSGTSSPPAPCRPVPCISLSPGPVLEPEALHTPTLMTTPSLTPFTPSLVFTYPSTPEPCASAHRKSSSSSGDPSSDPLGSPTLLAL

SEQ ID NO: 2668 - DNA, 1568 bp, Homo sapiens
agttgttgttgaggtggcgcggcgctaagatggcggcggcggcggcggcggccgtggcgggggtggggcgcggtggcggtggcgcggagccacggcaggagcggagccgggcccggggctgggccggcgtcgaacgcagcgaaggccggaggatggaaccaggtgaggagctggaagaggagggctctccaggtggccgtgaggatggcttcaccgccgagcacctggctgcagaggccatggcagctgacatggacccctggctagtgtttgatgcccgcacaacgcctgccactgagctggatgcctggctggccaagtacccaccatcccaagttacccgctatggggaccccggttcacccaactcagagcctgtgggctggattgcagtgtatgggcagggctacagccccaactccggggacgtgcagggcctgcaggcagcctgggaagctctgcagaccagtgggcggcccatcacaccgggtaccctgcgccagctcgccatcacccaccacgtgctctcgggcaagtggcttatgcatctggcaccgggcttcaagctggaccacgcctgggctggcattgcccgggccgtggttgaaggccggcttcaggtggccaaggtgagcccacgtgccaaggagggtgggcgccaggtcatctgtgtttacacggacgacttcacggaccgcttgggtgtactggaggcggattcagccatccgtgcagcgggcattaagtgcctgctcacctacaagcctgatgtctacacctacctgggcatctaccgggccaatcgctggcacctctgccccactctctatgagagccgtttccagcttgggggtagtgcccgtggctcccgagtgcttgaccgtgccaacaacgtggaactgacctagaggggccaaattggggagactgcccactcccccctccatgctggggttggatcctcctgtcttcctccttgtcccatgaaggccacaccccccagctctggggactcctaggtcacttgggaactacctgcatcttcagtccccttgaacttctgccctctgttcagggctgacacaagccccacaggctggggggctccggttccctgagggatgagccttcagcctccctttgtaatgctgctcctctccactgcccagcaccatgagttgggtgcagacacctagaaggagagacttcttggaacgctcatcccccgctatacctccccttcctcctgcatctccccttctttccttccccctcaggagagagaaaacttagtgcttccagcccttcttggagccttcatggtccaggggtaggggccccactggcctgagcatgccattttgaggggagggtagttgtgcctacttatcccctggcagaggggatgccaggaccatggacatgaggcttgcccatccctgccaacttacacagcctgtaccactgtccccccttccttggctactttgacatgtgcctgctcctggcatttcaataaaacccggcttgggtctgtgtcttgagtgttttttaaaaaaaaaaaaaaa

SEQ ID NO: 2669 - protein, 251 aa, Homo sapiens
MEPGEELEEEGSPGGREDGFTAEHLAAEAMAADMDPWLVFDARTTPATELDAWLAKYPPSQVTRYGDPGSPNSEPVGWIAVYGQGYSPNSGDVQGLQAAWEALQTSGRPITPGTLRQLAITHHVLSGKWLMHLAPGFKLDHAWAGIARAVVEGRLQVAKVSPRAKEGGRQVICVYTDDFTDRLGVLEADSAIRAAGIKCLLTYKPDVYTYLGIYRANRWHLCPTLYESRFQLGGSARGSRVLDRANNVELT

SEQ ID NO: 2670 - DNA, 988 bp, Homo sapiens
gggcgggagcggcggtccagactggggagggacgcgcaccggccaggaggcttcaagaggagggcactagggccctgcgagcggcgtcttaaccggcggcgctaggactccgcgggaaacggcgggggcggagcgggcggcaccaggacccaggggaaccgcgacgggcgggcggcgagcaggcccgggagccgggaggctgcgggcggcggcgctggacccgacgcggcgagagaggccccgagatgccgagcaagaagaagaagtacaacgcgcggttcccgccggcgcggatcaagaagatcatgcagacggacgaagagattgggaaggtggcggcggcggtgcctgtcatcatctcccgggcgctcgagctcttcctagagtcgctgttgaagaaggcctgccaggtgacccagtcgcggaacgcgaagaccatgaccacatcccacctgaagcagtgcatcgagctggagcagcagtttgacttcttgaaggacctggtggcatctgttcccgacatgcagggggacggggaagacaaccacatggatggggacaagggcgcccgcaggggccggaagccaggcagcggcggccggaagaacggtgggatgggaacgaaaagcaaggacaagaagctgtccgggacagactcggagcaggaggatgaatctgaggacacagatactgatggggaagaggagacatcacaacccccaccccaggccagccacccctctgcccactttcagagccccccgacacccttcctgcccttcgcctctactctgcctttgcccccagcgcccccgggcccctcagcacctgatgaagaggacgaagaagattacgactcctagcgccttctgccccccagaccatagccccttttagttggttttagttgctctggggggaggagagaaggtagagctgttcttaaatttattaaaaaaaaaaataaaagggaatctcagtgtctgtt

SEQ ID NO: 2671 - protein, 205 aa, Homo sapiens
MPSKKKKYNARFPPARIKKIMQTDEEIGKVAAAVPVIISRALELFLESLLKKACQVTQSRNAKTMTTSHLKQCIELEQQFDFLKDLVASVPDMQGDGEDNHMDGDKGARRGRKPGSGGRKNGGMGTKSKDKKLSGTDSEQEDESEDTDTDGEEETSQPPPQASHPSAHFQSPPTPFLPFASTLPLPPAPPGPSAPDEEDEEDYDS

SEQ ID NO: 2672 - DNA, 1726 bp, Homo sapiens
agttctacggtgcggatgggggatggggcaggatggggcaggacaccgatatgctaaatacctaccaacagttggttaggaccccgtcggtgcgaccagggcaggacgtgcggctccaggctccaggaaccagaacggggctgctcaagctgctgtcgaccgtctctcaggacaagcagggctgcctggggagtggtgatggtgtgccaaatcaagacctgcagcagaggcctcagagctcaaggcagacagcaaagaaggaccgcaagcccaggggccagagcaagaaaggacagggctctgaagagtctgaagatcacttcccgcttcttcctcggaaaccctccttccccttccagtgggcctgggagagcatcgccacagatgtccgggctgtgcttcagccaagctccccaacccctggccaccaagccctgcccatgccctcctcgttctcccagcgtcagtccaggcgcaagtccacggccaacctcccagaggcccatggctgctgctggaagacagaggcgcaaaacctgaaggcgagacagcagctgggagcctggggcggtgtctccatccctactggcaaaggggagctaggatcagagccccccagtggtctccagctgcctgggaggaggccaggatcaggatcggcgtccgacaagcaggtccagctgcaaagcctgggtgctgaggaggccgagaggggtctgagttctggggtgctgccccagcgccccaggagggggtcgatctcagaggaggagcaattttcagaggccacagaggaggctgaggagggagagcacaggactccctgcagaaggagggctggttgtcagagaaaggggcagatttctggagaggaagcctccgatgagggagaagtgcagggccagagccaggggagcagccccagcttcaacaacctccgaaggcgacaatggaggaagacaagggccaaggagctgcaggggccatgggacctggagaagctgcacaggcagctacagagagacctggactgtggcccccaaaagctgccctggaagactttgagggctgccttccaggcctccaagcggaatggaaaggcctatgcctcgggatacgatgaaactttcgtgtctgccaacctccctaatcgcaccttccacaaacgacaggaagccaccaggagcctgctgcaggcctgggagcggcagcggcaggaggagcggcagcaggccgagctgcggcgggcccggacacagcatgtacagcggcaggtggcccactgcctggcagcctacgcacccagagggagccggggccctggggcggcccagcgcaagctggaggagctgaggcgccaggagcgacagcgctttgctgagtaccaggcggagctgcaaggcatccagcacagggtgcaggcccggcccttcctgttccagcaggctatgcaggccaatgcccggctcaccgtcactcggcgcttctcccaggtgctgtcagcactggggctggatgaggagcagctgctgtctgaggcaggaaaggtggacagagagggcacccccaggaaacccaggagccacaggtcaatgggggtgagaatggagcactctcctcagaggcccccaaggacagaacccaccggcagccagcctgacaggcactacaaccccagcctggacccggagtgcagtccctgagataaaattaaaggctttatggc

SEQ ID NO: 2673 - protein, 556 aa, Homo sapiens
MGQDTDMLNTYQQLVRTPSVRPGQDVRLQAPGTRTGLLKLLSTVSQDKQGCLGSGDGVPNQDLQQRPQSSRQTAKKDRKPRGQSKKGQGSEESEDHFPLLPRKPSFPFQWAWESIATDVRAVLQPSSPTPGHQALPMPSSFSQRQSRRKSTANLPEAHGCCWKTEAQNLKARQQLGAWGGVSIPTGKGELGSEPPSGLQLPGRRPGSGSASDKQVQLQSLGAEEAERGLSSGVLPQRPRRGSISEEEQFSEATEEAEEGEHRTPCRRRAGCQRKGQISGEEASDEGEVQGQSQGSSPSFNNLRRRQWRKTRAKELQGPWDLEKLHRQLQRDLDCGPQKLPWKTLRAAFQASKRNGKAYASGYDETFVSANLPNRTFHKRQEATRSLLQAWERQRQEERQQAELRRARTQHVQRQVAHCLAAYAPRGSRGPGAAQRKLEELRRQERQRFAEYQAELQGIQHRVQARPFLFQQAMQANARLTVTRRFSQVLSALGLDEEQLLSEAGKVDREGTPRKPRSHRSMGVRMEHSPQRPPRTEPTGSQPDRHYNPSLDPECSP

SEQ ID NO: 2674 - DNA, 3561 bp, Homo sapiens
ttttgcgttgtctgggctcggcggcagccgggctcggagtggacgtgccactatggggtcgtccaagaagcatcgcggagagaaggaggcggccgggacgacggcggcggccggcaccgggggtgccaccgagcagccgccgcggcaccgggaacacaaaaaacacaagcaccggagtggcggcagtggcggtagcggtggcgaacgacggaagcggagccgggaacgtgggggcgagcgcgggagcgggcggcgcggggccgaagctgaggcccggagcagcacgcacgggcgggagcgcagccaggcagagccctccgagcggcgcgtgaagcgggagaagcgcgatgacggctacgaggccgctgccagctccaaaactagctcaggcgatgcctcctcactcagcatcgaggagactaacaaactccgggcaaagttggggctgaaacccttggaggttaatgccatcaagaaggaggcgggcaccaaggaggagcccgtgacagctgatgtcatcaaccctatggccttgcgacagcgagaggagctgcgggagaagctggcggctgccaaggagaagcgcctgctgaaccaaaagctggggaagataaagaccctaggagaggatgacccctggctggacgacactgcagcctggatcgagaggagccggcagctgcagaaggagaaggacctggcagagaagagggccaagttactggaggagatggaccaagagtttggtgtcagcactctggtggaggaggagttcgggcagaggcggcaggacctgtacagtgcccgggacctgcagggcctcaccgtggagcatgccattgattccttccgagaaggggagacaatgattcttaccctcaaggacaaaggcgtgctgcaggaggaggaggacgtgctggtgaacgtgaacctggtggataaggagcgggcagagaaaaatgtggagctgcggaagaagaagcctgactacctgccctatgccgaggacgagagcgtggacgacctggcgcagcaaaaacctcgctctatcctgtccaagtatgacgaagagcttgaaggggagcggccacattccttccgcttggagcagggcggcacggctgatggcctgcgggagcgggagctggaggagatccgggccaagctgcggctgcaggctcagtccctgagcacagtggggccccggctggcctccgaatacctcacgcctgaggagatggtgacctttaaaaagaccaagcggagggtgaagaaaatccgcaagaaggagaaggaggtagtagtgcgggcagatgacttgctgcctctcggggaccagactcaggatggggactttggttccagactgcggggacggggtcgccgccgagtgtccgaagtggaggaggagaaggagcctgtgcctcagcccctgccgtcggacgacacccgagtggagaacatggacatcagtgatgaggaggaaggtggagctccaccgccggggtccccgcaggtgctggaggaggacgaggcggagctggagctgcagaagcagctggagaagggacgccggctgcgacagttacagcagctacagcagctgcgagacagtggcgagaaggtggtggagattgtgaagaagctggagtctcgccagcggggctgggaggaggatgaggatcccgagcggaagggggccatcgtgttcaacgccacgtccgagttctgccgcaccttgggggagatccccacctacgggctggctggcaatcgcgaggagcaggaggagctcatggactttgaacgggatgaggagcgctcagccaacggtggctccgaatctgacggggaggagaacatcggctggagcacggtgaacctggacgaggagaagcagcagcaggatttctctgcttcctccaccaccatcctggacgaggaaccgatcgtgaatagggggctggcagctgccctgctcctgtgtcagaacaaagggctgctggagaccacagtgcagaaggtggcccgggtgaaggcccccaacaagtcgctgccctcagccgtgtactgcatcgaggataagatggccatcgatgacaagtacagccggagggaggaataccgaggcttcacacaggacttcaaggagaaggacggctacaaacccgacgttaagatcgaatacgtggatgagacgggccggaaactcacacccaaggaggctttccggcagctgtcgcaccgcttccatggcaagggctcaggcaagatgaagacagagcggcggatgaagaagctggacgaggaggcgctcctgaagaagatgagctccagcgacacgcccctgggcaccgtggccctgctccaggagaagcagaaggctcagaagaccccctacatcgtgctcagcggcagcggcaagagcatgaacgcgaacaccatcaccaagtgacagcgccctcccgccccggccctgcctcaaccttcatattaaataaagctccctccttattttttcctccctggtcgtggtacagattccagggttggatctttggttgggtgtggcacagagtctggctcctgctaggtgagacctggccgtcaaatgacacaaacaactaaacgatggaagagagagcgagcccgggtcctctaaggctccttccttctcccctggctgtcggtcacacctctgcagggccggctctctgatagaaagtggaaggcggttttagaaactcatcaccctgctctctcctggcctcgggggctgcacaggtcactgtcctgtaatgtctcccggtcagggcagcccaggactgcccagcctggtgggctggggattgggctttgggtagggcacaggtgccaccttctgtcctggctgtcctgtgccaccctggtctgtgtctagaggagtgaaactcccagggttgggctgggagtatttggtgcacgcggtatggggagggctgagctcagtgcctcctgggagacttgtcccgtgtacagtgacccagaaagatgagattccttggcctgaactctgtgatagagtgtgactgagctgctgggggacatgtgagcctcaaatccatagaaagacaaacggccaccttgggtgcccaggatactggtgcccggccccacgtacacccacatacttctcagatggctcccacattttaagattttaaaaatgaaaccaaaaaataaattgaagaaaactgtaaactttaaagaataatcagctgggcgcagtggctcatgcttgtaatcacagcactttaggaggctgaggcaggaggactgtttgagcccaggagtttgagaccaacctgagtaaggtggcaaaaccccatctctaccaaaaatacaaagattagccaggcgtggtggtgagcgcctgtagtcccagctacttgggatgctgaggtgggaggatcacttgaacctgggagacacaggctgcagtgggccctgattgagccaccacactgcagcctaggtgacagtcagaccctgtctcaaaaaaaataaaaaaaatttaaaata

SEQ ID NO: 2675 - protein, 800 aa, Homo sapiens
MGSSKKHRGEKEAAGTTAAAGTGGATEQPPRHREHKKHKHRSGGSGGSGGERRKRSRERGGERGSGRRGAEAEARSSTHGRERSQAEPSERRVKREKRDDGYEAAASSKTSSGDASSLSIEETNKLRAKLGLKPLEVNAIKKEAGTKEEPVTADVINPMALRQREELREKLAAAKEKRLLNQKLGKIKTLGEDDPWLDDTAAWIERSRQLQKEKDLAEKRAKLLEEMDQEFGVSTLVEEEFGQRRQDLYSARDLQGLTVEHAIDSFREGETMILTLKDKGVLQEEEDVLVNVNLVDKERAEKNVELRKKKPDYLPYAEDESVDDLAQQKPRSILSKYDEELEGERPHSFRLEQGGTADGLRERELEEIRAKLRLQAQSLSTVGPRLASEYLTPEEMVTFKKTKRRVKKIRKKEKEVVVRADDLLPLGDQTQDGDFGSRLRGRGRRRVSEVEEEKEPVPQPLPSDDTRVENMDISDEEEGGAPPPGSPQVLEEDEAELELQKQLEKGRRLRQLQQLQQLRDSGEKVVEIVKKLESRQRGWEEDEDPERKGAIVFNATSEFCRTLGEIPTYGLAGNREEQEELMDFERDEERSANGGSESDGEENIGWSTVNLDEEKQQQDFSASSTTILDEEPIVNRGLAAALLLCQNKGLLETTVQKVARVKAPNKSLPSAVYCIEDKMAIDDKYSRREEYRGFTQDFKEKDGYKPDVKIEYVDETGRKLTPKEAFRQLSHRFHGKGSGKMKTERRMKKLDEEALLKKMSSSDTPLGTVALLQEKQKAQKTPYIVLSGSGKSMNANTITK

SEQ ID NO: 2676 - DNA, 2836 bp, Homo sapiens
gttggactggtgggaactgggaacactggagacctgatttctaactgacgctaccgtcgcggccgccggcaagttcctttactgtgttttcttggttcagccttgaagtgagtcgtggacgatcctctctcagcgtccagcctagacggcggtgttgctccggcagcgttcctgggagccgagggccagagactaagttcctgggttctgagcctgccatccaaggaactcaggaggaggagttgacagtctcttcgttcctaaccagtgtgggacgacttcagcatgtctcaggccaccaagaggaagcatgtggtgaaggaggtgctaggggagcacatagtgccctccgaccagcagcagattgtcagggtactcaggaccccagggaacaatctgcatgaggtggagacagcccaagggcagcgcttcctggtgagcatgccctccaaataccgcaagaacatctggatcaagagaggggactttctcattgttgaccccattgaagagggagaaaaggtgaaggctgaaatctcgtttgtgctctgcaaggaccacgtgcgctctctgcagaaggaggggttttggcctgaggccttctctgaagtggctgagaaacacaacaacaggaacagacaaactcaaccagaactcccagctgagccacagttatcaggagaggagtccagctcagaagatgattctgacctgtttgttaacacaaaccgcagacagtatcatgagagtgaggaggagagtgaagaggaggaggcagcctgagactccaggacccaattctccacttgctcagggactggcccctggctcttctgggcttggacattcccagggtgctctgcacatcttcacccctgcatgaggacaaagcagggcacctctctgaactgatcttttgattcagagaattaaacccctggtgggttggtgacttgttctggtgtctgagtggctctctcgggggagggagattgtgatgaagtgaaaaactgctccctatttattagagaccttgtgggtgggtgggctgaatggggaggaaatgggaaatggctggagtctttcccaggtggtttgttctttcttattgggcacttagaaagtgccaggccgtgctctgggccttcttgcatgtgtttaacagctgggagcactcctgcttccttgcctgcttgcagttcataccaatttaagcattcaggatgacagccctaggacctaacacccacctgcctctaagagacgctcaggagcccatggtgcctcgtgctgctctccccacctttctagtcaccctgtgtacgggagtgctcacctccagctactgtgtccatccccacatacgacctcatctctcccactctgcaccatctatcacttccagaaggtggctggcaaatctctctatccttaactttgttttgaatggtccatccatctcctgactttatttgaaacctgattattccctgaggacattgattgtcttataaccttttaaatagaggctgcttttccaccctcacccttcattcttctaaccagccctgacattctcatgagtaaccttctgccttcacttccctcttgtgtagcatcaattccgtagtccaccctacacccctctgtctccctccattctgttccgctagtaaaaccctaaccctgggtaaacccaatcattcacctctgtgcccaaacccaagtcaccatcattaggtgagaaaacagccagcctggccaccagttgtaccttacgtttatcattacaaacctcagatggacactaagcactgcccagcagatctactctgggatgtctgtttcaaaacttctgtcttatctatcaattcccccttgtggtagttaccacaacacatgcctcattaagaaacagcaaccatcagagggaatgcctgcctccctgttaccagctctgcagatgtgcacatatcttcctgtcgtaagccaatgggacttaaaccttacctcttgtgttttggagactatctttttttttttttttttttttttgagagagtgtctccctgtgttgctcaggctggagtgcagtggtgtgatctcggctcactgtaaccttcacctactgggttcaagtaactctcctgcctcagcctcccgagtagcttggactacaggcgtgcaccaccacacctggctaactttttgtatttttagtagagacggggttttgccatgttgcccgggctggtctcgaactcctgaccttaaatgagcctcctgcctcagcctcccaaactgctgggattacaggcgtgtgccaccatgcctggctaatttttatattttcagtagagacgaggttttgccatgttggccaggctggtctcgaactcctgacctcaagtggtccacccaccttggcctcctagagtgctgggattacaggtgtgagccactgtgcccagcctcttttgctttcttaaagactttggtcgggtatttgtgttgttgagtattgtgtctgggtgtgggtatttgattctttttttgttttgtgtttttggctgtcctgtctattggatgtgatatgttatggatgtgatgtgttagtgtcgagcgtgctgtagaatctcccatctctgaaacaggcgtgaaaacctgtactgattcccacgtcctccagctaccacttcatttgtctgtttctcatttacttcctcttatagcgtggctttaaacatatatacatttgtatatatgtatatatgaatataatgtataaaatgtatgtagatgtatatacaaaaaataaacgagatgggttaaagat

SEQ ID NO: 2677 - protein, 165 aa, Homo sapiens
MSQATKRKHVVKEVLGEHIVPSDQQQIVRVLRTPGNNLHEVETAQGQRFLVSMPSKYRKNIWIKRGDFLIVDPIEEGEKVKAEISFVLCKDHVRSLQKEGFWPEAFSEVAEKHNNRNRQTQPELPAEPQLSGEESSSEDDSDLFVNTNRRQYHESEEESEEEEAA

SEQ ID NO: 2678 - DNA, 1192 bp, Homo sapiens
ccagtgttcccagttcccaccagtccaactgcgaggagtgcgacgtgagtctgagtctgatccctccgaaaaccgtacttccggcgctgtctcggaggcctcccgtcccctcccttgtccgtcttctaactcttccccacgccaggtccgtcaagcctaagtccttgagttccgggtccgggcagcagagaaaggaagtcctctccctggaggcctatctccctcagaacggcgcgagaagcgagaccttagaaggcagcgcttcccgcgaaggaccggaaaggagcgcctactaaggacgccgtcgaggtccggggcgcctcaactctatagctctaactggctagaagtgcccaacgtggaatgtttcttttttaaaggcggctcttgaagcgacccggaagcggaagtggaagaaagttctagtggcttgaggtatccgcagagcggccgggtggcgggaggaaccgttacgggaactgaagttgcggattaagcctgatcaagatgacaacctcccaaaagcaccgagacttcgtggcagagcccatgggggagaagccagtggggagcctggctgggattggtgaagtcctgggcaagaagctggaggaaaggggttttgacaaggcctatgttgtccttggccagtttctggtgctaaagaaagatgaagacctcttccgggaatggctgaaagacacttgtggcgccaatgccaagcagtcccgggactgcttcggatgccttcgagagtggtgcgacgccttcttgtgatgctctctgggaagctctcaatccccagccctcatccagagtttgcagccgagtagggactcctcccctgtcctctacgaaggaaaagattgctattgtcgtactcacctccgacgtactccggggtcttttgggagttttctcccctaaccatttcaacttttttttggattctcgctcttgcatgcctcccccgtcctttttcccttgccagttccctggtgacagttaccagctttcctgaatggattcccggccccatccctcacccccaccctcactttcaatccgtttgataccatttggctccttttttggcagaacagtcactgtccttgtaaagttttttagatcaataaagtcagtggctttcaaaaaaaaaaaaaaaaaaaaaaaaaaaaaaaaaaaaaaaaaa

SEQ ID NO: 2679 - protein, 89 aa, Homo sapiens
MTTSQKHRDFVAEPMGEKPVGSLAGIGEVLGKKLEERGFDKAYVVLGQFLVLKKDEDLFREWLKDTCGANAKQSRDCFGCLREWCDAFL

SEQ ID NO: 2680 - DNA, 627 bp, Homo sapiens
gcggccgcaagctcggcactcacggctctgagggctccgacggcactgacggccatggcgcgttcgaacctcccgctggcgctgggcctggccctggtcgcattctgcctcctggcgctgccacgcgacgcccgggcccggccgcaggagcgcatggtcggagaactccgggacctgtcgcccgacgacccgcaggtgcagaaggcggcgcaggcggccgtggccagctacaacatgggcagcaacagcatctactacttccgagacacgcacatcatcaaggcgcagagccagctggtggccggcatcaagtacttcctgacgatggagatggggagcacagactgccgcaagaccagggtcactggagaccacgtcgacctcaccacttgccccctggcagcaggggcgcagcaggagaagctgcgctgtgactttgaggtccttgtggttccctggcagaactcctctcagctcctaaagcacaactgtgtgcagatgtgataagtccccgagggcgaaggccattgggtttggggccatggtggagggcacttcaggtccgtgggccgtatctgtcacaataaatggccagtgctgcttcttgcaaaaaaaaaaaaaaaaaaa

SEQ ID NO: 2681 - protein, 149 aa, Homo sapiens
MARSNLPLALGLALVAFCLLALPRDARARPQERMVGELRDLSPDDPQVQKAAQAAVASYNMGSNSIYYFRDTHIIKAQSQLVAGIKYFLTMEMGSTDCRKTRVTGDHVDLTTCPLAAGAQQEKLRCDFEVLVVPWQNSSQLLKHNCVQM

SEQ ID NO: 2682 - DNA, 2630 bp, Homo sapiens
gaatagtcaggcctttctggaagcccagtgccacagtctgcactgagcttggctcaggaaagaagggaaatccaggcggggcctgttgggcccaggtcttgagctcttttggctccagagttcccaacacagtcatggatcaaaactcagtgcctgaaaaggctcagaatgaggcagacaccaataacgcagataggttctttcgctctcactcatcacccccacaccacaggccaggccacagcagagctctccaccattacgagttgcaccatcacggcgtgccccaccaacgtggtgaatctcaccaccctccggagttccaagacttccacgaccaagccttgtcctcccatgtccaccaatctcaccaccacagcgaggcacggaatcacggcagagcccatggccccacaggctttggtctggctccctctcaaggcgccgtcccctcccaccgttcctacggtgaggactaccatgatgagctccaacgtgatggcaggaggcatcatgatgggtcccaatacagtgggttccatcagcagagtgactcccattaccatagggggtctcaccatggcagaccccaatatctcggtgagaatttatcccactattcctctggcgtgccccaccacggtgaggcttcccaccatggtgggtcctacctcccccatggacccaatccctacagtgagtccttccaccacagcgaggcttcccaccttagcgggctccaacacgatgagtcccagcatcaccaagtcccccaccgtggctggccccaccatcaccaagtccaccaccatggcaggtcccgtcatcatgaagcccaccagcatggaaagtctcctcatcacggagagaccatttcccctcattcctctgtggggtcctaccagcgtgggatatctgactatcacagcgagtaccaccaaggtgatcaccaccccagtgagtaccaccatggcgaccatccccaccacacacagcaccactaccaccagacccaccggcaccgagactaccatcagcaccaagaccaccacggcgcgtatcattccagttacctccatggcgactacgtccagagcacttcccaactctctatcccacacacatcccggagcctgattcacgatgcccccggccctgctgcttctcgtacaggagtcttcccctatcacatagcacacccacggggctcggctcacagcatgactcggtcctccagcacaatccgctcacgtgtcacccagatgtccaaaaaagtccatacccaggatatctccaccaaacattcagaagactggggcaaagaagaagggcaatttcagaaacgcaaaaccggccggctccagcggacccgcaagaagggacactctaccaatctcttccagtggctgtgggaaaagctaaccttcctcattcagggcttccgggaaatgatccggaacctgacccaatccttggcctttgaaactttcatcttcttcgttgtctgcctcaacaccgtcatgctggtggcccagaccttcgctgaagtcgagatccggggcgagtggtacttcatggccttggactccatattcttctgcatctacgtggtggaagccctgctcaagatcatcgccctgggcctctcgtacttctttgacttctggaacaatttggacttcttcattatggccatggccgtgctggacttcttgctgatgcagacccactccttcgccatctaccaccaaagcctcttccggatcctcaaggtcttcaagagcttgcgggccctgagggcaatccgggtcctgcggaggctcagcttcctgaccagcgtccaggaagtgacagggaccctgggccagtccttgccgtccatcgcagccatcctcatcctcatgtttacctgcctcttcctcttctccgcggtcctccgggcactgttccgcaaatctgaccccaagcgcttccagaacatcttcaccaccatcttcaccctcttcaccttgctcacgctggatgactggtccctcatctacatggacagccgtgcccagggcgcctggtacatcattcccatcctcataatttacatcatcatccagtacttcatcttcctcaacctggtgattactgtcctggtggatagcttccagacggcgctgttcaaaggccttgagaaagcgaagcaggagagggccgcccggatccaagagaagctgctggaagactcactgacggagctcagagctgcagagcccaaagaggtggcgagtgaaggcaccatgctgaagcggctcatcgagaaaaagtttgggaccatgactgagaagcagcaggagctcctgttccattacctgcagctggtggcaagcgtggagcaggagcagcagaagttccgctcccaggcagccgtcatcgatgagattgtggacaccacatttgaggctggagaagaggacttcaggaattgaccccaggaggacaccagatacagacttcagcccctggcagtctgcccacctgggtgcactgggacgggtccccagatctgctggaatgattgtccgggccctgcagagcaggggccccaacagagtttttaaaccccaaaaaaaaaaaaaaaa

SEQ ID NO: 2683 - protein, 780 aa, Homo sapiens
MDQNSVPEKAQNEADTNNADRFFRSHSSPPHHRPGHSRALHHYELHHHGVPHQRGESHHPPEFQDFHDQALSSHVHQSHHHSEARNHGRAHGPTGFGLAPSQGAVPSHRSYGEDYHDELQRDGRRHHDGSQYSGFHQQSDSHYHRGSHHGRPQYLGENLSHYSSGVPHHGEASHHGGSYLPHGPNPYSESFHHSEASHLSGLQHDESQHHQVPHRGWPHHHQVHHHGRSRHHEAHQHGKSPHHGETISPHSSVGSYQRGISDYHSEYHQGDHHPSEYHHGDHPHHTQHHYHQTHRHRDYHQHQDHHGAYHSSYLHGDYVQSTSQLSIPHTSRSLIHDAPGPAASRTGVFPYHIAHPRGSAHSMTRSSSTIRSRVTQMSKKVHTQDISTKHSEDWGKEEGQFQKRKTGRLQRTRKKGHSTNLFQWLWEKLTFLIQGFREMIRNLTQSLAFETFIFFVVCLNTVMLVAQTFAEVEIRGEWYFMALDSIFFCIYVVEALLKIIALGLSYFFDFWNNLDFFIMAMAVLDFLLMQTHSFAIYHQSLFRILKVFKSLRALRAIRVLRRLSFLTSVQEVTGTLGQSLPSIAAILILMFTCLFLFSAVLRALFRKSDPKRFQNIFTTIFTLFTLLTLDDWSLIYMDSRAQGAWYIIPILIIYIIIQYFIFLNLVITVLVDSFQTALFKGLEKAKQERAARIQEKLLEDSLTELRAAEPKEVASEGTMLKRLIEKKFGTMTEKQQELLFHYLQLVASVEQEQQKFRSQAAVIDEIVDTTFEAGEEDFRN

SEQ ID NO: 2684 - DNA, 2103 bp, Homo sapiens
ctagcggacgctgccacctgatcccatccaggcgctgagaggcaagccaccggcactcggcgcgcagggccccgggcaccctcggaccccgtgcggatttcgagacaagggtccagagatagcggcggccgcccccaacccgggccagaggcagagcccaggcgtgcggtgcttctcgggaacactggccctgctaccagagccgcaggatcccccatgagtgcctgtgaagggagtcctggatagtgaggccctggctggtccaggggtgggtactccgccatgccacccatcctccagcgcctgcagcaggccaccaagatgatgagccgccggaaaatcctgctgctggtgctagggtgcagcaccgtaagccttctcatccaccagggggcgcagctcagctggtaccccaagctgttccccttgagctgccctcctctgcggaactcgccgccgcgccccaagcacatgactgtggccttcctgaagactcacaagacggcaggcacgacggtgcagaacatcctgtttcgctttgccgagcgccacaacctgacggtggccctgccgcacccgagctgcgagcaccagttctgctacccccgcaacttctcggcgcacttcgtgcacccggccacgcggccgccgcacgtgctggccagccacctgcgcttcgaccgtgcggagctggagcgcctcatgccgcccagcaccgtctatgtcaccatcctgcgcgagccggccgccatgttcgagtcgctcttcagctactacaaccagtactgcccggccttccggcgcgtgcccaacgcctcgctcgaggccttcctgcgcgcgcccgaggcatactaccgcgctggcgagcacttcgccatgttcgcacacaacacgctggcctacgacctgggcggcgacaatgagcgcagcccgcgcgacgacgccgcctacctggcgggcctcatccgccaggtggaggaggttttctcgctcgtcatgatcgccgagtacttcgacgagtcgctagtgctgctgcggcgcctactggcctgggacctggacgacgtgctctacgccaagctcaacgcgcgcgccgccagctcgcgcctggccgccatccccgcggcgctggcgcgggcggcgcgcacctggaacgccctggacgccggcctctacgaccacttcaacgccaccttctggcgccacgtggcgcgcgcgggccgcgcgtgcgtggagcgcgaggcgcgcgagctgcgcgaggcccgccagcgcctactgcggcgctgcttcggggacgagccactgctgcggcctgccgcgcagatccgcaccaagcagctgcagccatggcagcccagccgcaaggtggacattatgggctatgacctgcccggcggcggcgccggcccggccaccgaggcctgcctcaagctggccatgcccgaggtccagtactcgaactacctgttgcgcaagcagaagcgccggggcggtgcgcgggctcggcccgagcccgtcctggacaatcccccgcctcggcccatccgagtgctgcctcgcggccctcaaggtccctgagctccgcaggcctccaggagtatgggtcctgccctgccctcccaggagtccagccaggggctgcctccatgtcctgcccccatgagagccctttcttttcaatgggcttgagtccctcgctgaactttggggtacgcctccctatctgagcccccgctcccgatcgtgggctgaaccttgccttcgggcacggcgctgataggctggatccagcgctgggccaccctctccttcccagctggttggtgattttgacaagaggcctgagggctgtccagaactgctcaccctgcctttttctgggggctgagcccccacaacctgtcttttccaagtggataagcccaggccccatggagagaggctcagccctagggaaaggctgctcttgctctccctcccagggcttgaggctccctatacttttctgtcttccaggttctaccctccccacagacctaagctgctcccagtctcccagaaccaagagttcttgggttgggatttttgtttggttggtttttc

SEQ ID NO: 2685 - protein, 431 aa, Homo sapiens
MPPILQRLQQATKMMSRRKILLLVLGCSTVSLLIHQGAQLSWYPKLFPLSCPPLRNSPPRPKHMTVAFLKTHKTAGTTVQNILFRFAERHNLTVALPHPSCEHQFCYPRNFSAHFVHPATRPPHVLASHLRFDRAELERLMPPSTVYVTILREPAAMFESLFSYYNQYCPAFRRVPNASLEAFLRAPEAYYRAGEHFAMFAHNTLAYDLGGDNERSPRDDAAYLAGLIRQVEEVFSLVMIAEYFDESLVLLRRLLAWDLDDVLYAKLNARAASSRLAAIPAALARAARTWNALDAGLYDHFNATFWRHVARAGRACVEREARELREARQRLLRRCFGDEPLLRPAAQIRTKQLQPWQPSRKVDIMGYDLPGGGAGPATEACLKLAMPEVQYSNYLLRKQKRRGGARARPEPVLDNPPPRPIRVLPRGPQGP

SEQ ID NO: 2686 - DNA, 2902 bp, Homo sapiens
cccagcttccgggttggtcgcgcgccttcctgcggctaagatggcgacggagcatcccgagcctcccaaagcagaattgcagctgccgccgccgccacctccaggccactatggcgcctgggctgcccaggagcttcaggccaagttggcagagatcggagctccgatccagggtaatcgcgaggagctggtggagcggctgcagagctacacccgccagactggcatcgtgctgaatcggccggttttgagaggggaagatggggacaaagccgctccacctcccatgtcggcacagctccctggaattcccatgccaccaccacctttgggactcccccctctgcagcctcctccgccacccccaccacctccaccaggccttggccttggctttcctatggcccacccaccaaatttggggcccccgcctcctctccgtgtgggtgagccagtggcactgtcagaggaggagcggctgaagttggctcagcagcaggcggcattgctgatgcagcaggaggagcgtgccaagcagcagggagatcattcgctgaaggaacatgagctcttggagcagcagaagcgggcagctgtgttactggagcaggaacgacagcaggagattgccaagatgggcaccccagtccctcggcccccacaagacatgggccagattggtgtgcgcactcctctgggtcctcgagtagctgctccagtgggcccagtgggccccactcctacagttttgcccatgggagcccctgttccccggcctcgtggtcccccaccgccccctggagatgagaacagagagatggatgacccctctgtgggccccaagatcccccaggctttggagaagatcctgcagctgaaggagagccgccaggaagagatgaattctcagcaggaggaagaggaaatggaaacagatgctcgctcgtccctgggccagtcagcgtcagagactgaggaggacacagtgtccgtatctaaaaaggagaaaaaccggaagcgtaggaaccgaaagaagaagaaaaagccccagcgggtgcgaggggtgtcctctgagagctctggggaccgggagaaagactcaacccggtcccgtggctctgattccccagcagctgatgttgagattgagtatgtgactgaagaacctgaaatttacgagcccaactttatcttctttaagaggatctttgaggcttttaagctcactgatgatgtgaagaaggagaaagagaaggagccagagaaacttgacaaactggagaactctgcagcccccaagaagaagggatttgaagaggagcacaaggacagtgatgatgacagcagtgatgacgagcaggaaaagaagccagaagcccccaagctgtccaagaagaagttgcgccgaatgaaccgcttcactgtggctgaactcaagcagctggtggctcggcccgatgtcgtggagatgcacgatgtgacagcgcaggaccctaagctcttggttcacctcaaggccactcggaactctgtgcctgtgccacgccactggtgttttaagcgcaaatacctgcagggcaaacggggcattgagaagccccccttcgagctgccagacttcatcaaacgcacaggcatccaggagatgcgagaggccctgcaggagaaggaagaacagaagaccatgaagtcaaaaatgcgagagaaagttcggcctaagatgggcaaaattgacatcgactaccagaaactgcatgatgccttcttcaagtggcagaccaagccaaagctgaccatccatggggacctgtactatgaggggaaggagttcgagacacgactgaaggagaagaagccaggagatctgtctgatgagctaaggatttccttggggatgccagtaggaccaaatgcccacaaggtccctcccccatggctgattgccatgcagcgatatggaccacccccatcgtatcccaacctgaaaatccctgggctgaactcgcccatccctgagagctgttcctttgggtaccatgctggtggctggggcaaacctccagtggatgagactgggaaaccgctctatggggacgtgtttggaaccaatgctgctgaatttcagaccaagactgaggaagaagagattgatcggaccccttggggggaactggaaccatctgatgaagaatcctcagaagaagaggaagaggaagaaagtgatgaagacaaaccagatgagacaggctttattacccctgcagacagtggccttatcactcctggaggcttttcatcagtgcctgctggaatggagacccctgaactcattgagctgaggaagaagaagattgaggaggcgatggacggaagtgagacacctcagctcttcactgtgttgccagagaagagaacagccactgttggaggggccatgatgggatcaacccacatttatgacatgtccacggttatgagccggaagggcccggctcctgagctgcaaggtgtggaagtggcgctggcgcctgaagagttggagctggatcctatggccatgacccagaagtatgaggagcatgtgcgggagcagcaggctcaagtagagaaggaggacttcagtgacatggtggctgagcacgctgccaaacagaagcaaaaaaaacggaaagctcagccccaggacagccgtgggggcagcaagaaatataaggagttcaagttttaggtcccctcacactagccctttttttggccctacgtctggatgcctgggcttcacacaagaaccacctctcccgcagttcccaaggacttgtcatttcatgttcttattttagacctgttttgtaaataaagctgtttcccaaggaaagagatgaatatttaacactaaaaaaaa

SEQ ID NO: 2687 - protein, 895 aa, Homo sapiens
MATEHPEPPKAELQLPPPPPPGHYGAWAAQELQAKLAEIGAPIQGNREELVERLQSYTRQTGIVLNRPVLRGEDGDKAAPPPMSAQLPGIPMPPPPLGLPPLQPPPPPPPPPPGLGLGFPMAHPPNLGPPPPLRVGEPVALSEEERLKLAQQQAALLMQQEERAKQQGDHSLKEHELLEQQKRAAVLLEQERQQEIAKMGTPVPRPPQDMGQIGVRTPLGPRVAAPVGPVGPTPTVLPMGAPVPRPRGPPPPPGDENREMDDPSVGPKIPQALEKILQLKESRQEEMNSQQEEEEMETDARSSLGQSASETEEDTVSVSKKEKNRKRRNRKKKKKPQRVRGVSSESSGDREKDSTRSRGSDSPAADVEIEYVTEEPEIYEPNFIFFKRIFEAFKLTDDVKKEKEKEPEKLDKLENSAAPKKKGFEEEHKDSDDDSSDDEQEKKPEAPKLSKKKLRRMNRFTVAELKQLVARPDVVEMHDVTAQDPKLLVHLKATRNSVPVPRHWCFKRKYLQGKRGIEKPPFELPDFIKRTGIQEMREALQEKEEQKTMKSKMREKVRPKMGKIDIDYQKLHDAFFKWQTKPKLTIHGDLYYEGKEFETRLKEKKPGDLSDELRISLGMPVGPNAHKVPPPWLIAMQRYGPPPSYPNLKIPGLNSPIPESCSFGYHAGGWGKPPVDETGKPLYGDVFGTNAAEFQTKTEEEEIDRTPWGELEPSDEESSEEEEEEESDEDKPDETGFITPADSGLITPGGFSSVPAGMETPELIELRKKKIEEAMDGSETPQLFTVLPEKRTATVGGAMMGSTHIYDMSTVMSRKGPAPELQGVEVALAPEELELDPMAMTQKYEEHVREQQAQVEKEDFSDMVAEHAAKQKQKKRKAQPQDSRGGSKKYKEFKF

SEQ ID NO: 2688 - DNA, 4488 bp, Homo sapiens
gcagctcgctggctgctcgcgctcgggcaggcgggctgaggaggctgccgcgcccccgccgccgccgccgcgggggaagcctgggagccagatcggcgtcgcctcggcctccgtaacccccgcctagccgggccatggcggaacgcggaggggcgggcggtggtcccggaggcgccgggggcggcagcggccagcggggatccggggtcgcccagtcccctcagcagccgccgccgcagcagcagcagcagcagccgccgcagcagccgacgccccccaagctggcccaggccacctcgtcgtcctcgtccacctcggcggcggctgcctcctcctcgtcctcgtctacctccacctccatggccgtggcggtggcctcgggctccgcgcctcccggtggcccggggccaggccgcacccccgccccggtgcagatgaacctgtacgccacctgggaggtggaccggagctcgtccagctgcgtgcctaggctattcagcttgaccctgaagaaactcgtcatgctaaaagaaatggacaaagatcttaactcagtggtcatcgctgtgaagctgcagggttcaaaaagaattcttcgctccaacgagatcgtccttccagctagtggactggtggaaacagagctccaattaaccttctcccttcagtaccctcatttccttaagcgagatgccaacaagctgcagatcatgctgcaaaggagaaaacgttacaagaatcggaccatcttgggctataagaccttggccgtgggactcatcaacatggcagaggtgatgcagcatcctaatgaaggcgcactggtgcttggcctacacagcaacgtgaaggatgtctctgtgcctgtggcagaaataaagatctactccctgtccagccaacccattgaccatgaaggaatcaaatccaagctttctgatcgttctcctgatattgacaattattctgaggaagaggaagagagtttctcatcagaacaggaaggcagtgatgatccattgcatgggcaggacttgttctacgaagacgaagatctccggaaagtgaagaagacccggaggaaactaacctcaacctctgccatcacaaggcaacctaacatcaaacagaagtttgtggccctcctgaagcggtttaaagtttcagatgaggtgggctttgggctggagcatgtgtcccgcgagcagatccgggaagtggaagaggacttggatgaattgtatgacagtctggagatgtacaaccccagcgacagtggccctgagatggaggagacagaaagcatcctcagcacgccaaagcccaagctcaagcctttctttgaggggatgtcgcagtccagctcccagacggagattggcagcctcaacagcaaaggcagcctcggaaaagacaccaccagccctatggaattggctgctctagaaaaaattaaatctacttggattaaaaaccaagatgacagcttgactgaaacagacactctggaaatcactgaccaggacatgtttggagatgccagcacgagtctggttgtgccggagaaagtcaaaactcccatgaagtccagtaaaacggatctccagggctctgcctcccccagcaaagtggagggggtgcacacaccccggcagaagaggagcacgcccctgaaggagcggcagctctccaagcccctaagtgagaggaccaacagttccgacagcgagcgctccccagatctgggccacagcacgcagattccaagaaaggtggtgtatgaccagctcaatcagatcctggtgtcagatgcagccctcccagaaaatgtcattctggtgaacaccactgactggcagggccagtatgtggctgagctgctccaggaccagcggaagcctgtggtgtgcacctgctccaccgtggaggtccaggccgtgctgtccgccctgctcacccggatccagcgctactgcaactgcaactcttccatgccgaggccagtgaaggtggctgctgtgggaggccagagctacctgagctccatcctcaggttctttgtcaagtccctggccaacaagacctccgactggcttggctacatgcgcttcctcatcatccccctcggttctcaccctgtggccaaatacttggggtcagtcgacagtaaatacagtagttccttcctggattctggttggagagatctgttcagtcgctcggagccaccagtgtcagagcaactggacgtggcagggcgggtgatgcagtacgtcaacggggcagccacgacacaccagcttcccgtggccgaagccatgctgacttgccggcataagttccctgatgaagactcctatcagaagtttattcccttcattggcgtggtgaaggtgggtctggttgaagactctccctccacagcaggcgatggggacgattctcctgtggtcagccttactgtgccctccacatcaccaccctccagctcgggcctgagccgagacgccacggccacccctccctcctccccatctatgagcagcgccctggccatcgtggggagccctaatagcccatatggggacgtgattggcctccaggtggactactggctgggccaccccggggagcggaggagggaaggcgacaagagggacgccagctcgaagaacaccctcaagagtgtcttccgctcagtgcaggtgtcccgcctgccccatagtggggaggcccagctttctggcaccatggccatgactgtggtcaccaaagaaaagaacaagaaagttcccaccatcttcctgagcaagaaaccccgagaaaaggaggtggattctaagagccaggtcattgaaggcatcagccgcctcatctgctcagccaagcagcagcagactatgctgagagtgtccatcgatggggtcgagtggagtgacatcaagttcttccagctggcagcccagtggcccacccatgtcaagcactttccagtgggactcttcagtggcagcaaggccacctgaggccctgtctcccagccactttccctcctggcactgccaccagcctcaccgcctgcgggcagggggaggccagcaggcccgggcccagcaccccttccctggcaccagggtctgcctctcactcgcccaggtcccgaaggacactgccacagggacgccttccctcccctcccctccagcccacccctgcacagcccctcctccttcccgcttttccccttctccctcctgctccaggcccaaggcgtgttggttttgccttctggtgcccatagtcccctggactgagtcccccaggccttccttcacccgacttccaaactcttccttgtggtatcagtttccttctcggaaatgagaaagctggaatcctggtccccagcaggagagcctagtcctcccccagcccctccagccaccagggtgtcctctaggatgcagctgccagatccactcactctgctgcctccagcaggacccaaggccactttcaactcttatggggttctccacctgccccagagcttctcaagggagggtaagggggcaccctgagcccacaggacccctacttcacagctcacaggggcaggaggcagctcccctgcctccaggaccctgttgctatggtgacacagcgtttctaggacagaggggcctcccagtctccccccaccacccgtgcacgacttcctcaccacccccaggttccctgcagatgtcgtgtgtgtcctgagtgtttctttggttctttgcacgccaagtctcttggttgtaccatgtgacacaccctgtgcactggtcgctgtcttcgtggcttccacccttgttaatgatgctcctgcctctgcctcccagcccctcacccagcacagctctgcctggacttggagagatgggaggcagacccccaccaccatacatgctgtctgtggcccctcagacattctgtttcatctcccattcatctccctcctcccaccgtgtcagtttttctgcctttccctgctctgttcttccccctccttaggccccagcctgggcccagacccatcctcccagccaggtttccctccagcaggctccttccctccctgtcacctccctctcaccaacccggggtctgagcccctcattcctgaccgtccgtgttctcaggagtggttgaggacacagggccccagcccagccctctgcaccccccagcccggccatctgcgccccacagcccctttggagcttttctcttgtcctctcactccttcccagaagtttttgcacagaacttcattttgaaagtgtttttctcattctccatacctcccccaagctctcctccagcccttcccagggctcagccctgctgtcctgagcgtctcctgggccagagagaggagatgggggtgggagggactgagttgatgttgggtttttcattcaataaattggtgatttcttaccg

SEQ ID NO: 2689 - protein, 963 aa, Homo sapiens
MAERGGAGGGPGGAGGGSGQRGSGVAQSPQQPPPQQQQQQPPQQPTPPKLAQATSSSSSTSAAAASSSSSSTSTSMAVAVASGSAPPGGPGPGRTPAPVQMNLYATWEVDRSSSSCVPRLFSLTLKKLVMLKEMDKDLNSVVIAVKLQGSKRILRSNEIVLPASGLVETELQLTFSLQYPHFLKRDANKLQIMLQRRKRYKNRTILGYKTLAVGLINMAEVMQHPNEGALVLGLHSNVKDVSVPVAEIKIYSLSSQPIDHEGIKSKLSDRSPDIDNYSEEEEESFSSEQEGSDDPLHGQDLFYEDEDLRKVKKTRRKLTSTSAITRQPNIKQKFVALLKRFKVSDEVGFGLEHVSREQIREVEEDLDELYDSLEMYNPSDSGPEMEETESILSTPKPKLKPFFEGMSQSSSQTEIGSLNSKGSLGKDTTSPMELAALEKIKSTWIKNQDDSLTETDTLEITDQDMFGDASTSLVVPEKVKTPMKSSKTDLQGSASPSKVEGVHTPRQKRSTPLKERQLSKPLSERTNSSDSERSPDLGHSTQIPRKVVYDQLNQILVSDAALPENVILVNTTDWQGQYVAELLQDQRKPVVCTCSTVEVQAVLSALLTRIQRYCNCNSSMPRPVKVAAVGGQSYLSSILRFFVKSLANKTSDWLGYMRFLIIPLGSHPVAKYLGSVDSKYSSSFLDSGWRDLFSRSEPPVSEQLDVAGRVMQYVNGAATTHQLPVAEAMLTCRHKFPDEDSYQKFIPFIGVVKVGLVEDSPSTAGDGDDSPVVSLTVPSTSPPSSSGLSRDATATPPSSPSMSSALAIVGSPNSPYGDVIGLQVDYWLGHPGERRREGDKRDASSKNTLKSVFRSVQVSRLPHSGEAQLSGTMAMTVVTKEKNKKVPTIFLSKKPREKEVDSKSQVIEGISRLICSAKQQQTMLRVSIDGVEWSDIKFFQLAAQWPTHVKHFPVGLFSGSKAT

SEQ ID NO: 2690 - DNA, 2992 bp, Homo sapiens
ggcgggatggaggcggcgggaccggctcgcgggtgcgggtccgggtgaagcgggaggcagccagagtcggagccgggcccgagcaccaggcgcaggcccggcgcccgcctgcccgcaccctcgtcctcacagacgccacagccatggccatgatggtgtttccgcgggaggagaagctgagccaggatgagatcgtgctgggcaccaaggctgtcatccagggactggagactctgcgtggggagcatcgtgccctgctggctcctctggttgcacctgaggccggcgaagccgagcctggctcgcaggagcgctgcatcctcctgcgtcgctccctggaagccattgagcttgggctgggggaggcccaggtgatcttggcattgtcgagccacctgggggctgtagaatcagagaagcagaagctgcgggcgcaggtgcggcgtctggtgcaggagaaccagtggctgcgtgaggagctggcggggacacagcagaagctgcagcgcagtgagcaggccgtggcccagctcgaggaggagaagcagcacttgctgttcatgagccagatccgcaagttggatgaagacgcctcccctaacgaggagaagggggacgtccccaaagacacactggatgacctgttccccaatgaggatgagcagagcccagcccctagcccaggaggaggggatgtgtctggtcagcatgggggctacgagatcccggcccggctccgcaccctgcacaacctggtgatccaatacgcctcacagggccgctacgaggtagctgtgccactctgcaagcaggcactcgaagacctggagaagacgtcaggccacgaccaccctgacgttgccaccatgctgaacatcctggcactggtctatcgggatcagaacaagtacaaggaggctgcccacctgctcaatgatgctctggccatccgggagaaaacactgggcaaggaccacccagccgtggctgcgacactaaacaacctggcagtcctgtatggcaagaggggcaagtacaaggaggctgagccattgtgcaagcgggcactggagatccgggagaaggtcctgggcaagtttcacccagatgtggccaagcagctcagcaacctggccctgctgtgccagaaccagggcaaagctgaggaggtggaatattactatcggcgggcactggagatctatgctacacgcctcgggcccgatgaccccaatgtggccaagaccaagaacaacctggcttcctgctacctgaagcagggcaagtaccaggatgcggagaccttgtacaaggagatcctcacccgcgctcatgagaaagagtttggctctgtcaatggggacaacaagcccatctggatgcacgcagaggagcgggaggaaagcaaggataagcgccgggacagcgccccctatggggaatacggcagctggtacaaggcctgtaaagtagacagccccacagtcaacaccaccctgcgcagcttgggggccctataccggcgccagggcaagctggaagccgcgcacacactagaggactgtgccagccgtaaccgcaagcagggtttggaccccgcaagccagaccaaggtggtagaactgctgaaagatggcagtggcaggcggggagaccgccgcagcagccgagacatggctgggggtgccgggcctcggtctgagtctgacctcgaggacgtgggacctacagctgagtggaatggggatggcagtggctccttgaggcgcagcggttcctttgggaaactccgggatgccctgaggcgcagcagtgagatgctggtaaagaagctgcaggggggcaccccccaggagccccctaaccccaggatgaagcgggccagttccctcaacttcctcaacaagagcgtggaagagccgacccagcctggaggcacaggtctctctgacagccgcactctcagctccagctccatggacctctcccgacgaagctccctggtgggctaatgctgaaggggcagccagtcaccagagcgcccacctggcacacccccctcaccccagccctgcgcatgggcctgctgcttgtcccgcctgtctctcccacagcccctgtcttttctgttcaatctcagggtaaccttctcccttgtcatctcagcctgagccctggaggctgggcctgcccactccagctccatcccttatttattccttccagcagggccctcttccctaggttcgggccagcaggaggtgccggctggagtctccaccatagactcagtggcctggcctccccagaccccagagccaagaacactaagcactcgccggcccttcggcaccctcgccctccctcccgactcaacccggccgttgcttctgtatatagagaaataagttattggccgcgcgcctcccttcagtccacggtactacccgggcctcccctcgtccctcttctagtggtaccgcccaggccttaatcacccccattccgtgcggtggtatctcccaggctctacattctcgggagcggcgcctcccaagggggtcctgggaccttctcgcgctcctcctggcctctgagggatgcgtcctacccgcgccatcgccccgtggcccaggacggggacctccccttagtccgtcctcccaccgccgggccctgccccgcatcccggccttatgcactgcccctcccacccggccccgcccaggcacggccgaccccgccccgggcaccgcccaccgagccatcctgcctcgcctccccccacgcctgcagcttctcgcgaggggcggcgacggtcccctggtggcaggaggggctccccctgttgcgggtgaggcggctgctctctattttcagatgttgctgtagaaataaagacggtttaaatctgaaaaaaaaaaaaaaaaaaaaaaaaaaaaaaaaaaaaaaaaaaaaaaaaaaaaaaaaaaaaaaaaaaaaaaaaaaaaaa

SEQ ID NO: 2691 - protein, 622 aa, Homo sapiens
MAMMVFPREEKLSQDEIVLGTKAVIQGLETLRGEHRALLAPLVAPEAGEAEPGSQERCILLRRSLEAIELGLGEAQVILALSSHLGAVESEKQKLRAQVRRLVQENQWLREELAGTQQKLQRSEQAVAQLEEEKQHLLFMSQIRKLDEDASPNEEKGDVPKDTLDDLFPNEDEQSPAPSPGGGDVSGQHGGYEIPARLRTLHNLVIQYASQGRYEVAVPLCKQALEDLEKTSGHDHPDVATMLNILALVYRDQNKYKEAAHLLNDALAIREKTLGKDHPAVAATLNNLAVLYGKRGKYKEAEPLCKRALEIREKVLGKFHPDVAKQLSNLALLCQNQGKAEEVEYYYRRALEIYATRLGPDDPNVAKTKNNLASCYLKQGKYQDAETLYKEILTRAHEKEFGSVNGDNKPIWMHAEEREESKDKRRDSAPYGEYGSWYKACKVDSPTVNTTLRSLGALYRRQGKLEAAHTLEDCASRNRKQGLDPASQTKVVELLKDGSGRRGDRRSSRDMAGGAGPRSESDLEDVGPTAEWNGDGSGSLRRSGSFGKLRDALRRSSEMLVKKLQGGTPQEPPNPRMKRASSLNFLNKSVEEPTQPGGTGLSDSRTLSSSSMDLSRRSSLVG

SEQ ID NO: 2692 - DNA, 1985 bp, Homo sapiens
gggagcagagtcgactgggagcgaccgagcgggccgccgccgccgccatgaaccccgaatatgactacctgtttaagctgcttttgattggcgactcaggcgtgggcaagtcatgcctgctcctgcggtttgctgatgacacgtacacagagagctacatcagcaccatcggggtggacttcaagatccgaaccatcgagctggatggcaaaactatcaaacttcagatctgggacacagcgggccaggaacggttccggaccatcacttccagctactaccggggggctcatggcatcatcgtggtgtatgacgtcactgaccaggaatcctacgccaacgtgaagcagtggctgcaggagattgaccgctatgccagcgagaacgtcaataagctcctggtgggcaacaagagcgacctcaccaccaagaaggtggtggacaacaccacagccaaggagtttgcagactctctgggcatccccttcttggagacgagcgccaagaatgccaccaatgtcgagcaggcgttcatgaccatggctgctgaaatcaaaaagcggatggggcctggagcagcctctgggggcgagcggcccaatctcaagatcgacagcacccctgtaaagccggctggcggtggctgttgctaggaggggcacatggagtgggacaggagggggcaccttctccagatgatgtccctggaggggggaggaggtacctccctctccctctcctggggcatttgagtctgtggctttggggtgtcctgggctccccatctccttctggcccatctgcctgctgccctgagccccggttctgtcagggtccctaagggaggacactcagggcctgtggccaggcagggcggaggcctgctgtgcagttgcctctaggtgactttccaagatgcccccctacacacctttctttggaacgagggctcttctgtcggtgtccctcccacccccatgtatgctgcactgggttctctccttcttcttcctgctgtcctgcccaagaactgagggtctccccggcctctactgccctggctgcagtcagtgcccagggcgaggaatgtggccaggggatccaggacctgggatccagggccctgggctggacctcaggacaggcatggaggccacaggggcccagcagcccaccctttcctctccccactgcctcctctcccttcctacactcccagctcgagccgtccagctgcggtgggatctgagtatatctagggcgggtgggcgggtagcagtgctgggcctgtgtcttgagcctggagggagactgctcctgccgccctctgccctgccggagacagacccatgcgctgcctgcccaccgtgcccctttgtccccatgtcaggcggaggcggaaggcccaccgtgccagaggctgggcaccagccttaaccctcactctgctagcacctcctccctttccccaaggtagcacatctggctcactccccactccgtctctggagcccaccagggaaggccctcatcccctgccgctacttctctggggaatgtgggttccatccaggattgggggcctctctgctcacccactctgcacccaggatcctagtcccctgccctctggcacagctgcttcctgcaagaaagcaagtctttggtctccctgagaagccatgtccctcgtgctgtctcttgcctgtcccacctgtgccctgccctccagcttgtatttaagtccctgggctgcccccttggggtgccccccgctcccaggttcccctctggtgtcatgtcaggcattttgcaaggaaaagccacttggggaaagatggaaaaggacaaaaaaaattaataaatttccattggccctcgggtgagctgagggtttttgcaaggaaaaaaaaaaaaaaaaaaaaaaaaaaaaaaaaaaaaaaaaaaaaaaaaaaaaaaaaaaagaaaaaaaaaaaaaaaaaaaa

SEQ ID NO: 2693 - protein, 201 aa, Homo sapiens
MNPEYDYLFKLLLIGDSGVGKSCLLLRFADDTYTESYISTIGVDFKIRTIELDGKTIKLQIWDTAGQERFRTITSSYYRGAHGIIVVYDVTDQESYANVKQWLQEIDRYASENVNKLLVGNKSDLTTKKVVDNTTAKEFADSLGIPFLETSAKNATNVEQAFMTMAAEIKKRMGPGAASGGERPNLKIDSTPVKPAGGGCC

SEQ ID NO: 2694 - DNA, 1399 bp, Homo sapiens
cgcaggatgagcgatcggggcccgggcagccggcagcggacgcgccccccgagcccaccggcccgcgccccgcgccccccacggccccgcggtcccggtcccggccgcatcacccacgtcccccgagccccacgggccatgcccggccggccctaagcgcgggccggggggcgtccccttgcgcccgggccccgcgctggcgccccccgggccgccgcccggcgcgggggccatggcgttcaccttcgccgcgttctgctacatgctcaccctggtgctgtgcgcctccctcatcttctttgtcatctggcacatcatagcctttgatgagctgcggaccgacttcaagaaccccatcgaccaggggaaccctgcgcgggcacgcgagcgtttaaaaaacatcgaacgcatctgctgcctcctgaggaagctggtggtcccagaatactccatccacggcctcttctgtctgatgtttctgtgtgcagcagagtgggtgaccctgggcctcaacatccccctcctcttctaccacctctggaggtacttccaccgtcctgcagatggctctgaggtcatgtatgatgcggtctccatcatgaatgctgacattctcaactactgccagaaggagtcctggtgcaaacttgccttctacctgctctccttcttctattacctgtacagtatggtttatacgttggtgagtttctaagggggaagccggccagggagcgagcccagaacggaccggacgcctgtgcacccccagccctgccccttggccgcagaggcctcagccctggggagggagggggcactggtgcccccagcctctccaacccccaaactgctgctgcggggaaccccccccaccccgccttcagagccctcccccttggactagagcggctgggcagagctctaaacaggggcaggggctcctctgccagcctgtgggcatggcagtcattcctggaaggggcaggacctccggccttgtccatttcgggggaaacttgggccctgccaaggggcagagcttgaccctggaaattctgggccatccccctccacccccaccctgaggctccccctgcaggtgggggggtacccgcaccgggaatgagcaggctcagcaggggggcagccccacccctagtctgccctcccctctcccccaggctctttctccagccctgtctccatctgccccaacctcagcccaccttgtctcttggacctattttctatgtcgcctggaggagtccggcaccccctccccggccatttgtgacaaaatatgaataaactactgcaaatatgtgggaaaaaaaaaaaaaaaaaaaaaaaaaaaaaaaaaaaaaaaaaaaaaaaaaaaaaaaaaaaaaaaaaaaaa

SEQ ID NO: 2695 - protein, 160 aa, Homo sapiens
MAFTFAAFCYMLTLVLCASLIFFVIWHIIAFDELRTDFKNPIDQGNPARARERLKNIERICCLLRKLVVPEYSIHGLFCLMFLCAAEWVTLGLNIPLLFYHLWRYFHRPADGSEVMYDAVSIMNADILNYCQKESWCKLAFYLLSFFYYLYSMVYTLVSF

SEQ ID NO: 2696 - DNA, 1078 bp, Homo sapiens
gtgtcgcgcggcgcggtggcctcggtcggtaccctgggcgcggacgagctgcctcattagtattcgtacccacgaggcggcgcacggggccctcggggacagcgagcgtcgcgccatggcttatcactcgggctacggagcccacggctccaagcacagggcccgggcagccccggatccccctcccctcttcgatgacacaagcggtggttattccagccagcccgggggatacccagccacaggagcagacgtggccttcagtgtcaaccacttgcttggggacccaatggccaatgtggctatggcctatggcagctccatcgcatcccatgggaaggacatggtgcacaaggagctgcaccgttttgtgtctgtgagcaaactcaagtatttttttgctgtggacacagcctacgtggccaagaagctagggctgctggtcttcccctacacacaccagaactgggaagtgcagtacagtcgtgatgctcctctgcccccccggcaagacctcaacgcccctgacctctatatccccacgaaggccttcattacttacgtgctcctggctgggatggcactgggcattcagaaaaggttctccccggaggtgctgggcctgtgtgcaagcacagcgctggtgtgggtggtgatggaggtgctggccctgctcctgggcctctacctggccaccgtgcgcagtgacctgagcacctttcacctgctggcctacagtggctacaaatacgtgggaatgatcctcagtgtgctcacggggctgctgttcggcagcgatggctactacgtggcgctggcctggacctcatcggcgctcatgtacttcattgtgcgctctttgcggacagcagccctgggccccgacagcatggggggccccgtcccccggcagcgtctccagctctacctgactctgggagctgcagccttccagcccctcatcatatactggctgactttccacctggtccggtgaccccctggccccagatggcactgagtttttcattcattgaagatttgatttccttgaaaaaaaaaaaaaaaaaaaaaaaaa

SEQ ID NO: 2697 - protein, 293 aa, Homo sapiens
MAYHSGYGAHGSKHRARAAPDPPPLFDDTSGGYSSQPGGYPATGADVAFSVNHLLGDPMANVAMAYGSSIASHGKDMVHKELHRFVSVSKLKYFFAVDTAYVAKKLGLLVFPYTHQNWEVQYSRDAPLPPRQDLNAPDLYIPTKAFITYVLLAGMALGIQKRFSPEVLGLCASTALVWVVMEVLALLLGLYLATVRSDLSTFHLLAYSGYKYVGMILSVLTGLLFGSDGYYVALAWTSSALMYFIVRSLRTAALGPDSMGGPVPRQRLQLYLTLGAAAFQPLIIYWLTFHLVR

SEQ ID NO: 2698 - DNA, 2574 bp, Homo sapiens
gccgcgctcgggctcgagctccgcgcactccctccgcggccgctgagccgagcggacgcccccgggggccgcgtcgcagccctccgtgctcccccctatcatgcccggtgcccaggctggggccgccaagcagccaggacaccatgcccgaggacggcgctggcgacggcggggaggtgcccgcgctcatcccggacggcgagccgctgcgggaagagcagcggcccctgaaacagtccctgggaagctccctgtgccgcgagtcgcactggaagtgcctgctcctcacgctgctcatccacgcctgcggggccgtggtggcctggtgtcgcctggccacagtgccgcggctggtcctggggcccgaggccgccttggcccggggagccgggggcccgccaccgacctacccggccagcccctgctccgatggctacctgtacatcccgctggccttcgtctccctcctctacctcctctacctggctgagtgctggcactgtcacgtgcggtcctgccaggcgccacgcaccgacgcccacacggtgctggcgctgatccgccggctgcagcaggcgccgccgtgcgtctggtggaaggccaccagctatcactacgtgcggcgcacacgccagatcacgcgctaccgcaacggcgacgcctacaccaccacgcaggtgtaccatgagcgcgctgacagccgcacggcccgcggcgagtttgactactcggcgcacggcgtccgcgacgtctccaaggagctggtggggctggcggagcacgcggccacgcggctgcgcttcaccaagtgcttcagcttcggcagcgcggaggccgaggcctcgtacctcacgcagcgggcgcgcttcttcagcgccaacgagggcctggacgactatctggaggcgcgcgagggcatgcacctgaaggacgtagacttccgcgagtcgctcatggtcttcgccgacccccgcagcccgccctggtacgcgcgcgcctgggtcttctggctcgtgtcggcggccacgctgtcgtggcccctgcgcgtcgtggccgcctatggcacggctcacgtgcactaccaggtggagaagctctttggcgccagctcgcccccgccgggggccgtgcccagcgggcccccgctgtcccgcgtggccacagtggacttcactgagctcgagtggcacatctgctccaaccggcagctggtgcccagctactcggaggccgtggtcatgggcgcgggctcgggcgcctacctcagaggctgccagcgctgccgccgctctgtcagcagcaactcgctgccccccgcccggcccagcgggccccgcctgcccttcagccgcagccgcctctcgctgggcgctggcggccgggccacgccaggggtcttccgcagcctgagcggggggccgctggggcgccgtggagaggacacggaacccctggagagcccgccctgctatgaggacgccctctacttcccggtgctcattgtccacggagacagcggctgccagggggatgggcagggtgctctctgagacccccacggcccccagagtggccccctccccaccattccaccatgggcttagatgcccgagtgattgttgtccaaaacaggcgggaaaacagaccagccacacacaaggggcaggggtgagggtgggggtgggggtccttaaacagactaaaatgcagttacctgtggtcattttggaggaagtggaagcctaagaatcgcccccagcatggcttcatcccccaagatggccgatgatctggcctgaaggcctctcacaaagggcaggagaagaagcttccagaaaggctgggatggaggaggagtcctgcggccagctgttgcctgcagcagaggctgcctgtggacacttccctaccggggctgaggccatgctgggagcccccccagtgacgcagaagcacaaattggaggcttggggccatgcccagccaggttggcttccctggggctgaagagctggctgtggtggcaccatggccttggccctgctactcacccaacattcccatcctcccctgataggcccctcctccttgcctgccctctctcccgctgctcagggccagtcactccccccacatgcagctacccctacaacctggggttccttctcagggcctcacctggtccccacatcccctggcctctgctcctgcctcccaaagtccatgtctgcctccatcagccacacacacgcagggacgcccgttccttgccctcccggacttatctactcttcactttcctgatgatccatggggcccaggcctagagggcatccgaggggctgggccttggccacagcctcttggatgatgtccttgctccaccacgcaggcccttgcttctcccatcaacgagtcttggcccaggggacactgaccctcccccagggaggagagaggagttccttccctttcaacgagggcttccacgccctctaaggggtggcggggaagggaggaggctgagaagatgcagattaaataaaggtatggaatagaaaaaaaaaaaaaaaa

SEQ ID NO: 2699 - protein, 468 aa, Homo sapiens
MPEDGAGDGGEVPALIPDGEPLREEQRPLKQSLGSSLCRESHWKCLLLTLLIHACGAVVAWCRLATVPRLVLGPEAALARGAGGPPPTYPASPCSDGYLYIPLAFVSLLYLLYLAECWHCHVRSCQAPRTDAHTVLALIRRLQQAPPCVWWKATSYHYVRRTRQITRYRNGDAYTTTQVYHERADSRTARGEFDYSAHGVRDVSKELVGLAEHAATRLRFTKCFSFGSAEAEASYLTQRARFFSANEGLDDYLEAREGMHLKDVDFRESLMVFADPRSPPWYARAWVFWLVSAATLSWPLRVVAAYGTAHVHYQVEKLFGASSPPPGAVPSGPPLSRVATVDFTELEWHICSNRQLVPSYSEAVVMGAGSGAYLRGCQRCRRSVSSNSLPPARPSGPRLPFSRSRLSLGAGGRATPGVFRSLSGGPLGRRGEDTEPLESPPCYEDALYFPVLIVHGDSGCQGDGQGAL

SEQ ID NO: 2700 - DNA, 2576 bp, Homo sapiens
agtccgggggcatcgcgatgctgctgcgcctgttgctggcctgggcggccgcagggcccacactgggccaggacccctgggctgctgagccccgtgccgcctgcggccccagcagctgctacgctctcttcccacggcgccgcaccttcctggaggcctggcgggcctgccgcgagctggggggcgacctggccactcctcggacccccgaggaggcccagcgtgtggacagcctggtgggtgcgggcccagccagccggctgctgtggatcgggctgcagcggcaggcccggcaatgccagctgcagcgcccactgcgcggcttcacgtggaccacaggggaccaggacacggctttcaccaactgggcccagccagcctctggaggcccctgcccggcccagcgctgtgtggccctggaggcaagtggcgagcaccgctggctggagggctcgtgcacgctggctgtcgacggctacctgtgccagtttggcttcgagggcgcctgcccggcgctgcaagatgaggcgggccaggccggcccagccgtgtataccacgcccttccacctggtctccacagagtttgagtggctgcccttcggctctgtggccgctgtgcagtgccaggctggcaggggagcctctctgctctgcgtgaagcagcctgagggaggtgtgggctggtcacgggctgggcccctgtgcctggggactggctgcagccctgacaacgggggctgcgaacacgaatgtgtggaggaggtggatggtcacgtgtcctgccgctgcactgagggcttccggctggcagcagacgggcgcagttgcgaggacccctgtgcccaggctccgtgcgagcagcagtgtgagcccggtgggccacaaggctacagctgccactgtcgcctgggtttccggccagcggaggatgatccgcaccgctgtgtggacacagatgagtgccagattgccggtgtgtgccagcagatgtgtgtcaactacgttggtggcttcgagtgttattgtagcgagggacatgagctggaggctgatggcatcagctgcagccctgcaggggccatgggtgcccaggcttcccaggacctcggagatgagttgctggatgacggggaggatgaggaagatgaagacgaggcctggaaggccttcaacggtggctggacggagatgcctgggatcctgtggatggagcctacgcagccgcctgactttgccctggcctatagaccgagcttcccagaggacagagagccacagataccctacccggagcccacctggccacccccgctcagtgcccccagggtcccctaccactcctcagtgctctccgtcacccggcctgtggtggtctctgccacgcatcccacactgccttctgcccaccagcctcctgtgatccctgccacacacccagctttgtcccgtgaccaccagatccccgtgatcgcagccaactatccagatctgccttctgcctaccaacccggtattctctctgtctctcattcagcacagcctcctgcccaccagccccctatgatctcaaccaaatatccggagctcttccctgcccaccagtcccccatgtttccagacacccgggtcgctggcacccagaccaccactcatttgcctggaatcccacctaaccatgcccctctggtcaccaccctcggtgcccagctaccccctcaagccccagatgcccttgtcctcagaacccaggccacccagcttcccattatcccaactgcccagccctctctgaccaccacctccaggtcccctgtgtctcctgcccatcaaatctctgtgcctgctgccacccagcccgcagccctccccaccctcctgccctctcagagccccactaaccagacctcacccatcagccctacacatccccattccaaagccccccaaatcccaagggaagatggccccagtcccaagttggccctgtggctgccctcaccagctcccacagcagccccaacagccctgggggaggctggtcttgccgagcacagccagagggatgaccggtggctgctggtggcactcctggtgccaacgtgtgtctttttggtggtcctgcttgcactgggcatcgtgtactgcacccgctgtggcccccatgcacccaacaagcgcatcactgactgctatcgctgggtcatccatgctgggagcaagagcccaacagaacccatgccccccaggggcagcctcacaggggtgcagacctgcagaaccagcgtgtgatggggtgcagacccccctcatggagtatggggcgctggacacatggccggggctgcaccagggacccatgggggctgcccagctggacagatggcttcctgctccccaggcccagccagggtcctctctcaaccactagacttggctctcaggaactctgcttcctggcccagcgctcgtgaccaaggatacaccaaagcccttaagacctcagggggcgggtgctggggtcttctccaataaatggggtgtcaaccttacccaaggaaaaaaaaaaaaaaaaaa

SEQ ID NO: 2701 - protein, 757 aa, Homo sapiens
MLLRLLLAWAAAGPTLGQDPWAAEPRAACGPSSCYALFPRRRTFLEAWRACRELGGDLATPRTPEEAQRVDSLVGAGPASRLLWIGLQRQARQCQLQRPLRGFTWTTGDQDTAFTNWAQPASGGPCPAQRCVALEASGEHRWLEGSCTLAVDGYLCQFGFEGACPALQDEAGQAGPAVYTTPFHLVSTEFEWLPFGSVAAVQCQAGRGASLLCVKQPEGGVGWSRAGPLCLGTGCSPDNGGCEHECVEEVDGHVSCRCTEGFRLAADGRSCEDPCAQAPCEQQCEPGGPQGYSCHCRLGFRPAEDDPHRCVDTDECQIAGVCQQMCVNYVGGFECYCSEGHELEADGISCSPAGAMGAQASQDLGDELLDDGEDEEDEDEAWKAFNGGWTEMPGILWMEPTQPPDFALAYRPSFPEDREPQIPYPEPTWPPPLSAPRVPYHSSVLSVTRPVVVSATHPTLPSAHQPPVIPATHPALSRDHQIPVIAANYPDLPSAYQPGILSVSHSAQPPAHQPPMISTKYPELFPAHQSPMFPDTRVAGTQTTTHLPGIPPNHAPLVTTLGAQLPPQAPDALVLRTQATQLPIIPTAQPSLTTTSRSPVSPAHQISVPAATQPAALPTLLPSQSPTNQTSPISPTHPHSKAPQIPREDGPSPKLALWLPSPAPTAAPTALGEAGLAEHSQRDDRWLLVALLVPTCVFLVVLLALGIVYCTRCGPHAPNKRITDCYRWVIHAGSKSPTEPMPPRGSLTGVQTCRTSV

SEQ ID NO: 2702 - DNA, 2698 bp, Homo sapiens
gtggacacacaagagttaactggcgggtgtgacaggcggaccgccctcaggaagtgttactcactggggatgtgcgtgccttgccttgggactggattctcttcctgaagcgaaggagctcccagccatggaaagccctggagagtcaggcgcgggctctcctggagcccccagcccgtccagcttcactactgggcacctggcgagagaaaagccagcccaggacccactgtatgacgtgcccaatgccagcggcgggcaggcaggcgggccgcagcggccggggcgcgttgtgagcctgcgggagcgcctgctgctcacccggcccgtgtggctgcagctgcaagccaacgcagcggccgcactgcacatgctgaggaccgagcccccggggacgttcctcgtgcggaaatctaacacccgccagtgccaggccctgtgcatgcggttgcctgaagccagtggcccctccttcgtctccagccactacatcctggagagccctggcggcgtctccttggagggctcggagctcatgttcccagacctagtccagctcatctgtgcctactgccacacccgggacatccttctcctcccgctgcagctccccagagccatccaccacgcagccactcacaaagagctggaggccatctcccatctgggcattgagttctggagctcctccctcaacatcaaggctcagcggggcccggctggaggcccagtgttgccccagctgaaggcccggtcccctcaagagctggaccagggcaccggagccgccttgtgcttcttcaaccccctgttcccgggggacctagggcccaccaagcgggagaaattcaagagaagcttcaaagtgcgcgtgtccacagagacctccagccccctgtctccacctgccgtgccacctccccccgtccccgtgctgccaggggcagtccccagccagacagagcggctgcccccttgccagctgctacggagggagagctcagtggggtaccgcgtgccagcaggcagtggccctagccttccgcctatgccctccctccaagaggtggactgcggctcccccagcagctccgaggaggagggggtgccagggtcccgggggagcccagcgacctcaccccacctgggccgccgacgacctctgcttcggtccatgagcgccgccttctgctccctactggcaccggagcggcaggtgggccgggctgcggcagcactgatgcaggaccgacacacagccgcgggccagctggtgcaggacctactgacccaggtgcgggctgggcccgagccccaggagctgcagggcatccgtcaggcgctgagccgggcccgggccatgctgagtgcggagctgggccctgagaagctgctgtcgcctaagaggctggaacatgtcctggagaagtcattgcattgctctgtgctcaagcctctccggcccatcctggcagcccgcctgcggcgccggcttgccgcagacggctccctgggccgcctagctgagggcctccgcctggcccgggcccagggccccggagccttcgggtcccacctgagcctgccctccccagtagagttggagcaagtgcgccagaagctgctgcagctgctccgcacctactcacccagcgcccaggtcaagcggctcctgcaggcctgcaagctgctctacatggccctgaggacccaggaaggggagggcgcgggtgccgacgagttcctgcctctgctgagcctcgtcttggcccactgtgaccttcctgagctgctgctggaggccgagtacatgtcggagctgctggagcccagcctgcttactggagagggtggctactacctgaccagcctctctgccagcctggccctgctgagtggcctgggtcaggcccacaccctcccactgagccccgtgcaggagctacggcgctccctcagcctctgggagcagcgccgcctgcctgccacccactgcttccagcacctcctccgagtagcctatcaggatcccagcagtggctgcacctccaagaccctggccgtgcccccagaagcctcgattgccaccctgaaccagctctgtgccaccaagttccgagtgacccagcccaacacttttggcctcttcctgtacaaggagcagggctaccaccgcctgccccctggggccctggcccacaggctgcccaccactggctacctcgtctaccgccgggcggagtggcctgagacccagggggctgtgacagaggaggagggcagtgggcagtcagaggcaagaagcagaggggaggagcaagggtgccagggagatggggatgctggggtcaaagccagccccagggacattcgggaacagtctgagacaactgctgaagggggccagggtcaagcccaggaaggccctgctcagccaggggaaccagaggcagagggaagccgggcagcagaggagtagcttgaagtggccagaagggtcattcggggcgggagaccctgagcctgctgagaaatccttttagcgccagcaagccccacccagggccctgtcctgtgtctgccaccacctttgtctgatacttgtttccagggaagctgggggaactgccacatctgaggaactggaataaagatgagggggcttcgggggcccccagactgtgaaaaaaaaaaaaaa

SEQ ID NO: 2703 - protein, 783 aa, Homo sapiens
MESPGESGAGSPGAPSPSSFTTGHLAREKPAQDPLYDVPNASGGQAGGPQRPGRVVSLRERLLLTRPVWLQLQANAAAALHMLRTEPPGTFLVRKSNTRQCQALCMRLPEASGPSFVSSHYILESPGGVSLEGSELMFPDLVQLICAYCHTRDILLLPLQLPRAIHHAATHKELEAISHLGIEFWSSSLNIKAQRGPAGGPVLPQLKARSPQELDQGTGAALCFFNPLFPGDLGPTKREKFKRSFKVRVSTETSSPLSPPAVPPPPVPVLPGAVPSQTERLPPCQLLRRESSVGYRVPAGSGPSLPPMPSLQEVDCGSPSSSEEEGVPGSRGSPATSPHLGRRRPLLRSMSAAFCSLLAPERQVGRAAAALMQDRHTAAGQLVQDLLTQVRAGPEPQELQGIRQALSRARAMLSAELGPEKLLSPKRLEHVLEKSLHCSVLKPLRPILAARLRRRLAADGSLGRLAEGLRLARAQGPGAFGSHLSLPSPVELEQVRQKLLQLLRTYSPSAQVKRLLQACKLLYMALRTQEGEGAGADEFLPLLSLVLAHCDLPELLLEAEYMSELLEPSLLTGEGGYYLTSLSASLALLSGLGQAHTLPLSPVQELRRSLSLWEQRRLPATHCFQHLLRVAYQDPSSGCTSKTLAVPPEASIATLNQLCATKFRVTQPNTFGLFLYKEQGYHRLPPGALAHRLPTTGYLVYRRAEWPETQGAVTEEEGSGQSEARSRGEEQGCQGDGDAGVKASPRDIREQSETTAEGGQGQAQEGPAQPGEPEAEGSRAAEE

SEQ ID NO: 2704 - DNA, 1360 bp, Homo sapiens
aagcaccgataggctctgcctcccgaagaaaagggagccgcgcagcgcctacgggagtccggcggcagcagccggtaccggcaaccacgggcagctctcagggaatctccgtcgtgaggccagaggctccagtccccgcgagtccagatgcctgtccagcctccaagcaaagacacagaagagatggaagcagagggtgattctgctgctgagatgaatggggaggaggaagagagtgaggaggagcggagcggcagccagacagagtcagaagaggagagctccgagatggatgatgaggactatgagcgacgccgcagcgagtgtgtcagtgagatgctggacctagagaagcagttctcggagctaaaggagaagttgttcagggaacgactgagtcagctgcggttgcggctggaggaagtgggggctgagagagcccctgaatacacggagccccttggggggctgcagcggagcctcaagattcgcattcaggtggcagggatctacaagggcttctgtctggatgtgatcaggaataagtacgaatgtgagctgcagggagccaaacagcacctggagagtgagaagctgctgctctatgacacgctgcagggggagctgcaggagcggatccagaggctggaggaggaccgccagagcctggacctcagctctgaatggtgggatgacaaactgcacgccagaggcagctccaggtcttgggactccctgccgcccagcaagaggaagaaggcacctctggtttctggcccatacatcgtgtacatgcttcaagagatcgacatcctggaggactggacagccatcaaaaaggctagggcagctgtgtcccctcagaagagaaaatcggatgacaggcggacccacaggcccctcagggtctgcccagccaggctcctgtggtgctgctgggccctcccactccatctggcactggcctggactcctcctctgccctcctcgaggcctgcacagctgtggccgtggagctgacctgaccaggcaaggctgctgtctccatccctgagccgcctgccacctcccactcctgaagatccatctcttggggctcccctgacagagaagacagccgaagtcaaagccacatcctcttgctgatgttggatgcaggctgtccggcctcagggccagggagccagtttccactgtgcgggaactctgagtcagacgtgattatctgggggtctgtccaccctggctggatctggaggcaagatgccaggccccccaggtgttctcagggcagttcttggtgtctgcttctcagattccaaggactggaattaaaacctttcctgggactctggaaaaa

SEQ ID NO: 2705 - protein, 290 aa, Homo sapiens
MPVQPPSKDTEEMEAEGDSAAEMNGEEEESEEERSGSQTESEEESSEMDDEDYERRRSECVSEMLDLEKQFSELKEKLFRERLSQLRLRLEEVGAERAPEYTEPLGGLQRSLKIRIQVAGIYKGFCLDVIRNKYECELQGAKQHLESEKLLLYDTLQGELQERIQRLEEDRQSLDLSSEWWDDKLHARGSSRSWDSLPPSKRKKAPLVSGPYIVYMLQEIDILEDWTAIKKARAAVSPQKRKSDDRRTHRPLRVCPARLLWCCWALPLHLALAWTPPLPSSRPAQLWPWS

SEQ ID NO: 2706 - DNA, 758 bp, Homo sapiens
aagcaccgataggctctgcctcccgaagaaaagggagccgcgcagcgcctacgggagtccggcggcagcagccggtaccggcaaccacgggcagctctcagggaatctccgtcgtgaggccagaggctccagtccccgcgagtccagatgcctgtccagcctccaagcaaagacacagaagagatggaagcagagggtgattctgctgctgagatgaatggggaggaggaagagagtgaggaggagcggagcggcagccagacagagtcagaagaggagagctccgagatggatgatgaggactatgagcgacgccgcagcgagtgtgtcagtgagatgctggacctagagaagcagttctcggagctaaaggagaagttgttcagggaacgactgagtcagctgcggttgcggctggaggaagtgggggctgagagagcccctgaatacacggagccccttggggggctgcagcggagcctcaagattcgcattcaggtggcagggatctacaagggcttctgtctggatgtgatcaggaataagtacgaatgtgagctgcagggagccaaacagcactgtgcgggaactctgagtcagacgtgattatctgggggtctgtccaccctggctggatctggaggcaagatgccaggccccccaggtgttctcagggcagttcttggtgtctgcttctcagattccaaggactggaattaaaacctttcctgggactctggaaaaaaaaaaaaaaaaaa

SEQ ID NO: 2707 - protein, 152 aa, Homo sapiens
MPVQPPSKDTEEMEAEGDSAAEMNGEEEESEEERSGSQTESEEESSEMDDEDYERRRSECVSEMLDLEKQFSELKEKLFRERLSQLRLRLEEVGAERAPEYTEPLGGLQRSLKIRIQVAGIYKGFCLDVIRNKYECELQGAKQHCAGTLSQT

SEQ ID NO: 2708 - DNA, 1455 bp, Homo sapiens
aagcaccgataggctctgcctcccgaagaaaagggagccgcgcagcgcctacgggagtccggcggcagcagccggtaccggcaaccacgggcagctctcagggaatctccgtcgtgaggccagaggctccagtccccgcgagtccagatgcctgtccagcctccaagcaaagacacagaagagatggaagcagagggtgattctgctgctgagatgaatggggaggaggaagagagtgaggaggagcggagcggcagccagacagagtcagaagaggagagctccgagatggatgatgaggactatgagcgacgccgcagcgagtgtgtcagtgagatgctggacctagagaagcagttctcggagctaaaggagaagttgttcagggaacgactgagtcagctgcggttgcggctggaggaagtgggggctgagagagcccctgaatacacggagccccttggggggctgcagcggagcctcaagattcgcattcaggtggcagggatctacaagggcttctgtctggatgtgatcaggaataagtacgaatgtgagctgcagggagccaaacagcacctggagagtgagaagctgctgctctatgacacgctgcagggggagctgcaggagcggatccagaggctggaggaggaccgccagagcctggacctcagctctgaatggtgggatgacaaactgcacgccagaggcagctccaggtcttgggactccctgccgcccagcaagaggaagaaggcacctctggtttctggcccatacatcgtgtacatgcttcaagagatcgacatcctggaggactggacagccatcaaaaaggctagggcagctgtgtcccctcagaagagaaaatcggatggaccttgaccctgctgttcacagccagggggaccctcagagcagctggcactgcacccaggattctcgtcttcctcctgcagacaggcggacccacaggcccctcagggtctgcccagccaggctcctgtggtgctgctgggccctcccactccatctggcactggcctggactcctcctctgccctcctcgaggcctgcacagctgtggccgtggagctgacctgaccaggcaaggctgctgtctccatccctgagccgcctgccacctcccactcctgaagatccatctcttggggctcccctgacagagaagacagccgaagtcaaagccacatcctcttgctgatgttggatgcaggctgtccggcctcagggccagggagccagtttccactgtgcgggaactctgagtcagacgtgattatctgggggtctgtccaccctggctggatctggaggcaagatgccaggccccccaggtgttctcagggcagttcttggtgtctgcttctcagattccaaggactggaattaaaacctttcctgggactctggaaaaaaaaaaaaaaaaaa

SEQ ID NO: 2709 - protein, 246 aa, Homo sapiens
MPVQPPSKDTEEMEAEGDSAAEMNGEEEESEEERSGSQTESEEESSEMDDEDYERRRSECVSEMLDLEKQFSELKEKLFRERLSQLRLRLEEVGAERAPEYTEPLGGLQRSLKIRIQVAGIYKGFCLDVIRNKYECELQGAKQHLESEKLLLYDTLQGELQERIQRLEEDRQSLDLSSEWWDDKLHARGSSRSWDSLPPSKRKKAPLVSGPYIVYMLQEIDILEDWTAIKKARAAVSPQKRKSDGP

SEQ ID NO: 2710 - DNA, 2077 bp, Homo sapiens
gcggcgggcggggcggcgctcggggctcggctggcctcggctcgcctcggctgcgctcggcaggctgcggtaaatccgggcttgcggccgctggcgtagtctgtggccgggtggtcgttgctgcgcgccccgagccccgagagccatgcagatgtcctacgccatccggtgcgccttctaccagctgctgctggccgcgctcatgctggtggcgatgctgcagctgctctacctgtcgctgctgtccggactgcacgggcaggaggagcaagaccaatattttgagttctttcccccgtccccacggtccgtggaccaggtcaaggcgcagctccgcaccgcgctggcctctggaggcgtcctggacgctagcggcgattaccgcgtctacaggggcctgctgaagaccaccatggaccccaacgatgtgatcctggccacgcacgccagcgtggacaacctgctgcacctgtcgggtctgctggagcgctgggagggcccgctgtccgtgtcggtgttcgcggccaccaaggaggaggcgcagctggccacggtgctggcctacgcgctgagcagccactgccccgacatgcgcgccagggtcgccatgcacctcgtgtgcccctcgcgttacgaggcagccgtgcccgacccccgggagccgggggagtttgccctgctgcggtcctgccaggaggtctttgacaagctagccagggtggcccagcccgggattaattatgcgctgggcaccaatgtctcctaccccaataacctgctgaggaatctggctcgtgagggggccaactatgccctggtgatcgatgtggacatggtgcccagcgaggggctgtggagaggcctgcgggaaatgctggatcagagcaaccagtggggaggcaccgcgctggtggtgcctgccttcgaaatccgaagagcccgccgcatgcccatgaacaaaaacgagctggtgcagctctaccaggttggcgaggtgcggcccttctattatgggttgtgcaccccctgccaggcacccaccaactattcccgctgggtcaacctgccggaagagagcttgctgcggcccgcctacgtggtaccttggcaggacccctgggagccattctacgtggcaggaggcaaggtgcccaccttcgacgagcgctttcggcagtacggcttcaaccgaatcagccaggcctgcgagctgcatgtggcggggtttgattttgaggtcctgaacgaaggtttcttggttcataagggcttcaaagaagcgttgaagttccatccccaaaaggaggctgaaaatcagcacaataagatcctatatcgccagttcaaacaggagttgaaggccaagtaccccaactctccccgacgctgctgagcccttccctcccctaatctgagaagtcagcctcttggctcctcaggccaccatttaggcctgactggggtaagaaatgtcgctccactttacagaggtagctgtggtgttgaaacactggacttggatatggggtgctgggatcgattcctagctttaccactaactagctgtgtggccttgagtaaatcccgttacctctctgagcctcggttaccctgtctgtaaaaagggaggtgagaatacctacctcacggaactgttgggaggctcagatgagatgctatatgtgaaaacattctgtaagcttcgtacaaatgtgaagtattaatattatcgcagtattattgttgttattattattgttattattaacaatcttgggtgggtagtaggagagcaaaaagtatgaatgggatggagctaagaagtctgaatacttaatgaaatggactttttggaaagaaatcagatgaaggcataaaatttagttcttagctcttgaacagaagcctaaaattcctggttctctcagggcttcgccttcaagggttctggaggagggaagggtctgcaggttccatgggtgacagcctgagatctgtcccttcaacgggctgggctgggtatgtgcctaccgatgacaatgtgtaaataaatgcgtgttcacacccacaaaaaaaa

SEQ ID NO: 2711 - protein, 415 aa, Homo sapiens
MQMSYAIRCAFYQLLLAALMLVAMLQLLYLSLLSGLHGQEEQDQYFEFFPPSPRSVDQVKAQLRTALASGGVLDASGDYRVYRGLLKTTMDPNDVILATHASVDNLLHLSGLLERWEGPLSVSVFAATKEEAQLATVLAYALSSHCPDMRARVAMHLVCPSRYEAAVPDPREPGEFALLRSCQEVFDKLARVAQPGINYALGTNVSYPNNLLRNLAREGANYALVIDVDMVPSEGLWRGLREMLDQSNQWGGTALVVPAFEIRRARRMPMNKNELVQLYQVGEVRPFYYGLCTPCQAPTNYSRWVNLPEESLLRPAYVVPWQDPWEPFYVAGGKVPTFDERFRQYGFNRISQACELHVAGFDFEVLNEGFLVHKGFKEALKFHPQKEAENQHNKILYRQFKQELKAKYPNSPRRC

SEQ ID NO: 2712 - DNA, 2529 bp, Homo sapiens
ggtggcgcgaccctctgtccccgcctcggggcggagcccaggtcccagcctgcggagcgcgagacacgccgaaatccgcccgaggctacctgtgcgactccagccgccctgcaccggaatctggggagacccgccccccgccccaccggtctgcggccctccgccccagcgcaggtgcaggtgcggcttctctgcccctttcaccccaggcgcatccgccgcggcggccatggcgcgaggagacgccccgcgggacagctaccacctggtcgggatcagcttcttcatcctggggctgggcaccctccttccctggaacttcttcatcaccgccatcccgtacttccaggcgcgactggccggggccggcaacagcacagccaggatcctgagcaccaaccacacgggtcccgaggatgccttcaacttcaacaattgggtgacgctgctgtcccagctgcccctgctgctcttcaccctcctcaactccttcctgtaccagtgcgtcccggagacggtgcgcattctgggcagcctgctggccatactgctgctctttgccctgacagcagcgctggtcaaggtggacatgagccccggacccttcttctccatcaccatggcctccgtctgcttcatcaactccttcagtgcagtcctacagggcagcctcttcgggcagctgggcaccatgccctccacctacagcaccctcttcctcagcggccagggcctggctgggatctttgctgcccttgccatgctcctgtccatggccagtggcgtggacgccgagacctctgccctggggtactttatcacgccctgtgtgggcatcctcatgtccatcgtgtgttacctgagcctgcctcacctgaagtttgcccgctactacctggccaataaatcatcccaggcccaagctcaggagctggagaccaaagctgagctcctccagtctgatgagaacgggattcccagtagtccccagaaagtagctctgaccctggatcttgacctggagaaggagccggaatcagagccagatgagccccagaagccaggaaaaccttcagtcttcactgtcttccagaagatctggctgacagcgctgtgccttgtgttggtcttcacagtcaccctgtccgtcttccccgccatcacagccatggtgaccagctccaccagtcctgggaagtggagtcagttcttcaaccccatctgctgcttcctcctcttcaacatcatggactggctgggacggagcctgacctcttacttcctgtggccagacgaggacagccggctgctgcccctgctggtctgcctgcggttcctgttcgtgcccctcttcatgctgtgccacgtgccccagaggtcccggctgcccatcctcttcccacaggatgcctacttcatcaccttcatgctgctctttgccgtttctaatggctacctggtgtccctcaccatgtgcctggcgcccaggcaggtgctgccacacgagagggaggtggccggcgccctcatgaccttcttcctggccctgggactttcctgtggagcctccctctccttcctcttcaaggcgctgctctgaagtggcccctccaggctctttggcagcctcttctcgacgtctccttccggagctgagatccagcccagggcgaatggcgagcttggctcaggcctctgcggggtggaggcccctgggcctgaggctgccagcagcgggcaggagctgctcttcatccacttggagtgctgcggggaagaaatcaccaccggtcattctaaccctcacccaggaatgggggtgactcgcacaagacctcatggaaagggtgatgactagggaaaagagggtgcagggcacggctgctccccaccaccaggtctgcatttgttcatcatcatcaggagcagaggtgaccagagggttcagagtgggaggcggggccagcccaggccaggagcgcctcatcttcccaggcctcagccacccagggtaaaaggtgccagggaagttgtgggcacctgagaggaggaacagatgtggaggacctgagggtgctcaaagggccaggctcagcctcaagcagtgttttcattgccaacacttactgtacccactccgcagagcccagctgggcctgggccccagggccacagctagcctgcatgtgtgtactgcactttacagtttgcaaagctcttccatacccactctctcaccgaagcctaattgaggctcttggaaggagtcaggcaaggattgtgcttcccccattatacaggtgacaaaactgagtcctggggaaagtgactggtccgtggtagagccgggacccaatcccctctctctcctccctgttggtgctgttcttcctgcccaacacctgtttctcttttcctcaaggggtttggggcaggagcctgggcacttactccccgtttttgctgtttctccttctgaccctgctcttgggtctaataaccccatttatttgtaaaaaaaaaaaaaaa

SEQ ID NO: 2713 - protein, 456 aa, Homo sapiens
MARGDAPRDSYHLVGISFFILGLGTLLPWNFFITAIPYFQARLAGAGNSTARILSTNHTGPEDAFNFNNWVTLLSQLPLLLFTLLNSFLYQCVPETVRILGSLLAILLLFALTAALVKVDMSPGPFFSITMASVCFINSFSAVLQGSLFGQLGTMPSTYSTLFLSGQGLAGIFAALAMLLSMASGVDAETSALGYFITPCVGILMSIVCYLSLPHLKFARYYLANKSSQAQAQELETKAELLQSDENGIPSSPQKVALTLDLDLEKEPESEPDEPQKPGKPSVFTVFQKIWLTALCLVLVFTVTLSVFPAITAMVTSSTSPGKWSQFFNPICCFLLFNIMDWLGRSLTSYFLWPDEDSRLLPLLVCLRFLFVPLFMLCHVPQRSRLPILFPQDAYFITFMLLFAVSNGYLVSLTMCLAPRQVLPHEREVAGALMTFFLALGLSCGASLSFLFKALL

SEQ ID NO: 2714 - DNA, 3302 bp, Homo sapiens
gctatataaggcggcgtgaggcaggcgaggggggcagcgcagccgagcggagcccaggagagcagagagcgagcctgagcgagagacggggaagcacggaggaggaagccgccggtgcgtcgggacgggagcgcaggtgctcgggcacccgagctggagctccgcagccgccggtcatgtaccgctccaccaagggcgcctccaaggcgcgccgggaccagatcaacgccgagatccggaacctcaaggagctgctgccgctggccgaagcggacaaggtccggctgtcctacctgcacatcatgagcctcgcctgcatctacactcgcaagggcgtcttcttcgctggtggcactcctctggcgggccccacggggcttctctcagctcgagagcttgaggacatcgtagcggcactacccggctttctgcttgtgttcacagccgaggggaaattgctctacctgtctaagagtgtgagcgagcatctgggccactccatggtggacctggttgcccagggtgacagcatctacgacatcattgacccagctgaccacctcactgtgcgccagcaactcaccctgccctctgccctggacactgatcgcctcttccgctgccgcttcaacacctccaagtccctcaggcgccagagtgcaggcaacaaactcgtgcttattcgaggccgattccatgctcacccacctggagcctactgggcaggaaatcccgtgttcacagctttctgtgcccctctggagccgagaccccgcccaggtcctggccctggccctggccctgcctcgctcttcctggccatgttccagagccgccatgctaaagacctggctctactggacatctccgagagtgtcctaatctacctgggctttgagcgcagtgaactgctttgtaaatcatggtatggactgctgcaccccgaggacctggcccacgcttctgctcaacactaccgcctgttggctgagagtggagatattcaggcagagatggtggtgaggctacaggccaagactggaggctgggcatggatttactgcctgttatactcagaaggtccagagggacccattactgccaataactacccaatcagtgacatggaagcctggagcctccgccagcagttgaactctgaagacacccaggcagcttatgtcctgggcactccgaccatgctgccctcattccctgaaaacattctttcccaggaagagtgctccagcactaacccactcttcaccgcagcactgggggctcccagaagcaccagcttccccagtgctcctgaactgagtgttgtctctgcatcagaagagcatccccgaccctccaaagaactggacttcagttacctgacattcccttctgggcctgagccttctctccaagcagaactaagcaaggatcttgtgtgcactccaccttacacgccccatcagccaggaggctgtgccttcctcttcagcctccatgagcccttccagacccatttgcccaccccatccagcactcttcaagaacagctgactccaagcactgcgaccttctctgatcagttgacgcccagcagtgcaaccttcccagatccactaactagcccactgcaaggccagttgactgaaacctcggtcagaagctatgaagaccagttgactccctgcacctccaccttcccagaccagctgcttcccagcacagccaccttcccagagcctctgggcagccctgcccatgaacagctgactcctcccagcacagcattccaagcacacctggacagccccagccaaaccttcccagagcaactgagccccaaccctaccaagacttactttgcccaggagggatgcagttttctctatgagaagttgcccccaagtcctagcagccctggtaatggggactgcacgctcttggccctagcccagctccggggccccctctctgtggatgtccccctggtgcccgaaggcctgctcacacctgaggcctctccagtcaagcagagtttcttccactactctgaaaaggagcagaatgagatagaccgtctcatccagcagattagccaattggctcagggcatggacagacccttctcagctgaggctggcactggcggactagagccacttggaggactggagcccctggactccaacctgtccctgtcaggggcaggcccccctgtgctcagcctggacctgaaaccctggaaatgccaggagctggacttcctggctgaccctgataacatgttcctggaagagacgcccgtggaagacatcttcatggatctctctaccccagatcccagtgaggaatggggctcaggggatcctgaggcagagggcccaggaggggccccatcgccttgcaacaacctgtccccagaagaccacagcttcctggaggacctggccacatatgaaaccgcctttgagacaggtgtctcagcattcccctatgatgggtttactgatgagttgcatcaactccagagccaagttcaagacagcttccatgaagatggaagtggaggggaaccaacgttttgaataagtctgtgacttaacgtcgtcaagtatggcatattgtcatcaagacgtggagccgctctccacccccccgggactgttggggggattctgagggccagagggggatatatatgattccccaggccctgcaggattttggggggggggaggtgggagggcaagggaggggagcttctttttaaaatcaagagacttcgagcgatcccagtttccatttcaatctgtattcactcgtagtgagtttccttgaatgggatttcaagcggagaatgggggagtctcacttccccgccgccttgccccattggcctgggccagttctccactcctaggggccaagccacccctagccttggtgggggaaaggcagggcccacccgggccagcccgtgccctgaggggctcttgacacccacgtagaattctctacacaccagtaacgggatttcaattccgatggactctgccgccctggcggcccttcctgtgacttttgcgcccctcgcctggggtggggggtgcgaagagacgctacgttcctttccgatggaggaaggcagacctgccgtcacacgtgtgcttgcacgagtgcgtgtacctggtgcgggactcacccggccgccagactgcctgggcctgcccagatggccacctcgtggtgctgcggtgactttgtagccaactttataataaagtccagtttgcctttttggt

SEQ ID NO: 2715 - protein, 802 aa, Homo sapiens
MYRSTKGASKARRDQINAEIRNLKELLPLAEADKVRLSYLHIMSLACIYTRKGVFFAGGTPLAGPTGLLSARELEDIVAALPGFLLVFTAEGKLLYLSKSVSEHLGHSMVDLVAQGDSIYDIIDPADHLTVRQQLTLPSALDTDRLFRCRFNTSKSLRRQSAGNKLVLIRGRFHAHPPGAYWAGNPVFTAFCAPLEPRPRPGPGPGPGPASLFLAMFQSRHAKDLALLDISESVLIYLGFERSELLCKSWYGLLHPEDLAHASAQHYRLLAESGDIQAEMVVRLQAKTGGWAWIYCLLYSEGPEGPITANNYPISDMEAWSLRQQLNSEDTQAAYVLGTPTMLPSFPENILSQEECSSTNPLFTAALGAPRSTSFPSAPELSVVSASEEHPRPSKELDFSYLTFPSGPEPSLQAELSKDLVCTPPYTPHQPGGCAFLFSLHEPFQTHLPTPSSTLQEQLTPSTATFSDQLTPSSATFPDPLTSPLQGQLTETSVRSYEDQLTPCTSTFPDQLLPSTATFPEPLGSPAHEQLTPPSTAFQAHLDSPSQTFPEQLSPNPTKTYFAQEGCSFLYEKLPPSPSSPGNGDCTLLALAQLRGPLSVDVPLVPEGLLTPEASPVKQSFFHYSEKEQNEIDRLIQQISQLAQGMDRPFSAEAGTGGLEPLGGLEPLDSNLSLSGAGPPVLSLDLKPWKCQELDFLADPDNMFLEETPVEDIFMDLSTPDPSEEWGSGDPEAEGPGGAPSPCNNLSPEDHSFLEDLATYETAFETGVSAFPYDGFTDELHQLQSQVQDSFHEDGSGGEPTF

SEQ ID NO: 2716 - DNA, 840 bp, Homo sapiens
ctctggcccaagatggtggcgcccagagcttcgctcttgctgctcccctgaggtgaactgaagccagcagccccgcatcatgtcaaagctcggccgggccgcccggggcctcaggaagcccgaggtcggcggtgtgatccgggcgatcgtgcgggcaggcctggccatgcccgggcccccactaggcccagtgctgggtcagagaggcgtttccatcaaccagttttgcaaggagttcaatgagaggacaaaggacatcaaggaaggcattcctctgcctaccaagattttagtgaagcctgacaggacatttgaaattaagattggacagcccactgtttcctacttcctgaaggcagcagctgggattgaaaagggggcccggcaaacagggaaagaggtggcaggcctggtgaccttgaagcatgtgtatgagattgcccgcatcaaagctcaggatgaggcatttgccctgcaggatgtacccctgtcgtctgttgtccgctccatcatcgggtctgcccgttctctgggcattcgcgtggtgaaggacctcagttcagaagagcttgcagctttccagaaggaacgagccatcttcctggctgctcagaaggaggcagatttggctgcccaagaagaagctgccaagaagtgacccttgccccaccaactcccagatttcaaaggaggtagttgcaaaagctgtgcccaaggggaggaaggaggtcacaccaatatgatgatggttttcatgactttgaatgatatatttttgtacatctagctgtatcgaggcatcaggcctgaataaacatcctttcttacccaaaaaaaaaa

SEQ ID NO: 2717 - protein, 192 aa, Homo sapiens [sequence omitted]

SEQ ID NO: 2718 - DNA, 762 bp, Homo sapiens
ctctggcccaagatggtggcgcccagagcttcgctcttgctgctcccctgaggtgaactgaagccagcagccccgcatcatgtcaaagctcggccgggccgcccggggcctcaggaagcccgagagaggcgtttccatcaaccagttttgcaaggagttcaatgagaggacaaaggacatcaaggaaggcattcctctgcctaccaagattttagtgaagcctgacaggacatttgaaattaagattggacagcccactgtttcctacttcctgaaggcagcagctgggattgaaaagggggcccggcaaacagggaaagaggtggcaggcctggtgaccttgaagcatgtgtatgagattgcccgcatcaaagctcaggatgaggcatttgccctgcaggatgtacccctgtcgtctgttgtccgctccatcatcgggtctgcccgttctctgggcattcgcgtggtgaaggacctcagttcagaagagcttgcagctttccagaaggaacgagccatcttcctggctgctcagaaggaggcagatttggctgcccaagaagaagctgccaagaagtgacccttgccccaccaactcccagatttcaaaggaggtagttgcaaaagctgtgcccaaggggaggaaggaggtcacaccaatatgatgatggttttcatgactttgaatgatatatttttgtacatctagctgtatcgaggcatcaggcctgaataaacatcctttcttacccaaaaaaaaaa

SEQ ID NO: 2719 - protein, 166 aa, Homo sapiens
MSKLGRAARGLRKPERGVSINQFCKEFNERTKDIKEGIPLPTKILVKPDRTFEIKIGQPTVSYFLKAAAGIEKGARQTGKEVAGLVTLKHVYEIARIKAQDEAFALQDVPLSSVVRSIIGSARSLGIRVVKDLSSEELAAFQKERAIFLAAQKEADLAAQEEAAKK

SEQ ID NO: 2720 - DNA, 934 bp, Homo sapiens
ctctggcccaagatggtggcgcccagagcttcgctcttgctgctcccctgaggtgaactgaagccagcagccccgcatcatgtcaaagctcggccgggccgcccggggcctcaggaagcccgaggtcggcggtgtgatccgggcgatcgtgcgggcaggcctggccatgcccgggcccccactaggcccagtgctgggtcagagaggcgtttccatcaaccagttttgcaaggagttcaatgagaggacaaaggacatcaaggaaggcattcctctgcctaccaagattttagtgaagcctgacaggacatttgaaattaagattggacagcccactgtttcctacttcctgaaggcagcagctgggattgaaaagggggcccggcaaacagggaaagaggtggcaggcctggtgaccttgaagcatgtgtatgagattgcccgcatcaaagctcaggatgaggcatttgccctgcaggatgtacccctgtcgtctgttgtccgctccatcatcgggtctgcccgttctctgggcattcgcgtggtgaaggaacgttgttctgcaaatgttctaagaaatggaaagatctccatgaaggatccaagtgggagaagttcagtgtgacctgggtctgtcgtcctagagcctcagttcagaagagcttgcagctttccagaaggaacgagccatcttcctggctgctcagaaggaggcagatttggctgcccaagaagaagctgccaagaagtgacccttgccccaccaactcccagatttcaaaggaggtagttgcaaaagctgtgcccaaggggaggaaggaggtcacaccaatatgatgatggttttcatgactttgaatgatatatttttgtacatctagctgtatcgaggcatcaggcctgaataaacatcctttcttacccaaaaaaaaaa

SEQ ID NO: 2721 - protein, 181 aa, Homo sapiens
MSKLGRAARGLRKPEVGGVIRAIVRAGLAMPGPPLGPVLGQRGVSINQFCKEFNERTKDIKEGIPLPTKILVKPDRTFEIKIGQPTVSYFLKAAAGIEKGARQTGKEVAGLVTLKHVYEIARIKAQDEAFALQDVPLSSVVRSIIGSARSLGIRVVKERCSANVLRNGKISMKDPSGRSSV

SEQ ID NO: 2722 - DNA, 2697 bp, Homo sapiens
gagccgccgcgggccgggcccatcccgccgcagcggcccggggccgagcaggggctaggcggggagggagcggcgcccagcggggcccggagcgtggccagaatggtgctggaaggaaaccctgaagtggggtccccccgaacctcagacctccagcaccgggggaacaagggctcttgcgttctctcctctcccggtgaagatgcgcagccaggcgaggagcccatcaagtatggtgaactcatcgtcctgggatgctgtgaggaaggaggtgaggaaaccgaggctcagagaggggaagtgactggcccaagggcactcagctgctacaatggttgtctggcaagtggggacaagggccgccggcgaagccgcctggcactgagccgccggtcgcacgccaacggggtgaagccagacgtcatgctccacatctccacgccgctcgtctccaaggcactgagtaaccgtggtcagcacagcatctcgtatacactgtcccggagccactcggtcatagtggagtatacacatgatagcgacacagacatgttccagattggccgctccacagagaacatgattgacttcgtggtaacagacacgtcccctggaggaggggctgccgagggcccttctgcccagagcaccatctcccgctatgcctgccgcatcctctgtgaccgccggccaccctatactgcccgcatctatgccgctggcttcgatgcctctagcaacatcttccttggagagcgagcggccaaatggcggaccccagatggcctgatggatggactgaccaccaatggagtcctggtgatgcacccggcaggcggcttctccgaggactcagccccgggtgtctggcgggagatctcggtctgtgggaatgtgtacacattgcgggacagccgctcagcccagcagcggggcaagctggtggaaaacgagtccaacgtgctgcaggacggctctctcatcgacctgtgtggggccacactgctgtggcgcacaccggcggggctgctgcgggctcccacactgaagcaactggaggcccagcggcaggaggcaaatgcagcgcggccccagtgccccgtgggcctcagcactctggccttccccagcccagcccgtggccgcacagcgcccgacaaacagcagccctgggtctacgtccgctgcgggcacgtccatggctaccacggctggggctgccggcgggagcggggcccccaggagcgcgaatgtcctctctgccgccttgtggggccttatgtgcctctatggcttggccaggaggccggcctctgcctggaccctgggccgcctagccatgcctttgcaccttgcggccacgtctgctctgagaagactgcccgctactgggcccagacaccactgccccacggcacccatgctttccatgccgcctgccccttttgcggggcctggcttaccggcgagcatggctgcgtccgcctcattttccagggcccgctggattaggctccctggggccccctgctgctgtgcccacctgcccacccaggtccccacctcctgcagcccagagggagctctgcatgtgggacactccctgctggcacagccacaccagatggacatgttggatgggctgtgcccttccccccaactgtggccccccaaggaggtccccaagatctccaccccagtcatgctgatggggccttcagcaccagctctgtcctgggtcgatggaggaaagcccagccccatggccttgcccttcctggggcatcccacatcgtgccgccgacactgtgtgcccctgggggagtgaaggggccaggggcctttgacccccagcttaggctggctatgccctgagcctgccaacccagtttcagacactcatccttcatccttcctgctgccgccctgggttcctctataaacctcgctgctcagctgcccccacaagtcccacatgccccgcatgcgtgcaatgcctccagcccccaagtgagtggtgggtgggtggcaggctgggcctagcacttgctgatagccactatgggctcgactctgtgctaagtggtatctggggacacagaggcaatcagacctggttccccccctggtggagttcacagtctagtggaggacagactgttaacaaatggcaacacggcttcatgcgtgccaggatcagagtacaaatcaggttgtggcaggcctcactggtaatggaaaagtgagggaggcttcacggaggaggtgtcataggagctcagcctcaacggctgctcggaaccctccgagtccacaagatgggaagcaagtccacaagatgggaagcgtgctctatacagaagggagggcctgtgcacaggctcaggtgtcagtaagccagaaatccagggacagagtcaggatggctggagcatggactgcggggggaacagagaagggggtggagcaaaaggttgggaccatgtgaccagggaagatgctggatggaggattctgaacctcatttgtggacggtcaggagtcaacaaagggaggagagaggactcactggtcaagagtgtcggctgtgacacaagggccatcatccctgaatgcccaccatgtgccccgcactgtgctgatgatgataataataactacgtccattgagcactctccaaaaaaaaaaaaaaaaaa

SEQ ID NO: 2723 - protein, 469 aa, Homo sapiens
MVLEGNPEVGSPRTSDLQHRGNKGSCVLSSPGEDAQPGEEPIKYGELIVLGCCEEGGEETEAQRGEVTGPRALSCYNGCLASGDKGRRRSRLALSRRSHANGVKPDVMLHISTPLVSKALSNRGQHSISYTLSRSHSVIVEYTHDSDTDMFQIGRSTENMIDFVVTDTSPGGGAAEGPSAQSTISRYACRILCDRRPPYTARIYAAGFDASSNIFLGERAAKWRTPDGLMDGLTTNGVLVMHPAGGFSEDSAPGVWREISVCGNVYTLRDSRSAQQRGKLVENESNVLQDGSLIDLCGATLLWRTPAGLLRAPTLKQLEAQRQEANAARPQCPVGLSTLAFPSPARGRTAPDKQQPWVYVRCGHVHGYHGWGCRRERGPQERECPLCRLVGPYVPLWLGQEAGLCLDPGPPSHAFAPCGHVCSEKTARYWAQTPLPHGTHAFHAACPFCGAWLTGEHGCVRLIFQGPLD

SEQ ID NO: 2724 - DNA, 2694 bp, Homo sapiens
aatgaatgggggagccggaagcaggaagtgagtttgcgaacggagcagctgctgcagggcccatggcggacacccagtacatcctgcccaatgacatcggcgtgtctagcctggactgccgtgaggccttccgcctgctgtcacccacagagcgcctctatgcctaccacctgtcccgtgccgcctggtacggaggcctggctgtgctgcttcagacctcccctgaggccccctacatctatgctctgctcagccgcctcttccgcgcccaggaccccgaccagctgcgccaacatgccctggctgaaggccttaccgaggaggagtatcaggcgttcctggtctatgccgcgggtgtttactccaacatgggcaactacaagtcctttggtgacaccaagtttgttcccaacttgcccaaggaaaagctggaacgggtgatcctagggagtgaggctgctcagcagcacccagaagaagtcaggggcctctggcagacctgcggggagcttatgttctctctggagccaaggcttcgacacctcggactggggaaggagggaatcaccacctatttctctgggaattgtaccatggaagatgccaaattggcccaggactttctggactcacagaacctcagtgcctacaacacccggctcttcaaagaggtcgatggagaagggaagccctactacgaggtgcggctggcttctgtgcttggctcagagccttccctggactctgaggtgacttccaagctgaagagctatgaattccggggaagccctttccaggtgacccggggggactacgcgcccatcctccagaaggtggtggagcagctggagaaagccaaggcctatgcagccaacagccaccaggggcagatgctggcccagtatatagagagcttcacccagggctccatcgaggcccacaagaggggctcccgcttctggatccaggacaaaggccccatcgtggagagttacatcgggttcatcgagagctaccgcgacccctttggttcccgaggagaatttgaaggtttcgtagctgtggtgaacaaggccatgagtgccaagtttgagcggctggtggcgagcgcagagcagctgctgaaggagctgccctggcccccaacctttgagaaggacaagttcctcacccctgacttcacctccctggatgttctcaccttcgctggctccggcatccctgccggcatcaacatccccaactacgatgatctgaggcagacggaaggctttaagaacgtgtcgctggggaatgtgctggctgtggcctacgccacgcagcgggagaagcttacctttctggaggaggatgacaaggacctgtacatcctctggaaggggccctccttcgatgtgcaggtgggcctgcacgagctgctgggccatggcagtggcaagctcttcgtacaggacgaaaaaggagcattcaactttgaccaggaaacagtgatcaacccagagacgggcgagcagattcagagctggtatcggagcggggagacctgggatagcaagttcagcaccatcgcctccagctacgaagagtgccgggctgagagcgtgggtctctacctctgtctccacccgcaagtgctggagatctttggctttgagggggctgatgcggaggacgtgatctacgtgaactggctcaacatggttcgggccgggctgctcgctctggagttctacacacctgaggccttcaactggcgacaggcccatatgcaggcccggtttgtgatcctgagagtcttgctggaggctggcgagggactcgttaccatcactcccaccacaggctccgatgggcgcccagatgcccgggtccgcctcgaccgcagcaagatccggtctgtgggcaagcctgctctagagcgcttcctgcggagacttcaggtgctgaagtccacaggggatgtggccggagggcgggccctgtacgaggggtatgcaacagtcactgatgcgccccccgagtgcttcctcaccctcagggacacggtgctgctgcgtaaggaatctcggaagctcattgttcagcccaacactcgccttgaaggctcagacgtgcagcttctggaatacgaggcgtcagctgctggcctcatccgatccttctctgagcgtttcccagaggatggacccgagttggaggagatcctcacacagctggccacagccgatgcccgattctggaagggccccagtgaggccccatctggccaagcttgaggaagatgtgtggccttgcccccaattccatcagaccaaggctgcaagtggccctccattcgtgtgtgtatttaggggctggggagggggaggggcaggagcttggaccttggtactacctcagctgagggtggtgacacaaccccttccatttgtcagcactttccagcctgccaattgcttcccctctgtgatctcatttcatctgcactgccatacgtggagtgagcaagacagggcttaccatcctgtctaccagatgaggaaatggcagttctgagaagtcactggtctagatcccgcaggtggcacgtgacagctagggttcaaaacgttctcaccaaatccaatgctcctcacatattaattttataaccagacaaataaatattagagacaaccaccatcaaaaaaaaaa

SEQ ID NO: 2725 - protein, 737 aa, Homo sapiens
MADTQYILPNDIGVSSLDCREAFRLLSPTERLYAYHLSRAAWYGGLAVLLQTSPEAPYIYALLSRLFRAQDPDQLRQHALAEGLTEEEYQAFLVYAAGVYSNMGNYKSFGDTKFVPNLPKEKLERVILGSEAAQQHPEEVRGLWQTCGELMFSLEPRLRHLGLGKEGITTYFSGNCTMEDAKLAQDFLDSQNLSAYNTRLFKEVDGEGKPYYEVRLASVLGSEPSLDSEVTSKLKSYEFRGSPFQVTRGDYAPILQKVVEQLEKAKAYAANSHQGQMLAQYIESFTQGSIEAHKRGSRFWIQDKGPIVESYIGFIESYRDPFGSRGEFEGFVAVVNKAMSAKFERLVASAEQLLKELPWPPTFEKDKFLTPDFTSLDVLTFAGSGIPAGINIPNYDDLRQTEGFKNVSLGNVLAVAYATQREKLTFLEEDDKDLYILWKGPSFDVQVGLHELLGHGSGKLFVQDEKGAFNFDQETVINPETGEQIQSWYRSGETWDSKFSTIASSYEECRAESVGLYLCLHPQVLEIFGFEGADAEDVIYVNWLNMVRAGLLALEFYTPEAFNWRQAHMQARFVILRVLLEAGEGLVTITPTTGSDGRPDARVRLDRSKIRSVGKPALERFLRRLQVLKSTGDVAGGRALYEGYATVTDAPPECFLTLRDTVLLRKESRKLIVQPNTRLEGSDVQLLEYEASAAGLIRSFSERFPEDGPELEEILTQLATADARFWKGPSEAPSGQA

SEQ ID NO: 2726 - DNA, 2697 bp, Homo sapiens
aatgaatgggggagccggaagcaggaagtgagtttgcgaacggagcagctgctgcagcagggcccatggcggacacccagtacatcctgcccaatgacatcggcgtgtctagcctggactgccgtgaggccttccgcctgctgtcacccacagagcgcctctatgcctaccacctgtcccgtgccgcctggtacggaggcctggctgtgctgcttcagacctcccctgaggccccctacatctatgctctgctcagccgcctcttccgcgcccaggaccccgaccagctgcgccaacatgccctggctgaaggccttaccgaggaggagtatcaggcgttcctggtctatgccgcgggtgtttactccaacatgggcaactacaagtcctttggtgacaccaagtttgttcccaacttgcccaaggaaaagctggaacgggtgatcctagggagtgaggctgctcagcagcacccagaagaagtcaggggcctctggcagacctgcggggagcttatgttctctctggagccaaggcttcgacacctcggactggggaaggagggaatcaccacctatttctctgggaattgtaccatggaagatgccaaattggcccaggactttctggactcacagaacctcagtgcctacaacacccggctcttcaaagaggtcgatggagaagggaagccctactacgaggtgcggctggcttctgtgcttggctcagagccttccctggactctgaggtgacttccaagctgaagagctatgaattccggggaagccctttccaggtgacccggggggactacgcgcccatcctccagaaggtggtggagcagctggagaaagccaaggcctatgcagccaacagccaccaggggcagatgctggcccagtatatagagagcttcacccagggctccatcgaggcccacaagaggggctcccgcttctggatccaggacaaaggccccatcgtggagagttacatcgggttcatcgagagctaccgcgacccctttggttcccgaggagaatttgaaggtttcgtagctgtggtgaacaaggccatgagtgccaagtttgagcggctggtggcgagcgcagagcagctgctgaaggagctgccctggcccccaacctttgagaaggacaagttcctcacccctgacttcacctccctggatgttctcaccttcgctggctccggcatccctgccggcatcaacatccccaactacgatgatctgaggcagacggaaggctttaagaacgtgtcgctggggaatgtgctggctgtggcctacgccacgcagcgggagaagcttacctttctggaggaggatgacaaggacctgtacatcctctggaaggggccctccttcgatgtgcaggtgggcctgcacgagctgctgggccatggcagtggcaagctcttcgtacaggacgaaaaaggagcattcaactttgaccaggaaacagtgatcaacccagagacgggcgagcagattcagagctggtatcggagcggggagacctgggatagcaagttcagcaccatcgcctccagctacgaagagtgccgggctgagagcgtgggtctctacctctgtctccacccgcaagtgctggagatctttggctttgagggggctgatgcggaggacgtgatctacgtgaactggctcaacatggttcgggccgggctgctcgctctggagttctacacacctgaggccttcaactggcgacaggcccatatgcaggcccggtttgtgatcctgagagtcttgctggaggctggcgagggactcgttaccatcactcccaccacaggctccgatgggcgcccagatgcccgggtccgcctcgaccgcagcaagatccggtctgtgggcaagcctgctctagagcgcttcctgcggagacttcaggtgctgaagtccacaggggatgtggccggagggcgggccctgtacgaggggtatgcaacagtcactgatgcgccccccgagtgcttcctcaccctcagggacacggtgctgctgcgtaaggaatctcggaagctcattgttcagcccaacactcgccttgaaggctcagacgtgcagcttctggaatacgaggcgtcagctgctggcctcatccgatccttctctgagcgtttcccagaggatggacccgagttggaggagatcctcacacagctggccacagccgatgcccgattctggaagggccccagtgaggccccatctggccaagcttgaggaagatgtgtggccttgcccccaattccatcagaccaaggctgcaagtggccctccattcgtgtgtgtatttaggggctggggagggggaggggcaggagcttggaccttggtactacctcagctgagggtggtgacacaaccccttccatttgtcagcactttccagcctgccaattgcttcccctctgtgatctcatttcatctgcactgccatacgtggagtgagcaagacagggcttaccatcctgtctaccagatgaggaaatggcagttctgagaagtcactggtctagatcccgcaggtggcacgtgacagctagggttcaaaacgttctcaccaaatccaatgctcctcacatattaattttataaccagacaaataaatattagagacaaccaccatcaaaaaaaaaa

SEQ ID NO: 2727 - protein, 737 aa, Homo sapiens; identical to SEQ ID NO: 2725

SEQ ID NO: 2728 - DNA, 3370 bp, Homo sapiens
acgcctgcgaagatggccgctgcgtcctcatcggattccgacgcctgcggagctgagagcaatgaggccaattcgaagtggttggatgcgcactacgacccaatggccaatatccacaccttttctgcctgcctagcgctggcagatttacatggggatggggaatacaagctggtggtaggggaccttggccctggtgggcagcagccccgcctgaaggtgctcaaaggaccactggtgatgaccgaaagcccgctacctgctctgccagctgctgctgccaccttcctcatggagcaacatgagccccggaccccagctctggcacttgcttcaggcccttgtgtctatgtgtataagaatctcagaccctacttcaagttcagcctgccccaattgcctccaaatcctctggaacaagacctttggaaccaggccaaagaggaccgaatcgaccccttaaccctgaaggagatgctggagagcatccgggagacggcagaggagcctttgtccatccagtcactcaggtttctgcagctggagctaagtgaaatggaggcatttgtaaaccaacacaagtccaactccatcaagcggcagacagtcatcaccaccatgaccaccttgaagaagaacctggctgacgaggatgctgtgtcttgcctggtgctgggcaccgagaacaaggagctcctggtgcttgaccccgaggccttcaccattttagccaagatgagccttcccagcgtccccgtcttcctagaggtttctggccagtttgatgttgagttccggcttgccgcggcctgccgcaatggaaacatctatattctgagaagagactccaagcaccccaagtactgcatcgagctgagcgcccagcctgtgggacttatccgggtacacaaggtcctagtggtgggcagcacccaagacagcctgcatggcttcacccacaaggggaagaagctgtggacagtgcagatgcccgcagccatcctgaccatgaacctcctggagcagcattcccggggcctgcaggccgtcatggctgggctggccaatggagaggtccgcatttatcgtgacaaggccctgctcaatgtcatccacaccccggatgcagtgaccagcctttgctttggccggtacgggcgggaggacaacaccctcatcatgaccactcgaggtggtggcctgatcatcaagatcctgaagcgtacagcagtgtttgtagagggaggaagtgaggtgggtcccccaccagcccaggccatgaaactcaatgtgccccgaaagacccggctttacgtggatcagacactgcgagagcgggaggctggcaccgccatgcaccgggccttccagacagacctatacctgctgcgcctacgtgctgcccgcgcctacctgcaggccctcgagtccagcctgagccccctgtccacgacagcccgagagccactcaagctgcacgccgtggttcagggccttggccccacctttaagctcacacttcacctgcagaacacctcaacaacccgtcctgtcctggggctgctggtctgcttcctgtacaacgaggcgctctattccctgccccgggccttcttcaaggtacccttgctggtgccagggctcaactaccccctggagacctttgtggagagtctcagtaacaagggcatctcagacatcatcaaggtgctggtgcttcgagaaggccaaagtgcacccctgctgagtgcccacgtcaacatgcctgggagcgaggggctggcggccgcctgagacctgagctgctgtgaaagcccctgcacaatcagccagggagaactgggcgggtttagtggccccaggcccactcctcatgcagcagtgtgctggggcgacagctcgtctcccctctcttaagcacccgcttcctcaccacccccactgttgggcctatagtagcaggttagtgagtacctagggcggctcaactcctcccacagcaccaacccagcatggtcccactgaagtcctactacgccctcccctccccagccttttccagaaaccatactgggctcagatcagagctccgaagcggtcaaagtgagctgagcaggacaggcccagcctttctccactgccacgtccctcatgcacatcactcatctcctgctgcaggccaaggccaaaattgggctagtcctggccagggaaatcagaagctcttcttgggtgagattgagcctcctgttgctccctggagttccggaggctgggctgcagcccactcagcttgcgggcaaaatacgtgctctcctctctccttgtcagctgagcaaacccagggaatagccctcctctccccaggaaacttctctgaaatcttagacttagccagtcttaggcctacgatgccacacaaaggttgttcagggagaagggggtgcaggaggcagagggtgccccgcagggagctggtggctccagccccactagagctcctaaagatcacacagcagctgctcctgacagggatgctcatgcccagaaagcaagcccaggagaggaaggcagagtgtgacagagcagagccagggccaggcgcaccaggagaggcgtttctggggctccagagaagtgccacgggaggcagaagtccagaactgcccatatagatgcccttctacatcctggagcccaaatcagtcatgtgggtgggaagttcccagggcagtggtcacatcgtgagaattagcaggaaaggcggggcctttcttgtcatagctatttctgaggatgaaatgggagacatatgcccagcacctgatgtaagtttatataatgtaatattatgtacctaccactaagaaatacatgaaccgtgccatgaggacagtaagtgttcataaagcaacatgaagcaagaaacagtgcagggtgcccagtgcacacactagagagaaattgtgaacattaaggacaaggagaattggtgtctttctaaaacatacttatttaaaaacacatacccacttactaatgtggaattacacagtttgtaacaagaaaacagtctctcccattctctagtactgctcccctacccagcagtcacttccagttcattcagctatttttaaaatgtgcttatatgactcttgcttgatatatcaatcttagacattacctgttgactccctgttgtcatacatgaggctttagctctcttttgtcagcaaccctcccccatccctagttattaggttaaaaaatactcagattactatttctattactatgtgaaagttaactgcggagccaagagttggactataattaaattaccttccttgtactttctttttaatgg

SEQ ID NO: 2729 - protein, 593 aa, Homo sapiens
MAAASSSDSDACGAESNEANSKWLDAHYDPMANIHTFSACLALADLHGDGEYKLVVGDLGPGGQQPRLKVLKGPLVMTESPLPALPAAAATFLMEQHEPRTPALALASGPCVYVYKNLRPYFKFSLPQLPPNPLEQDLWNQAKEDRIDPLTLKEMLESIRETAEEPLSIQSLRFLQLELSEMEAFVNQHKSNSIKRQTVITTMTTLKKNLADEDAVSCLVLGTENKELLVLDPEAFTILAKMSLPSVPVFLEVSGQFDVEFRLAAACRNGNIYILRRDSKHPKYCIELSAQPVGLIRVHKVLVVGSTQDSLHGFTHKGKKLWTVQMPAAILTMNLLEQHSRGLQAVMAGLANGEVRIYRDKALLNVIHTPDAVTSLCFGRYGREDNTLIMTTRGGGLIIKILKRTAVFVEGGSEVGPPPAQAMKLNVPRKTRLYVDQTLREREAGTAMHRAFQTDLYLLRLRAARAYLQALESSLSPLSTTAREPLKLHAVVQGLGPTFKLTLHLQNTSTTRPVLGLLVCFLYNEALYSLPRAFFKVPLLVPGLNYPLETFVESLSNKGISDIIKVLVLREGQSAPLLSAHVNMPGSEGLAAA

SEQ ID NO: 2730 - DNA, 1319 bp, Homo sapiens
gattccgagcgcctccactgctggtccgttggccagatcaactcgccgcgtgggccggccgttccctgagagtctgagcgctcgccgcacccccttccgagcttctattggccgtagcagacgtccgtctgccgctatctccgccccaatacggaagcggcctagtcctccggctccgacagctgggtgtccaggccatggggcagccctgggcggctgggagcacggacggggcgcccgcgcagctgcctctcgtgctcaccgcgctgtgggccgcggccgtgggcctggagctggcttacgtgctggtgctcggtcccgggccgccgccgctgggacccctggcccgggccttgcagctggcgctggccgccttccagctgctcaacctgctgggcaacgtggggctcttcctgcgctcggatcccagcatccgtggcgtgatgctggccggccgcggtctgggccagggctgggcttactgctaccaatgccaaagccaggtgccgccacgcagcggacactgctctgcctgccgcgtctgcatcctgcgtcgggaccaccactgccgcctgctgggccgctgcgtgggcttcggcaactaccggcccttcctgtgcctgctgcttcatgccgccggcgtcctgctccacgtctctgtgctgctgggccctgcactgtcggccctgctgcgagcccacacgcccctccacatggctgccctcctcctgcttccctggctcatgttgctcacaggcagagtgtctctggcacagtttgccttggccttcgtgacggacacgtgcgtggcgggtgcgctgctgtgcggggctgggctgctcttccatgggatgctgctgctgcggggccagaccacatgggagtgggctcggggccagcactcctatgacctgggtccctgccacaacctgcaggcagccctggggccccgctgggccctcgtctggctctggcccttcctggcctccccattgcctggggatgggatcaccttccagaccacagcagatgtgggacacacagcctcctgactccaggaagagccagagctgtgcagggaggaaggggtgagaggggggcccccacacctagactcagtaaggaagtcgggttggaccttaacatctgcattggacaactccaccccttccttggccttgcccctgcccgcctacactcctacgtgtccagggcttgggccgtgacttaggcagaggagtgcagaggagggtctggcaggggctgctcaggccgcctagctgcccctttgccaggttaataaagcactgacttgttaa

SEQ ID NO: 2731 - protein, 284 aa, Homo sapiens
MGQPWAAGSTDGAPAQLPLVLTALWAAAVGLELAYVLVLGPGPPPLGPLARALQLALAAFQLLNLLGNVGLFLRSDPSIRGVMLAGRGLGQGWAYCYQCQSQVPPRSGHCSACRVCILRRDHHCRLLGRCVGFGNYRPFLCLLLHAAGVLLHVSVLLGPALSALLRAHTPLHMAALLLLPWLMLLTGRVSLAQFALAFVTDTCVAGALLCGAGLLFHGMLLLRGQTTWEWARGQHSYDLGPCHNLQAALGPRWALVWLWPFLASPLPGDGITFQTTADVGHTAS

SEQ ID NO: 2732 - DNA, 2858 bp, Homo sapiens
gccaggagcccgatcgagatgatgatggttatgcagcccgagggtctgggggccggggaggggcgctttgcgggcggcggcgggggcggcgagtacatggaacaggaggaggactgggaccgcgacctgctgctggacccggcctgggagaagcagcagcggaaaaccttcactgcctggtgcaactcacacctgcgcaaggcaggcacccagatcgagaacatcgaggaagatttccgcaatggcctcaaactcatgctgctcctggaggtcatttcaggtgagaggctgcctaggccagataaaggcaagatgcgcttccacaaaatcgccaacgttaacaaggccctggacttcattgccagcaagggggttaaactggtgtccattggtgctgaagagattgttgacgggaacctgaagatgaccctgggcatgatctggaccatcatccttcgcttcgccatccaggacatctctgtggaagaaacctcagccaaggaaggcttgcttctgtggtgccagaggaagacagcaccgtaccgcaacgtcaacgtgcagaacttccacaccagctggaaggatggcctggccctctgtgccctcatccaccgacaccgccctgacctcatcgactacgccaaactgcgaaaggatgaccccatcggaaacctgaacactgcctttgaggtggcagagaaatacctggacatccccaagatgttggatgcagaagacattgtgaacaccccaaagccggatgagaaggccatcatgacctatgtgtcctgcttctaccatgcctttgccggggctgagcaggcagagacagctgccaacaggatctgcaaggtgctggcagtgaaccaggaaaacgagaagctgatggaggagtatgagaagcttgccagtgagctgctggagtggatccgccgcactgtcccatggctggagaaccgtgtgggtgagcccagcatgagtgccatgcagcgcaaactagaggactttcgggactaccggcgtctgcacaagccgccccgcattcaggaaaagtgccagctggagatcaacttcaacacactgcagaccaagttgcggctcagccaccggcctgccttcatgccctccgagggcaagctggtctcggacatcgccaacgcctggcgggggctggagcaggtggaaaagggctatgaggactggctgctctcggagatccggcgcctgcagcgactccagcacctggctgagaagttccggcagaaggcctccctgcacgaagcctggacccggggaaaggaggagatgctgagccagcgcgactacgattcggctttgctacaggaggtgcgggcgttgctgcggcgccacgaggcctttgagagcgacctggcggcgcaccaggaccgcgtggagcacattgccgcgctggcccaggagctcaatgagctggactaccacgaggcagcctcagtgaatagccgctgccaggccatctgcgatcagtgggacaacctgggcaccctgacccagaagaggcgggatgcgctagagcggatggagaagctcctggagaccattgaccagctgcaactggagtttgcccggcgggccgcgcccttcaacaactggctggatggtgccgtggaggacctgcaggacgtgtggctggtacactctgtggaggagacccagagcctgctgacagcgcacgatcagttcaaggcaacactgcccgaggctgaccgagagcgaggtgccatcatgggcatccagggtgagatccagaagatctgccagacgtatgggctgcggccctgctccaccaatccctacatcaccctcagcccgcaggacatcaacaccaagtgggatatggtccgaaagctggtgcccagccgtgaccagacactgcaggaggagctggcacggcagcaggtaaacgagaggctccggcgacagtttgcggcccaggccaatgccattggaccctggatccaggcgaaggtggaggaagtggggcggctggcagcagggctagctggctctctggaggagcagatggctgggctacggcagcaggagcagaacattatcaactacaagactaacattgaccggctggagggtgaccaccagctgctgcaggagagcctggtgttcgacaataagcacaccgtctacagcatggagcacatccgcgtgggctgggagcagctgctcacctccattgcccgcaccatcaatgaagtggagaaccaggtactgacccgagacgccaagggactgagccaggagcagctcaacgagttccgagcatccttcaaccactttgacaggaagcggaatgggatgatggagcctgatgacttccgagcttgcctcatctccatgggctatgacctgggggaagtggagtttgctcgcatcatgaccatggtggaccccaacgcagctggggtggtgaccttccaggccttcatagacttcatgacccgagagacagccgagactgacacgactgagcaagttgtagcttccttcaagatcttggcaggagacaagaactacatcacccccgaggagctgcggcgcgagctccctgccaagcaggccgagtactgcatccgccgtatggtgccctacaagggatccggggccccggctggagccctggactacgtggccttctccagtgccctctatggggagagcgacctttgaccccaaccactgaggttctctatgcaagatggagagaggatgcaccctgtggctgatcccatccgtccctcggagcaagggcctaagagaaaagccagccaagtgcttctgaataaagatccctctctgggtca

SEQ ID NO: 2733 - protein, 901 aa, Homo sapiens
MMMVMQPEGLGAGEGRFAGGGGGGEYMEQEEDWDRDLLLDPAWEKQQRKTFTAWCNSHLRKAGTQIENIEEDFRNGLKLMLLLEVISGERLPRPDKGKMRFHKIANVNKALDFIASKGVKLVSIGAEEIVDGNLKMTLGMIWTIILRFAIQDISVEETSAKEGLLLWCQRKTAPYRNVNVQNFHTSWKDGLALCALIHRHRPDLIDYAKLRKDDPIGNLNTAFEVAEKYLDIPKMLDAEDIVNTPKPDEKAIMTYVSCFYHAFAGAEQAETAANRICKVLAVNQENEKLMEEYEKLASELLEWIRRTVPWLENRVGEPSMSAMQRKLEDFRDYRRLHKPPRIQEKCQLEINFNTLQTKLRLSHRPAFMPSEGKLVSDIANAWRGLEQVEKGYEDWLLSEIRRLQRLQHLAEKFRQKASLHEAWTRGKEEMLSQRDYDSALLQEVRALLRRHEAFESDLAAHQDRVEHIAALAQELNELDYHEAASVNSRCQAICDQWDNLGTLTQKRRDALERMEKLLETIDQLQLEFARRAAPFNNWLDGAVEDLQDVWLVHSVEETQSLLTAHDQFKATLPEADRERGAIMGIQGEIQKICQTYGLRPCSTNPYITLSPQDINTKWDMVRKLVPSRDQTLQEELARQQVNERLRRQFAAQANAIGPWIQAKVEEVGRLAAGLAGSLEEQMAGLRQQEQNIINYKTNIDRLEGDHQLLQESLVFDNKHTVYSMEHIRVGWEQLLTSIARTINEVENQVLTRDAKGLSQEQLNEFRASFNHFDRKRNGMMEPDDFRACLISMGYDLGEVEFARIMTMVDPNAAGVVTFQAFIDFMTRETAETDTTEQVVASFKILAGDKNYITPEELRRELPAKQAEYCIRRMVPYKGSGAPAGALDYVAFSSALYGESDL

SEQ ID NO: 2734 - DNA, 2168 bp, Homo sapiens
ggaagggatgggctcgcgctgccgggcgtgggcgtggactcgggcgtgggcactggcggagttccaagcccgggctgaggagggggcggcggcggcggcggcggcggcggcgggcgggtacccttcgactgggcgttgccgctgttccctgcgcggcatggaggggacggccgtggccgtgttcgagattttgagatttttaataattcactggaagtgtgacatagatgtatcaaagggagcattgctagaagggcagctagtgatttccatagaaggattaaattctaagcaccaggcaaatgctcttcattgtgtaacaactagatggagtctcactctgttacccaggccggagtgcagtggcgcagtctcggctcactgcaacctccacctcccaggttcaagtgattctcatgcctcagtcccccgagtagctgggattacagatgcccaccaccatgcctggctaattatggttgcttctgcaggaagcctttttggtggcatggtcctcaagaagttcctaaaagaaatacagtccatactgcccggaatctctgcaaagctgacttggacttcagaggaaggcagctattctcaggatatgacaggggtaacacccttccagatgatttttgaggttgatgaaaagcccagaaccttgatgacagattgtctggttataaagcattttttacgtaaaatcatcatggtgcaccctaaggtcagatttcatttcagtgtaaaggtaaatggaatcctctccacagagatctttggggtggagaatgaacccactttgaaccttgggaatggaattgctcttttggtcgactcccagcattatgtgagaccaaattttggtacaattgaatcacactgcagcagaattcaccctgtgctaggacatccagtaatgcttttcatccctgaagacgtggctggcatggacttgttgggagaactgatactgactccagcagctgcactgtgccccagcccaaaggtttcttccaaccagcttaacaggatttcttcagtttccatatttctatatggacctttgggtctgcctctgatattgtcaacttgggagcagccgatgactactttcttcaaagatacctcttctttagttgactggaaaaaataccatttgtgtatgatacccaatttggatctcaatttggatagagatttggtgcttccagatgtgagttatcaggtggaatccagtgaggaggatcagtctcagactatggatcctcaaggacaaactctgctgctttttctctttgtggatttccacagtgcatttccagtccagcaaatggaaatctggggagtctatactttgctcacaactcatctcaatgccatccttgtggagagccacagtgtagtgcaaggttccatccaattcactgtggacaaggtcttggagcaacatcaccaggctgccaaggctcagcagaaactacaggcctcactctcagtggctgtgaactccatcatgagtattctgactggaagcactaggagcagcttccgaaagatgtgtctccagacccttcaagcagctgacacacaagagttcaggaccaaactgcacaaagtatttcgtgagatcacccaacaccaatttcttcaccactgctcatgtgaggtgaagcagcagctaaccctagaaaaaaaggactcagcccagggcactgaggacgcacctgataacagcagcctggagctcctagcagataccagcgggcaagcagaaaacaagaggctcaagaggggcagcccccgcatagaggagatgcgagctctgcgctctgccagggccccgagcccgtcagaggccgccccgcgccgcccggaagccaccgcggcccccctcactcctagaggaagggagcaccgcgaggctcacggcagggccctggcgccgggcagggcgagcctcggaagccgcctggaggacgtgctgtggctgcaggaggtctccaacctgtcagagtggctgagtcccagccctgggccctgagccgggtccccttccgcaagcgcccaccgatccggaggctgcgggcagccgttatcccgtggtttaataaagctgccgcgcgctcaccaagtccaaaaaaaaaaaaaaaaaaaaaaaaaaaaaa

SEQ ID NO: 2735 - protein, 522 aa, Homo sapiens
MVASAGSLFGGMVLKKFLKEIQSILPGISAKLTWTSEEGSYSQDMTGVTPFQMIFEVDEKPRTLMTDCLVIKHFLRKIIMVHPKVRFHFSVKVNGILSTEIFGVENEPTLNLGNGIALLVDSQHYVRPNFGTIESHCSRIHPVLGHPVMLFIPEDVAGMDLLGELILTPAAALCPSPKVSSNQLNRISSVSIFLYGPLGLPLILSTWEQPMTTFFKDTSSLVDWKKYHLCMIPNLDLNLDRDLVLPDVSYQVESSEEDQSQTMDPQGQTLLLFLFVDFHSAFPVQQMEIWGVYTLLTTHLNAILVESHSVVQGSIQFTVDKVLEQHHQAAKAQQKLQASLSVAVNSIMSILTGSTRSSFRKMCLQTLQAADTQEFRTKLHKVFREITQHQFLHHCSCEVKQQLTLEKKDSAQGTEDAPDNSSLELLADTSGQAENKRLKRGSPRIEEMRALRSARAPSPSEAAPRRPEATAAPLTPRGREHREAHGRALAPGRASLGSRLEDVLWLQEVSNLSEWLSPSPGP

SEQ ID NO: 2736 - DNA, 1485 bp, Homo sapiens
tccctgggactgcgtcactggtgcgcgccgcgggtcagggcgcaatggcggcgctgggcggggatgggctgcgactgctgtcggtgtcgcggccggagcggccgcccgagtcggcggcgctgggcggcctgggccccgggctgtgctgctgggtgtcagtgttctcctgcctcagcctcgcctgctcctacgtgggcagcctctacgtctggaagagcgaactgcccagggaccatcccgcggtcatcaagcgacgcttcaccagcgtcctggtggtgtccagtctctcacccctgtgcgtgctgctctggagggaactcacaggcatccaggcacatccctgctcaccctgatgggcttcaggctggagggcattttcccagcggcgctgctgcccctgttgctgaccatgattcttttcctgggcccactgatgcagctctctatggattgcccttgtgacctggcagatgggctgaaggttgtcctggccccccgctcctgggcccgctgcctcacagacatgcgttggctgcggaaccaagtgatcgccccgctgacagaggagctggtgttccgggcctgtatgctgcccatgttagcaccgtgcatgggcctgggccctgctgtgttcacctgcccgctcttttttggagttgcccattttcaccatattattgagcagctgcgtttccgccagagcagcgtggggaacatcttcttgtctgctgcgttccagttctcctacacagctgtcttcggtgcctacactgctttcctcttcatccgcacaggacacctgattgggccggttctctgccattccttctgcaattacatgggtttcccagctgtttgcgcggccttggagcacccacagaggcggcccctgctggcaggctatgccctgggtgtgggactcttcctgcttctgctccagcccctcacggaccccaagctctacggcagccttcccctttgtgtgcttttggagcgggcaggggactcagaggctcccctgtgctcctgacctatgctcctggatacgctatgaactctcaccggctccccagccctccccaccaaggggtactgcaggggaagggctggctggggtccccgagatctcaggaatttttgtaggggattgaagccagagctagttgcgtcccagggaccaagagaaagaagcagatatccaaagggtgcagccccttttgaaaggggtgtttacgagcagctgtgagtgaggggacaaggggcaggtcccaggagccacacactcccttcctcactttggactgctgcttctcttagctcctctgcctctgaaaagctgctcggggttttttatttataaaacctctccccaccccccaccccccaacttcctgggttttctcattgtctttttgcatcagtactttgtattgggatattaaagagatttaacttgggtaacatggcaaaaaaaaaaaaaaaaaa

SEQ ID NO: 2737 - protein, 225 aa, Homo sapiens
MGFRLEGIFPAALLPLLLTMILFLGPLMQLSMDCPCDLADGLKVVLAPRSWARCLTDMRWLRNQVIAPLTEELVFRACMLPMLAPCMGLGPAVFTCPLFFGVAHFHHIIEQLRFRQSSVGNIFLSAAFQFSYTAVFGAYTAFLFIRTGHLIGPVLCHSFCNYMGFPAVCAALEHPQRRPLLAGYALGVGLFLLLLQPLTDPKLYGSLPLCVLLERAGDSEAPLCS

SEQ ID NO: 2738 - DNA, 1489 bp, Homo sapiens
tccctgggactgcgtcactggtgcgcgccgcgggtcagggcgcaatggcggcgctgggcggggatgggctgcgactgctgtcggtgtcgcggccggagcggccgcccgagtcggcggcgctgggcggcctgggccccgggctgtgctgctgggtgtcagtgttctcctgcctcagcctcgcctgctcctacgtgggcagcctctacgtctggaagagcgaactgcccagggaccatcccgcggtcatcaagcgacgcttcaccagcgtcctggtggtgtccagtctctcacccctgtgcgtgctgctctggagggaactcacaggcatccagccaggcacatccctgctcaccctgatgggcttcaggctggagggcattttcccagcggcgctgctgcccctgttgctgaccatgattcttttcctgggcccactgatgcagctctctatggattgcccttgtgacctggcagatgggctgaaggttgtcctggccccccgctcctgggcccgctgcctcacagacatgcgttggctgcggaaccaagtgatcgccccgctgacagaggagctggtgttccgggcctgtatgctgcccatgttagcaccgtgcatgggcctgggccctgctgtgttcacctgcccgctcttttttggagttgcccattttcaccatattattgagcagctgcgtttccgccagagcagcgtggggaacatcttcttgtctgctgcgttccagttctcctacacagctgtcttcggtgcctacactgctttcctcttcatccgcacaggacacctgattgggccggttctctgccattccttctgcaattacatgggtttcccagctgtttgcgcggccttggagcacccacagaggcggcccctgctggcaggctatgccctgggtgtgggactcttcctgcttctgctccagcccctcacggaccccaagctctacggcagccttcccctttgtgtgcttttggagcgggcaggggactcagaggctcccctgtgctcctgacctatgctcctggatacgctatgaactctcaccggctccccagccctccccaccaaggggtactgcaggggaagggctggctggggtccccgagatctcaggaatttttgtaggggattgaagccagagctagttgcgtcccagggaccaagagaaagaagcagatatccaaagggtgcagccccttttgaaaggggtgtttacgagcagctgtgagtgaggggacaaggggcaggtcccaggagccacacactcccttcctcactttggactgctgcttctcttagctcctctgcctctgaaaagctgctcggggttttttatttataaaacctctccccaccccccaccccccaacttcctgggttttctcattgtctttttgcatcagtactttgtattgggatattaaagagatttaacttgggtaacatggcaaaaaaaaaaaaaaaaaa

SEQ ID NO: 2739 - protein, 329 aa, Homo sapiens
MAALGGDGLRLLSVSRPERPPESAALGGLGPGLCCWVSVFSCLSLACSYVGSLYVWKSELPRDHPAVIKRRFTSVLVVSSLSPLCVLLWRELTGIQPGTSLLTLMGFRLEGIFPAALLPLLLTMILFLGPLMQLSMDCPCDLADGLKVVLAPRSWARCLTDMRWLRNQVIAPLTEELVFRACMLPMLAPCMGLGPAVFTCPLFFGVAHFHHIIEQLRFRQSSVGNIFLSAAFQFSYTAVFGAYTAFLFIRTGHLIGPVLCHSFCNYMGFPAVCAALEHPQRRPLLAGYALGVGLFLLLLQPLTDPKLYGSLPLCVLLERAGDSEAPLCS

SEQ ID NO: 2740 - DNA, 4004 bp, Homo sapiens
gtcagtggaggcagcagcggtagaggcggcggcgaggactggcgacggcgaggagatagtgtctgccttctggagagctgaccaaacactaaggatgctgaagttccgaacagtccatgggggcctgaggctcctgggaatccgccgaacctccaccgcccccgctgcctccccaaatgtccggcgcctggagtataagcccatcaagaaagtcatggtggccaacagaggtgagattgccatccgtgtgttccgggcctgcacggagctgggcatccgcaccgtagccatctactctgagcaggacacgggccagatgcaccggcagaaagcagatgaagcctatctcatcggccgcggcctggcccccgtgcaggcctacctgcacatcccagacatcatcaaggtggccaaggagaacaacgtagatgcagtgcaccctggctacgggttcctctctgagcgagcggacttcgcccaggcctgccaggatgcaggggtccggtttattgggccaagcccagaagtggtccgcaagatgggagacaaggtggaggcccgggccatcgccattgctgcgggtgttcccgttgtccctggcacagatgcccccatcacgtccctgcatgaggcccacgagttctccaacacctacggcttccccatcatcttcaaggcggcctatgggggtggagggcgtggcatgagggtggtgcacagctacgaggagctggaggagaattacacccgggcctactcagaggctctggccgcctttgggaatggggcgctgtttgtggagaagttcatcgagaagccacggcacatcgaggtgcagatcttgggggaccagtatgggaacatcctgcacctgtacgagcgagactgctccatccagcggcggcaccagaaggtggtcgagattgcccccgccgcccacctggacccgcagcttcggactcggctcaccagcgactctgtgaaactcgctaaacaggtgggctacgagaacgcaggcaccgtggagttcctggtggacaggcacggcaagcactacttcatcgaggtcaactcccgcctgcaggtggagcacacggtcacagaggagatcaccgacgtagacctggtccatgctcagatccacgtggctgagggcaggagcctacccgacctgggcctgcggcaggagaacatccgcatcaacgggtgtgccatccagtgccgggtcaccaccgaggaccccgcgcgcagcttccagccggacaccggccgcattgaggtgttccggagcggagagggcatgggcatccgcctggataatgcttccgccttccaaggagccgtcatctcgccccactacgactccctgctggtcaaagtcattgcccacggcaaagaccaccccacggccgccaccaagatgagcagggcccttgcggagttccgcgtccgaggtgtgaagaccaacatcgccttcctgcagaatgtgctcaacaaccagcagttcctggcaggcactgtggacacccagttcatcgacgagaacccagagctgttccagctgcggcctgcacagaaccgggcccaaaagctgttgcactacctcggccatgtcatggtaaacggtccaaccaccccgattcccgtcaaggccagccccagccccacggaccccgttgtccctgcagtgcccataggcccgcccccggctggtttcagagacatcctgctgcgagaggggcctgagggctttgctcgagctgtgcggaaccacccggggctgctgctgatggacacgaccttcagggacgcccaccagtcactgctggccactcgtgtgcgcacccacgatctcaaaaagatcgccccctatgttgcccacaacttcagcaagctcttcagcatggagaactggggaggagccacgtttgacgtcgccatgcgcttcctgtatgagtgcccctggcggcggctgcaggagctccgggagctcatccccaacatccctttccagatgctgctgcggggggccaatgctgtgggctacaccaactacccagacaacgtggtcttcaagttctgtgaagtggccaaagagaatggcatggatgtcttccgtgtgtttgactccctcaactacttgcccaacatgctgctgggcatggaggcggcaggaagtgccggaggcgtggtggaggctgccatctcatacacgggcgacgtggccgaccccagccgcaccaagtactcactgcagtactacatgggcttggccgaagagctggtgcgagctggcacccacatcctgtgcatcaaggacatggccgggctgctgaagcccacggcctgcaccatgctggtcagctccctccgggaccgcttccccgacctcccactgcacatccacacccacgacacgtcaggggcaggcgtggcagccatgctggcctgtgcccaggctggagctgatgtggtggatgtggcagctgattccatgtctgggatgacttcacagcccagcatgggggccctggtggcctgtaccagagggactcccctggacacagaggtgcccatggagcgcgtgtttgactacagtgagtactgggagggggctcggggactgtacgcggccttcgactgcacggccaccatgaagtctggcaactcggacgtgtatgaaaatgagatcccagggggccagtacaccaacctgcacttccaggcccacagcatggggcttggctccaagttcaaggaggtcaagaaggcctatgtggaggccaaccagatgctgggcgatctcatcaaggtgacgccctcctccaagatcgtgggggacctggcccagtttatggtgcagaatggattgagccgggcagaggccgaagctcaggcggaagagctgtcctttccccgctccgtggtggagttcctgcagggctacatcggtgtcccccatggggggttccccgaaccctttcgctctaaggtactgaaggacctgccaagggtggaggggcggcctggagcctccctccctcccctggatctgcaggcactggagaaggagctggtagaccggcatggggaggaggtgacgccggaagatgtgctctcagcagctatgtaccccgatgtgtttgcccacttcaaggacttcactgccacctttggccccctggatagcctgaatactcgcctcttcctgcagggacccaagatcgcagaggagtttgaggtggagctggagcggggcaagacgctgcacatcaaagccctggccgtgagcgacctgaaccgggccggccagaggcaggtcttctttgagctcaatgggcagctgcggtccatcttggtcaaggacacccaggccatgaaggagatgcacttccaccccaaggccctaaaggacgtgaagggccagatcggggcgcccatgcctgggaaggtgatagacatcaaagtggtggcaggggccaaggtggccaagggccagcccctgtgtgtgctcagtgccatgaagatggagactgtggtgacctcacccatggagggtactgtccgcaaggttcatgtgaccaaggacatgacactggaaggtgacgacctcatcctggagatcgagtgatcttgccccagaccggcagcctggccatccccaagccttcaacagaagctgtgctgccacggcaggcccaggccagccagtgcccgaggccaggaaggccgggccgtggaggtcctgtccacagctggacaggagagacaccgcctgcggtggttcattcctttcagccatcgtcctttcctccggcggacagctgcttacatgttcatctcttgccaaataagggtcccctcctcactggagactacaagtggtgggtcaggtggtcctaggacccaggggaggtttaggggtcctatctcctgggggaaggggagatctaagatgtcccaggtcctgggaagtttactcaataaagctggctttcccctgc

SEQ ID NO: 2741 - protein, 1178 aa, Homo sapiens
MLKFRTVHGGLRLLGIRRTSTAPAASPNVRRLEYKPIKKVMVANRGEIAIRVFRACTELGIRTVAIYSEQDTGQMHRQKADEAYLIGRGLAPVQAYLHIPDIIKVAKENNVDAVHPGYGFLSERADFAQACQDAGVRFIGPSPEVVRKMGDKVEARAIAIAAGVPVVPGTDAPITSLHEAHEFSNTYGFPIIFKAAYGGGGRGMRVVHSYEELEENYTRAYSEALAAFGNGALFVEKFIEKPRHIEVQILGDQYGNILHLYERDCSIQRRHQKVVEIAPAAHLDPQLRTRLTSDSVKLAKQVGYENAGTVEFLVDRHGKHYFIEVNSRLQVEHTVTEEITDVDLVHAQIHVAEGRSLPDLGLRQENIRINGCAIQCRVTTEDPARSFQPDTGRIEVFRSGEGMGIRLDNASAFQGAVISPHYDSLLVKVIAHGKDHPTAATKMSRALAEFRVRGVKTNIAFLQNVLNNQQFLAGTVDTQFIDENPELFQLRPAQNRAQKLLHYLGHVMVNGPTTPIPVKASPSPTDPVVPAVPIGPPPAGFRDILLREGPEGFARAVRNHPGLLLMDTTFRDAHQSLLATRVRTHDLKKIAPYVAHNFSKLFSMENWGGATFDVAMRFLYECPWRRLQELRELIPNIPFQMLLRGANAVGYTNYPDNVVFKFCEVAKENGMDVFRVFDSLNYLPNMLLGMEAAGSAGGVVEAAISYTGDVADPSRTKYSLQYYMGLAEELVRAGTHILCIKDMAGLLKPTACTMLVSSLRDRFPDLPLHIHTHDTSGAGVAAMLACAQAGADVVDVAADSMSGMTSQPSMGALVACTRGTPLDTEVPMERVFDYSEYWEGARGLYAAFDCTATMKSGNSDVYENEIPGGQYTNLHFQAHSMGLGSKFKEVKKAYVEANQMLGDLIKVTPSSKIVGDLAQFMVQNGLSRAEAEAQAEELSFPRSVVEFLQGYIGVPHGGFPEPFRSKVLKDLPRVEGRPGASLPPLDLQALEKELVDRHGEEVTPEDVLSAAMYPDVFAHFKDFTATFGPLDSLNTRLFLQGPKIAEEFEVELERGKTLHIKALAVSDLNRAGQRQVFFELNGQLRSILVKDTQAMKEMHFHPKALKDVKGQIGAPMPGKVIDIKVVAGAKVAKGQPLCVLSAMKMETVVTSPMEGTVRKVHVTKDMTLEGDDLILEIE

SEQ ID NO: 2742 - DNA, 4192 bp, Homo sapiens
gtcagtggaggcagcagcggtagaggcggcggcgaggactggcgacggcgaggagctgccttctagtctcacctgtggacactttgccaaaggagtcgggcctgacggtggaagatgggaaatggccaaaagaataaaccatttcctcttacttaccgaatgaaaagcttgcttcatcttggcgttcaagactctctaatatgattccacctgttgggctctttcttccatttgcctccgcagatagtgtctgccttctggagagctgaccaaacactaaggatgctgaagttccgaacagtccatgggggcctgaggctcctgggaatccgccgaacctccaccgcccccgctgcctccccaaatgtccggcgcctggagtataagcccatcaagaaagtcatggtggccaacagaggtgagattgccatccgtgtgttccgggcctgcacggagctgggcatccgcaccgtagccatctactctgagcaggacacgggccagatgcaccggcagaaagcagatgaagcctatctcatcggccgcggcctggcccccgtgcaggcctacctgcacatcccagacatcatcaaggtggccaaggagaacaacgtagatgcagtgcaccctggctacgggttcctctctgagcgagcggacttcgcccaggcctgccaggatgcaggggtccggtttattgggccaagcccagaagtggtccgcaagatgggagacaaggtggaggcccgggccatcgccattgctgcgggtgttcccgttgtccctggcacagatgcccccatcacgtccctgcatgaggcccacgagttctccaacacctacggcttccccatcatcttcaaggcggcctatgggggtggagggcgtggcatgagggtggtgcacagctacgaggagctggaggagaattacacccgggcctactcagaggctctggccgcctttgggaatggggcgctgtttgtggagaagttcatcgagaagccacggcacatcgaggtgcagatcttgggggaccagtatgggaacatcctgcacctgtacgagcgagactgctccatccagcggcggcaccagaaggtggtcgagattgcccccgccgcccacctggacccgcagcttcggactcggctcaccagcgactctgtgaaactcgctaaacaggtgggctacgagaacgcaggcaccgtggagttcctggtggacaggcacggcaagcactacttcatcgaggtcaactcccgcctgcaggtggagcacacggtcacagaggagatcaccgacgtagacctggtccatgctcagatccacgtggctgagggcaggagcctacccgacctgggcctgcggcaggagaacatccgcatcaacgggtgtgccatccagtgccgggtcaccaccgaggaccccgcgcgcagcttccagccggacaccggccgcattgaggtgttccggagcggagagggcatgggcatccgcctggataatgcttccgccttccaaggagccgtcatctcgccccactacgactccctgctggtcaaagtcattgcccacggcaaagaccaccccacggccgccaccaagatgagcagggcccttgcggagttccgcgtccgaggtgtgaagaccaacatcgccttcctgcagaatgtgctcaacaaccagcagttcctggcaggcactgtggacacccagttcatcgacgagaacccagagctgttccagctgcggcctgcacagaaccgggcccaaaagctgttgcactacctcggccatgtcatggtaaacggtccaaccaccccgattcccgtcaaggccagccccagccccacggaccccgttgtccctgcagtgcccataggcccgcccccggctggtttcagagacatcctgctgcgagaggggcctgagggctttgctcgagctgtgcggaaccacccggggctgctgctgatggacacgaccttcagggacgcccaccagtcactgctggccactcgtgtgcgcacccacgatctcaaaaagatcgccccctatgttgcccacaacttcagcaagctcttcagcatggagaactggggaggagccacgtttgacgtcgccatgcgcttcctgtatgagtgcccctggcggcggctgcaggagctccgggagctcatccccaacatccctttccagatgctgctgcggggggccaatgctgtgggctacaccaactacccagacaacgtggtcttcaagttctgtgaagtggccaaagagaatggcatggatgtcttccgtgtgtttgactccctcaactacttgcccaacatgctgctgggcatggaggcggcaggaagtgccggaggcgtggtggaggctgccatctcatacacgggcgacgtggccgaccccagccgcaccaagtactcactgcagtactacatgggcttggccgaagagctggtgcgagctggcacccacatcctgtgcatcaaggacatggccgggctgctgaagcccacggcctgcaccatgctggtcagctccctccgggaccgcttccccgacctcccactgcacatccacacccacgacacgtcaggggcaggcgtggcagccatgctggcctgtgcccaggctggagctgatgtggtggatgtggcagctgattccatgtctgggatgacttcacagcccagcatgggggccctggtggcctgtaccagagggactcccctggacacagaggtgcccatggagcgcgtgtttgactacagtgagtactgggagggggctcggggactgtacgcggccttcgactgcacggccaccatgaagtctggcaactcggacgtgtatgaaaatgagatcccagggggccagtacaccaacctgcacttccaggcccacagcatggggcttggctccaagttcaaggaggtcaagaaggcctatgtggaggccaaccagatgctgggcgatctcatcaaggtgacgccctcctccaagatcgtgggggacctggcccagtttatggtgcagaatggattgagccgggcagaggccgaagctcaggcggaagagctgtcctttccccgctccgtggtggagttcctgcagggctacatcggtgtcccccatggggggttccccgaaccctttcgctctaaggtactgaaggacctgccaagggtggaggggcggcctggagcctccctccctcccctggatctgcaggcactggagaaggagctggtagaccggcatggggaggaggtgacgccggaagatgtgctctcagcagctatgtaccccgatgtgtttgcccacttcaaggacttcactgccacctttggccccctggatagcctgaatactcgcctcttcctgcagggacccaagatcgcagaggagtttgaggtggagctggagcggggcaagacgctgcacatcaaagccctggccgtgagcgacctgaaccgggccggccagaggcaggtcttctttgagctcaatgggcagctgcggtccatcttggtcaaggacacccaggccatgaaggagatgcacttccaccccaaggccctaaaggacgtgaagggccagatcggggcgcccatgcctgggaaggtgatagacatcaaagtggtggcaggggccaaggtggccaagggccagcccctgtgtgtgctcagtgccatgaagatggagactgtggtgacctcacccatggagggtactgtccgcaaggttcatgtgaccaaggacatgacactggaaggtgacgacctcatcctggagatcgagtgatcttgccccagaccggcagcctggccatccccaagccttcaacagaagctgtgctgccacggcaggcccaggccagccagtgcccgaggccaggaaggccgggccgtggaggtcctgtccacagctggacaggagagacaccgcctgcggtggttcattcctttcagccatcgtcctttcctccggcggacagctgcttacatgttcatctcttgccaaataagggtcccctcctcactggagactacaagtggtgggtcaggtggtcctaggacccaggggaggtttaggggtcctatctcctgggggaaggggagatctaagatgtcccaggtcctgggaagtttactcaataaagctggctttcccctgc

SEQ ID NO: 2743 - protein, 1178 aa, Homo sapiens; identical to SEQ ID NO: 2741

SEQ ID NO: 2744 - DNA, 3959 bp, Homo sapiens
ttacaggaacagtgtggcctctctggaactctgcagaccaactgccgtgatgctgaagttccgaacagtccatgggggcctgaggctcctgggaatccgccgaacctccaccgcccccgctgcctccccaaatgtccggcgcctggagtataagcccatcaagaaagtcatggtggccaacagaggtgagattgccatccgtgtgttccgggcctgcacggagctgggcatccgcaccgtagccatctactctgagcaggacacgggccagatgcaccggcagaaagcagatgaagcctatctcatcggccgcggcctggcccccgtgcaggcctacctgcacatcccagacatcatcaaggtggccaaggagaacaacgtagatgcagtgcaccctggctacgggttcctctctgagcgagcggacttcgcccaggcctgccaggatgcaggggtccggtttattgggccaagcccagaagtggtccgcaagatgggagacaaggtggaggcccgggccatcgccattgctgcgggtgttcccgttgtccctggcacagatgcccccatcacgtccctgcatgaggcccacgagttctccaacacctacggcttccccatcatcttcaaggcggcctatgggggtggagggcgtggcatgagggtggtgcacagctacgaggagctggaggagaattacacccgggcctactcagaggctctggccgcctttgggaatggggcgctgtttgtggagaagttcatcgagaagccacggcacatcgaggtgcagatcttgggggaccagtatgggaacatcctgcacctgtacgagcgagactgctccatccagcggcggcaccagaaggtggtcgagattgcccccgccgcccacctggacccgcagcttcggactcggctcaccagcgactctgtgaaactcgctaaacaggtgggctacgagaacgcaggcaccgtggagttcctggtggacaggcacggcaagcactacttcatcgaggtcaactcccgcctgcaggtggagcacacggtcacagaggagatcaccgacgtagacctggtccatgctcagatccacgtggctgagggcaggagcctacccgacctgggcctgcggcaggagaacatccgcatcaacgggtgtgccatccagtgccgggtcaccaccgaggaccccgcgcgcagcttccagccggacaccggccgcattgaggtgttccggagcggagagggcatgggcatccgcctggataatgcttccgccttccaaggagccgtcatctcgccccactacgactccctgctggtcaaagtcattgcccacggcaaagaccaccccacggccgccaccaagatgagcagggcccttgcggagttccgcgtccgaggtgtgaagaccaacatcgccttcctgcagaatgtgctcaacaaccagcagttcctggcaggcactgtggacacccagttcatcgacgagaacccagagctgttccagctgcggcctgcacagaaccgggcccaaaagctgttgcactacctcggccatgtcatggtaaacggtccaaccaccccgattcccgtcaaggccagccccagccccacggaccccgttgtccctgcagtgcccataggcccgcccccggctggtttcagagacatcctgctgcgagaggggcctgagggctttgctcgagctgtgcggaaccacccggggctgctgctgatggacacgaccttcagggacgcccaccagtcactgctggccactcgtgtgcgcacccacgatctcaaaaagatcgccccctatgttgcccacaacttcagcaagctcttcagcatggagaactggggaggagccacgtttgacgtcgccatgcgcttcctgtatgagtgcccctggcggcggctgcaggagctccgggagctcatccccaacatccctttccagatgctgctgcggggggccaatgctgtgggctacaccaactacccagacaacgtggtcttcaagttctgtgaagtggccaaagagaatggcatggatgtcttccgtgtgtttgactccctcaactacttgcccaacatgctgctgggcatggaggcggcaggaagtgccggaggcgtggtggaggctgccatctcatacacgggcgacgtggccgaccccagccgcaccaagtactcactgcagtactacatgggcttggccgaagagctggtgcgagctggcacccacatcctgtgcatcaaggacatggccgggctgctgaagcccacggcctgcaccatgctggtcagctccctccgggaccgcttccccgacctcccactgcacatccacacccacgacacgtcaggggcaggcgtggcagccatgctggcctgtgcccaggctggagctgatgtggtggatgtggcagctgattccatgtctgggatgacttcacagcccagcatgggggccctggtggcctgtaccagagggactcccctggacacagaggtgcccatggagcgcgtgtttgactacagtgagtactgggagggggctcggggactgtacgcggccttcgactgcacggccaccatgaagtctggcaactcggacgtgtatgaaaatgagatcccagggggccagtacaccaacctgcacttccaggcccacagcatggggcttggctccaagttcaaggaggtcaagaaggcctatgtggaggccaaccagatgctgggcgatctcatcaaggtgacgccctcctccaagatcgtgggggacctggcccagtttatggtgcagaatggattgagccgggcagaggccgaagctcaggcggaagagctgtcctttccccgctccgtggtggagttcctgcagggctacatcggtgtcccccatggggggttccccgaaccctttcgctctaaggtactgaaggacctgccaagggtggaggggcggcctggagcctccctccctcccctggatctgcaggcactggagaaggagctggtagaccggcatggggaggaggtgacgccggaagatgtgctctcagcagctatgtaccccgatgtgtttgcccacttcaaggacttcactgccacctttggccccctggatagcctgaatactcgcctcttcctgcagggacccaagatcgcagaggagtttgaggtggagctggagcggggcaagacgctgcacatcaaagccctggccgtgagcgacctgaaccgggccggccagaggcaggtcttctttgagctcaatgggcagctgcggtccatcttggtcaaggacacccaggccatgaaggagatgcacttccaccccaaggccctaaaggacgtgaagggccagatcggggcgcccatgcctgggaaggtgatagacatcaaagtggtggcaggggccaaggtggccaagggccagcccctgtgtgtgctcagtgccatgaagatggagactgtggtgacctcacccatggagggtactgtccgcaaggttcatgtgaccaaggacatgacactggaaggtgacgacctcatcctggagatcgagtgatcttgccccagaccggcagcctggccatccccaagccttcaacagaagctgtgctgccacggcaggcccaggccagccagtgcccgaggccaggaaggccgggccgtggaggtcctgtccacagctggacaggagagacaccgcctgcggtggttcattcctttcagccatcgtcctttcctccggcggacagctgcttacatgttcatctcttgccaaataagggtcccctcctcactggagactacaagtggtgggtcaggtggtcctaggacccaggggaggtttaggggtcctatctcctgggggaaggggagatctaagatgtcccaggtcctgggaagtttactcaataaagctggctttcccctgc

SEQ ID NO: 2745 - protein, 1178 aa, Homo sapiens; identical to SEQ ID NO: 2741

SEQ ID NO: 2746 - DNA, 2449 bp, Homo sapiens
cttgtccccagcgcctggactcccccttaactgcttgggaaatgtgacctttgctctggggggcctggccctgcaggccccaaccttccctcatctctggcggccctcttgggcctctgacccagcccctccccgggccaggctcacagaagctggcttctgggactgtcctgggcccaagtgggcacctgcgccagccccacctgtgcctgggctgtggccccttcctacagggcgctcaccatggccccgccgctcctgctgctgctgctggccagtggagcggccgcctgcccgctgccctgcgtctgccagaacctgtccgagtcgctcagcaccctctgtgcccaccgaggcctgctgtttgtgccgcccaacgtggaccggcgcacagtggagctgcggctggctgacaacttcatccaggccctggggccccctgacttccgcaacatgacgggactggtggacctgacactgtctcgcaatgccatcacccgcattggggcccgcgcctttggggacctcgagagcctgcgttccctccaccttgacggcaacaggctggtggagctgggcaccgggagcctccggggccccgtcaatctgcagcacctcatcctcagcggcaaccagctgggccgcatcgcgccgggagccttcgacgacttcctagagagcctggaggacctggacctgtcctacaacaacctccggcaggtgccctgggccggcatcggcgccatgcctgccctgcacaccctcaacctggaccataaccttattgacgcactgcccccaggcgccttcgcccagctcggtcagctctcccgcctggacctcacctccaaccgcctggccacgctggctccggacccgcttttctctcgtgggcgtgatgcagaggcctctcccgcccccctggtgctgagctttagcgggaaccccctgcactgcaactgtgagctgctgtggctgcggcggctggcgcggccggacgacctggaaacgtgcgcctccccgcccggcctggccggccgctacttctgggcagtgcccgagggcgagttctcctgtgagccgcccctcattgcccgccacacgcagcgcctctgggtgctggaaggccagcgggccacgctgcggtgccgggccctgggtgaccccgcgcctaccatgcactgggtcggtcctgacgaccggttggttggcaactcctcccgagcccgggctttccccaacgggaccttagagattggggtgaccggcgctggggacgctgggggctacacctgcatcgccaccaaccctgctggtgaggccacagcccgagtagaactgcgggtgctggccttgccccatggtgggaacagcagtgccgaggggggccgccccgggccctcggacatcgccgcctccgctcgcactgctgccgagggtgaggggacgctggagtctgagccagccgtgcaggtgacggaggtgaccgccacctcagggctggtgagctggggtcccgggcggccagccgacccagtgtggatgttccaaatccagtacaacagcagcgaagatgagaccctcatctaccggattgtcccagcctccagccaccacttcctgctgaagcacctcgtccccggcgctgactatgacctctgcctgctggccttgtcaccggccgctgggccctctgacctcacggccaccaggctgctgggctgtgcccatttctccacgctgccggcctcgcccctgtgccacgccctgcaggcccacgtgctgggcgggaccctgaccgtggccgtggggggtgtgctggtggctgccttactggtcttcactgtggccttgctggttcggggccggggggccggaaatggccgcctccccctcaagctcagccacgtccagtcccagaccaatggaggccccagccccacacccaaggcccacccgccgcggagccccccgccccggccgcagcgcagctgctctctggacctgggagatgccgggtgctacggttatgccaggcgcctgggaggagcttgggcccgacggagccactctgtgcatggggggctgctcggggcagggtgccggggggtaggaggcagcgccgagcggctggaagagagtgtggtgtgatggacgggcagcttcctgtgtgctccaagggatgagcctcgtggggcagagggcccggggccgccgcctggcctgggagtccctccctggtttttattctcagtacctcaggctcccctgtgtacttggaggggcagggagccctttcctcggttctggcctccagaccagggtaagggcaggcccctccaacaggtgctcacagccaccgaggcaggggctgcagccacccactgggagtcttgtttttatttataataaaattgttggggacacctcaaaaaaaaaaaaaaaaaaa

SEQ ID NO: 2747 - protein, 635 aa, Homo sapiens
MAPPLLLLLLASGAAACPLPCVCQNLSESLSTLCAHRGLLFVPPNVDRRTVELRLADNFIQALGPPDFRNMTGLVDLTLSRNAITRIGARAFGDLESLRSLHLDGNRLVELGTGSLRGPVNLQHLILSGNQLGRIAPGAFDDFLESLEDLDLSYNNLRQVPWAGIGAMPALHTLNLDHNLIDALPPGAFAQLGQLSRLDLTSNRLATLAPDPLFSRGRDAEASPAPLVLSFSGNPLHCNCELLWLRRLARPDDLETCASPPGLAGRYFWAVPEGEFSCEPPLIARHTQRLWVLEGQRATLRCRALGDPAPTMHWVGPDDRLVGNSSRARAFPNGTLEIGVTGAGDAGGYTCIATNPAGEATARVELRVLALPHGGNSSAEGGRPGPSDIAASARTAAEGEGTLESEPAVQVTEVTATSGLVSWGPGRPADPVWMFQIQYNSSEDETLIYRIVPASSHHFLLKHLVPGADYDLCLLALSPAAGPSDLTATRLLGCAHFSTLPASPLCHALQAHVLGGTLTVAVGGVLVAALLVFTVALLVRGRGAGNGRLPLKLSHVQSQTNGGPSPTPKAHPPRSPPPRPQRSCSLDLGDAGCYGYARRLGGAWARRSHSVHGGLLGAGCRGVGGSAERLEESVV

SEQ ID NO: 2748 - DNA, 3520 bp, Homo sapiens
ctggagcccagccggagcggcggcccctccgcggagcccggtcacagtcactgcagcagacatcatggctgtggatgtggcagaataccatctgagcgtcatcaagagcccccctggctgggaggtgggtgtctatgctgcaggggccctggccctgctgggaatcgcagctgtgagcctgtggaagctctggacgtcggggagcttccccagcccctctccgttccccaattacgactacaggtaccttcagcagaagtacggcgagagctgcgcagaggccagggagaagagagtgcctgcctggaatgcccagcgggccagcacgcggggaccacccagccgcaaaggcagtctcagcattgaggacacctttgagagcatcagtgaactggggcctctggagctgatgggccgggagttggacctggccccctatgggaccctccggaagtcccagtcggccgactccctgaactccatctcctccgtgagcaacacctttgggcaggacttcacactgggccaggtggaggtgagcatggagtacgacactgcctcccacacgctgaacgtggcggtgatgcagggcaaggacctcctggagcgggaggaggccagcttcgagtcctgcttcatgcgcgtcagcctgctgccggacgagcagatcgtgggcatttctcggatccagagaaatgcctactccatcttctttgatgagaagttctccatccccctggatcccacagccctggaggagaagagcctgcggttttctgtatttggcatcgatgaggatgagcgcaacgtcagcacgggggtggtggagctgaagctttctgtgcttgacctcccgctgcagcccttcagtggctggctctatttacaggaccagaacaaggccgccgatgctgtgggggagatcctgctctccctcagctacctccccacagccgagcgcctcaccgtggtcgtggttaaggccaagaacctcatctggaccaacgacaagaccacagcggaccccttcgtcaaggtgtacctgctgcaggatgggaggaagatgagcaaaaagaagacagccgtgaagagggatgaccccaacccggtgttcaacgaagccatgatcttctcggtgccagccattgtgctccaggacctgtctctccgcgtgacggtggctgagagcagcagcgacggccgtggggacaacgtgggccatgtcatcattgggccgtcagccagtggcatgggaaccacacattggaaccagatgttggccacgctgcgcaggcccgtgtccatgtggcacgctgtccggcgaaactagcaaccagggcgggccagttgggcaatggagctgctggagcccggtacccactcagctctgtctgatgccctctccatagcccagctggagccgtgaacactggggtcccctggcagagtcctcatgacccatcctggtctctctgtccagattgcagcagaggagtgggcgtggctctgtgtccagggccccagggtctgctcctgctgaggaccagctgtggctgggccaggacagaggactcaaccctgctcctcccggtaggccagctgccgagctgggctatgttctggaacccagtgaatcttgggggccaggcactgtgctaggcaccagcaggggtaacacgaagaagacccggcccttagggcatcaggaagactagctcccctgccccggaggatctgctcagtgctgatggcagcccagctgtgtggactcagggggctctgagggctagggaaacaggaagggcctctttgacaaggtaggagctgtgcttggaggggcaggaaaagaactgagcatgtcgcaggcagcgggcccagcctgagcaatggcaggatgtgaacttccccatcgcaaatgcagttctcagcccactgcagtggatacaaggaagggcctttctcggggccggagaagagaccaagagaccaggcccgggcagcagcctaccggccacgtggaacactggctccggagttattctctgtcaaatctactccccggacctcaaccatggcaagaaccagaggtccaaagaggcccagacccaggtccttgtgctcagtcctgcgcaaaccaggcccagaccctgcaagcatttgttgatgcccttgcaggcccactgggagaaagatgcctcaggcaggtctcagcctgggggtggcaggggtggggcagagagaatactgacagcagaggtcttggtgggctgcacgtgcctgcgaagatgtggtggacaaggaggctctcgggctgggccttggaggggtggcagcggaaggacagcccaggtggctgaggcctgatgggaagccggggaaggccagggtggaagggcggcttgagggacgccaggagaagactgaatgccaggctaggaaggaggcggctctcgatcacggggtgggtgcccccgacaccgggtctcctagcttgagttccctagaagcgaaatctgagagggggattctggggcaagtagtttcttgcgggtgagtgttctcagagaaacttaccagatcaagaaagggagctcaggctggatggaggaagccacgcaagtgtggcttcaagatccatcgccttggcctgatcgctgtgggggcaggggcctggagtacgaggggcaccctgggggctcccacccagaagcagaggggctgggctgttgcacctctactggcatcagtctttggttaccccccagccccagtaggaggagagcaggcagagcttgtcatccccagcctggtgtcccgcagtcccaggaagccgcttcttgccttcatggctgagtgctgggaagggctgagctcacccaggccagcaggtggggtatcatctgctcggtggggccacccacaggtgacagcatggaccctcaggctggctgcccctgttccttggtccataactggtgagctatggagacccaggccaacaaattatccccagtgatatggggggaggaggggctagaacaagggcccaggggactggaggcaggatggtggctttccctacctgacacagccatggcccagccccaaggccaggctgtctaccctatggccacagcaggaggtcagcccagggccaggagacacatggctggacaaggctttgcagcctgggagaccccgactttctctaacccagtggctgtgcggtgcaggccactgactccccccctgccctctcccctctctccctccccctaactgcatgacatgttaactgtgtgcccaggacagccgtggtggggaccgggtatgccaactggaatgattctagaaccaaaataaagttggggcaggaagagggggcttccagggagccctgctcggccctgaatcaccttcgtctcttctctaaaaaaaaaaaaaaaaaaaaaaaaaaaaaaaaaaaaaaaaaaaaaaaaaaaaaaaaaaaaaaaaaaaaaaaaaaaaaaaaaaaaaaaaa

SEQ ID NO: 2749 - protein, 421 aa, Homo sapiens
MAVDVAEYHLSVIKSPPGWEVGVYAAGALALLGIAAVSLWKLWTSGSFPSPSPFPNYDYRYLQQKYGESCAEAREKRVPAWNAQRASTRGPPSRKGSLSIEDTFESISELGPLELMGRELDLAPYGTLRKSQSADSLNSISSVSNTFGQDFTLGQVEVSMEYDTASHTLNVAVMQGKDLLEREEASFESCFMRVSLLPDEQIVGISRIQRNAYSIFFDEKFSIPLDPTALEEKSLRFSVFGIDEDERNVSTGVVELKLSVLDLPLQPFSGWLYLQDQNKAADAVGEILLSLSYLPTAERLTVVVVKAKNLIWTNDKTTADPFVKVYLLQDGRKMSKKKTAVKRDDPNPVFNEAMIFSVPAIVLQDLSLRVTVAESSSDGRGDNVGHVIIGPSASGMGTTHWNQMLATLRRPVSMWHAVRRN

SEQ ID NO: 2750 - DNA, 1111 bp, Homo sapiens
ctgggtctctgcgccgcagccgcccgcccgcccgctcagcgcccggccccgggatgacggcggcccaggccgcgggtgaggaggcgccaccaggcgtgcggtccgtcaaggtggtcctggtgggcgacggcggctgcgggaagacgtcgctgctgatggtcttcgccgatggggccttccccgagagctacacccccacggtgtttgagcggtacatggtcaacctgcaagtgaaaggcaaacctgtgcacctccacatctgggacacagcagggcaagatgactatgaccgcctgcggcccctgttctaccctgacgccagcgtcctgctgctttgcttcgatgtcaccagcccgaacagctttgacaacatctttaaccggtggtacccagaagtgaatcatttctgcaagaaggtacccatcatcgtcgtgggctgcaagactgacctgcgcaaggacaaatcactggtgaacaagctccgaagaaacggattggagcctgtgacctaccacaggggccaggagatggcgaggtccgtgggcgcggtggcctacctcgagtgctcggctcggctccatgacaacgtccacgccgtcttccaggaggccgccgaggtggccctcagcagccgcggtcgcaacttctggcggcggattacccagggcttttgcgtggtgacctgagcggctcggggcgtcccagcgacgcgggaaggggcagggcgctgacctgctgctgagctggctgggctggacccggtccctaggctgtgaccgccgaactccactgcaacagacgggcgccaccaaagccaggccctgaggcctgggagtcctggactgagaaagggggttcctgggcccacctgctctgtgtagggctcgtcctgcggtgcccgagaatcactcgctaacccctatgcccggtcccggaccgacatcctggagccgcctgtgcagcctgatgccccctcgtggctgctcccagggctgcacctgccaggacctaatgttcttaggtccctctggccagaacccacacccggccccttcccacctgtcatactggtaactgtaacaagaaaaacgacatcaaaaaaaaaaaaaaa

SEQ ID NO: 2751 - protein, 210 aa, Homo sapiens
MTAAQAAGEEAPPGVRSVKVVLVGDGGCGKTSLLMVFADGAFPESYTPTVFERYMVNLQVKGKPVHLHIWDTAGQDDYDRLRPLFYPDASVLLLCFDVTSPNSFDNIFNRWYPEVNHFCKKVPIIVVGCKTDLRKDKSLVNKLRRNGLEPVTYHRGQEMARSVGAVAYLECSARLHDNVHAVFQEAAEVALSSRGRNFWRRITQGFCVVT

SEQ ID NO: 2752 - DNA, 6210 bp, Homo sapiens
agaactcaagagcagaatctccgtgttgcaatctggttcctaaggaggaagaggaaggcagccctggagtggtttctttacagtaatttcaacagaagagtgagagatggaacccgaagaagaaaggattcgttacagccagagattgcgtggtaccatgcgacgacgctatgaagatgatggcatttcagatgatgaaattgaaggaaaaagaacttttgacttggaagagaaactgcacaccaacaaatataatgccaattttgttacttttatggaaggaaaagattttaatgtagagtatattcagcggggtggcttgagagatcctctgattttcaagaattctgatggactcggaataaaaatgccggatccagacttcactgtgaatgatgtcaaaatgtgtgtggggagtcgtcgcatggtggatgtcatggacgtgaacacacagaaaggcattgaaatgaccatggctcagtggacacgctactatgagaccccagaggaggagcgagagaaactctataatgtcatcagcctcgagtttagccacaccaggctggagaatatggtgcagaggccctccacggtggatttcattgactgggtagacaacatgtggccaaggcacttgaaggaaagccagactgaatcaacaaatgccatcttggagatgcagtaccctaaagtgcagaagtactgtctaatgagtgttcgaggctgctatactgacttccatgtggactttggtggtacctctgtttggtatcacatccatcaagggggaaaggtcttctggctcatcccccctacagcccacaacctggagctgtacgagaattggctgctgtcagggaaacagggagacatctttctgggtgaccgggtatcagattgtcagcgcattgagctcaagcagggctataccttcgtcattccctcaggctggattcatgctgtgtatactcctacagacacattagtgtttgggggcaattttttgcatagcttcaacatccctatgcagttaaaaatatacaacattgaagatcggacacgggttccaaataagtttcgctatccattctactatgagatgtgttggtatgtgttggagcgctatgtgtactgcataaccaaccgttcccacctaactaaggaatttcagaaagagtccctcagcatggatttggagttaaatgggttggagtctgggaatggggatgaggaagcagtggatcgagaaccccgacgcttgagcagcaggcgttctgtcctcactagccctgtagcgaatggagtcaacctggattatgatggactgggcaaaacctgccgaagtcttccaagtctgaagaaaactttggctggggactcatcttctgactgtagccggggctcccacaatggacaagtgtgggatccccagtgtgctccccgaaaggacaggcaagtgcatctgacccattttgagcttgaaggccttcgctgccttgtagataagttggagtctctgccactgcacaagaaatgtgtccccacagggatagaagatgaagatgctctcattgctgatgtaaagattttgctggaggagcttgccaacagcgatcccaagttagccctcactggagttcctatagtacagtggccaaaaagggataagcttaaattccccactcggccaaaggtgcgggttcctaccatccccattacgaagcctcacactatgaaaccagctccacggttaacacctgtgaggccagctgctgcctccccgattgtgtcaggagccagacggagacgagtgcgatgtcgaaaatgcaaagcctgtgtgcaaggagagtgtggtgtttgccactactgcagagacatgaagaagtttggggggcctggacgcatgaagcagtcctgtgtcctccgacagtgcttggcacccagactgcctcactcagtcacatgttccctctgtggagaggtggatcagaatgaagagacacaagactttgagaagaaactcatggaatgctgtatctgcaatgagattgttcatcctggctgcctccagatggacggagaggggttgcttaacgaagaattgccaaattgctgggaatgtccaaagtgctaccaggaggacagctcggagaaagcccagaagcggaaaatggaagagagtgacgaagaagctgtgcaagccaaagtcctgcggcccctgcggagctgcgatgagcctctcacgcccccgcctcattcacccacttccatgctgcagctcatccatgacccggtttccccccggggtatggtgactcggtcatcccctggggctggccccagcgaccaccacagtgccagccgcgatgagcgcttcaaacggcggcagttgctgcggctgcaggccacagagcgcaccatggtacgggaaaaggagaacaatcccagcggcaaaaaggagctgtctgaagttgagaaagccaagatccggggatcgtacctcactgtcacgctacagaggcccaccaaagagctccacgggacatccattgtgcccaagctgcaggccatcacggcctcctctgccaaccttcgccattccccccgtgtgctagtgcagcactgcccagcccgaaccccccagcgtggggatgaggaggggctggggggagaggaggaggaagaggaggaggaggaggaggaagatgacagtgcagaggaggggggtgcagccaggctgaatggccggggcagttgggctcaggatggagacgaaagctggatgcagcgggaggtctggatgtctgtcttccgctacctcagccgcagagaactttgtgaatgtatgcgagtgtgcaagacgtggtataaatggtgctgcgacaagagactttggacaaaaattgacttgagtaggtgtaaggccattgtgccccaggccctcagtggcatcatcaagaggcagccagtcagccttgacctcagttggaccaacatctctaaaaagcaactgacatggctcgtcaataggctgccaggactgaaagacctcctcctagcaggctgctcctggtctgcagtctctgccctcagcacctccagctgcccccttctcaggacccttgatcttcggtgggcagtaggaatcaaggaccctcaaattcgggacttgcttactccaccggctgataaaccaggtcaggacaatcgcagcaagctccggaacatgaccgacttccggctggcaggccttgacatcacagatgccacgcttcgcctcataattcgccacatgcccctcctgtctcgactcgacctcagtcactgcagccaccttacagatcagtcctccaatctactcactgctgtcgggtcttccactcgctactctctcacagagctcaatatggcaggttgcaataaattgacagaccagaccctgatctacctacggcgcattgccaacgtcaccttgatcgaccttcgaggatgcaagcagatcactcgaaaagcctgcgagcacttcatctcagacttgtccatcaacagcctctactgcctgtctgacgagaagctgatacagaagatcagctaagacacacccagcccagattcaacaggaaaccgatcttcccctgactccccaccgaggagagcctctcctcgaccctgcacgggctctgaggccagcgtcacactccctctctgctctcctgtcccttgagcccttcctctacaggtggggcagagagggtggtggacaccaggcttatctgcctgctcctctccctcctaaggaaaagggagtagcagattgatctgaggggaaagcacaggctgtgctgtcgaggcgcctgctcgcttactcgcctgccaggaggccgggctctcagtttggggtgtttgtgcaaccttcatctgcactgggccctgtgcccctcctccccatccatggtccccagcagtgcctggttctgagcaaactcccagggaagaaaacggccctgtctccatggccaggttcttgtggtgtccagtgcgcgtctctcctccatcacactctcccggcttgcgcaggaggggccagcagccccaggagtcccagacccgtgccgatcacactggtgctgttgagatctcccaaacctcacgtccttaactgtgctctccctcctttcctctcccttgagcttggttctgcccagcactcgtgcttgttcacataattaggtttcccaccccagcctacccgacttacttgctagtctctatgaggtccttattgcacttattggggttgaagctcttcagaggagctggaactgtctaccccagggacacacccatttcgttgctacccaagtggattctgagacaggcaccatctccttgttccccctctctcttttgcctcccactgactgcccttttccatgtgtcttcattctgcctgaagaaggctttcccaggatgcacgtcctcagagggagcagcctatctcccccaagctggaggcggcagaggactgggccaagccccaacctgcctcccagccaggctcctccaggcctctggtttagcggagccccctgagcccaggcctgtgtctagccccagtggctcactgaactttcagggcagtcagggggtcctgcttagaagccagtcaccagccctctgcctgcagccatggaagggggtgtgcacgtgcctctgtgtgtgtggctgagtgtattctgcgcgtgtgtgtggagggagggagggaggggagcatggtgtctcccgctccaccgccctttgttgagccccatcagctgcccccttttactttgcattgaacggcctgtccaaagatcctctctctagggcagcagagagctttttgcactttaaaaaaaaaaagaaagaaagaaaggtcggaatttcttttgggtcaatatttttaagtgtgtgaggagatgctcagtagcagcagcctatggcaagagcttataaatgattgatgcaaatttgcactctgctccccctctgtaaggatactgatagcacaacctcttccccccaccccgccccgccttttggtcgtccatccctgtccctttctggccctcttcctgtagcccagtctcaggctttcctcttcctgaagccctacagagttagggaatggagcccaggcaccaggggtctaaagtgtgagccactgagaagagagacgccaactgcacccttgccacttccaaagcaatagaggcagagtggtcccctctttgccacctaggccagttttgaccctggcattaactggccttagaagaaactggatcctggtagggggtggcattttgtttgtttcttccaatctgctgaatcttttgactgcaccttacaaacagcagtctgctcccatgaccctctgcccacttccattggtctccaggccccaataatctggggttgaaactttgaggaaatgccagtgacttattccagagtgcctcagttaggggaacttctctgtaaagaaccctgggtattgagcaaaaaccttattatcgttaatgacctataattggaagcttcctgcctttttctttggttgctcctgtggaaaatactgaaaagattactttgttttattttgttgtctttttataaaaggggaggtggagagaccccttcagagcagggattgtgccgggagagtgcctctgactttgggacatttcatccacagaaatttccaagccaatggtttcttttgggttttggtttttatgtttgttttttggggtttggaaaaacatgcatttttaccgtgcacgtaaattggtcagcagaaaagggagcccagaaaaggcagcagatggaccatgcccttgctgggttttccttttctttgggactgtgaggggaaatggtttttagaggtgagggttggtccatgtggaggaaagaagtgtctctgttgggggacagaggaacctggggagtccatcgcatgtcctacaatctgctcttagacacggccttgccaggagagcctgccctcagactgcaggaccagaacccctgcctccatctttccaagcaccggggcgaaaaaccacaaaggaaaggaagaaaatttatatatatataatataaaatcacttggtgattaaaaaaataactgctccataaataaaactcctaaagtcacttatgttt

SEQ ID NO: 2753 - protein, 1162 aa, Homo sapiens
MEPEEERIRYSQRLRGTMRRRYEDDGISDDEIEGKRTFDLEEKLHTNKYNANFVTFMEGKDFNVEYIQRGGLRDPLIFKNSDGLGIKMPDPDFTVNDVKMCVGSRRMVDVMDVNTQKGIEMTMAQWTRYYETPEEEREKLYNVISLEFSHTRLENMVQRPSTVDFIDWVDNMWPRHLKESQTESTNAILEMQYPKVQKYCLMSVRGCYTDFHVDFGGTSVWYHIHQGGKVFWLIPPTAHNLELYENWLLSGKQGDIFLGDRVSDCQRIELKQGYTFVIPSGWIHAVYTPTDTLVFGGNFLHSFNIPMQLKIYNIEDRTRVPNKFRYPFYYEMCWYVLERYVYCITNRSHLTKEFQKESLSMDLELNGLESGNGDEEAVDREPRRLSSRRSVLTSPVANGVNLDYDGLGKTCRSLPSLKKTLAGDSSSDCSRGSHNGQVWDPQCAPRKDRQVHLTHFELEGLRCLVDKLESLPLHKKCVPTGIEDEDALIADVKILLEELANSDPKLALTGVPIVQWPKRDKLKFPTRPKVRVPTIPITKPHTMKPAPRLTPVRPAAASPIVSGARRRRVRCRKCKACVQGECGVCHYCRDMKKFGGPGRMKQSCVLRQCLAPRLPHSVTCSLCGEVDQNEETQDFEKKLMECCICNEIVHPGCLQMDGEGLLNEELPNCWECPKCYQEDSSEKAQKRKMEESDEEAVQAKVLRPLRSCDEPLTPPPHSPTSMLQLIHDPVSPRGMVTRSSPGAGPSDHHSASRDERFKRRQLLRLQATERTMVREKENNPSGKKELSEVEKAKIRGSYLTVTLQRPTKELHGTSIVPKLQAITASSANLRHSPRVLVQHCPARTPQRGDEEGLGGEEEEEEEEEEEDDSAEEGGAARLNGRGSWAQDGDESWMQREVWMSVFRYLSRRELCECMRVCKTWYKWCCDKRLWTKIDLSRCKAIVPQALSGIIKRQPVSLDLSWTNISKKQLTWLVNRLPGLKDLLLAGCSWSAVSALSTSSCPLLRTLDLRWAVGIKDPQIRDLLTPPADKPGQDNRSKLRNMTDFRLAGLDITDATLRLIIRHMPLLSRLDLSHCSHLTDQSSNLLTAVGSSTRYSLTELNMAGCNKLTDQTLIYLRRIANVTLIDLRGCKQITRKACEHFISDLSINSLYCLSDEKLIQKIS

SEQ ID NO: 2754 - DNA, 3603 bp, Homo sapiens
ctcggcctcgggcgcggccgagcgccgcgcgagcaggagcggcggcggcggcggcggcggcgggaggaggcagcgccggcccaagatggcggacctggaggcggtgctggccgacgtgagctacctgatggccatggagaagagcaaggccacgccggccgcgcgcgccagcaagaagatactgctgcccgagcccagcatccgcagtgtcatgcagaagtacctggaggaccggggcgaggtgacctttgagaagatcttttcccagaagctggggtacctgctcttccgagacttctgcctgaaccacctggaggaggccaggcccttggtggaattctatgaggagatcaagaagtacgagaagctggagacggaggaggagcgtgtggcccgcagccgggagatcttcgactcatacatcatgaaggagctgctggcctgctcgcatcccttctcgaagagtgccactgagcatgtccaaggccacctggggaagaagcaggtgcctccggatctcttccagccatacatcgaagagatttgtcaaaacctccgaggggacgtgttccagaaattcattgagagcgataagttcacacggttttgccagtggaagaatgtggagctcaacatccacctgaccatgaatgacttcagcgtgcatcgcatcattgggcgcgggggctttggcgaggtctatgggtgccggaagcgtgacacaggcaagatgtacgccatgaagtgcctggacaaaaagcgcatcaagatgaagcagggggagaccctggccctgaacgagcgcatcatgctctcgctcgtcagcactggggactgcccattcattgtctgcatgtcatacgcgttccacacgccagacaagctcagcttcatcctggacctcatgaacggtggggacctgcactaccacctctcccagcacggggtcttctcagaggctgacatgcgcttctatgcggccgagatcatcctgggcctggagcacatgcacaaccgcttcgtggtctaccgggacctgaagccagccaacatccttctggacgagcatggccacgtgcggatctcggacctgggcctggcctgtgacttctccaagaagaagccccatgccagcgtgggcacccacgggtacatggctccggaggtcctgcagaagggcgtggcctacgacagcagtgccgactggttctctctggggtgcatgctcttcaagttgctgcgggggcacagccccttccggcagcacaagaccaaagacaagcatgagatcgaccgcatgacgctgacgatggccgtggagctgcccgactccttctcccctgaactacactccctgctggaggggttgctgcagagggatgtcaaccggagattgggctgcctgggccgaggggctcaggaggtgaaagagagcccctttttccgctccctggactggcagatggtcttcttgcagaggtaccctcccccgctgatccccccacgaggggaggtgaacgcggccgacgccttcgacattggctccttcgatgaggaggacacaaaaggaatcaagttactggacagtgatcaggagctctaccgcaacttccccctcaccatctcggagcggtggcagcaggaggtggcagagactgtcttcgacaccatcaacgctgagacagaccggctggaggctcgcaagaaagccaagaacaagcagctgggccatgaggaagactacgccctgggcaaggactgcatcatgcatggctacatgtccaagatgggcaacccctttctgacccagtggcagcggcggtacttctacctgttccccaaccgcctcgagtggcggggcgagggcgaggccccgcagagcctgctgaccatggaggagatccagtcggtggaggagacgcagatcaaggagcgcaagtgcctgctcctcaagatccgcggtgggaaacagttcattttgcagtgcgatagcgaccctgagctggtgcagtggaagaaggagctgcgcgacgcctaccgcgaggcccagcagctggtgcagcgggtgcccaagatgaagaacaagccgcgctcgcccgtggtggagctgagcaaggtgccgctggtccagcgcggcagtgccaacggcctctgacccgcccacccgccttttataaacctctaatttattttgtcgaatttttattatttgttttcccgccaagcgaaaaggttttattttgtaattattgtgatttcccgtggccccagcctggcccagctcccccgggaggccccgcttgcctcggctcctgctgcaccaacccagccgctgcccggcgccctctgtcctgacttcaggggctgcccgctcccagtgtcttcctgtgggggaagagcacagccctcccgccccttccccgagggatgatgccacaccaagctgtgccaccctgggctctgtgggctgcacttgtgccatgggactgtgggtggcccatcccccctcaccaggggcaggcacagcacagggatccgacttgaattttcccactgcaccccctcctgctgcagaggggcaggccctgcactgtcctgctccacagtgttggcgagaggaggggcccgttgtctccctggccctcaaggctcccacagtgactcgggctcctgtgcccttattcaggaaaagcctctgtgtcactggctgcctccactcccacttccctgacactgcggggcttggctgagagagtggcattggcagcaggtgctgctaccctccctgctgtcccctcttgccccaacccccagcacccgggctcagggaccacagcaaggcacctgcaggttgggccatactggcctcgcctggcctgaggtctcgctgatgctgggctgggtgcgaccccatctgcccaggacggggccggccaggtgggcgggcagcacagcaaggaggctggctggggcctatcagtgtgccccccatcctggcccatcagtgtacccccgcccagactggccagccccacagcccacgtcctgtcagtgccgccgcctcgcccaccgcatgccccctgtgccagtgctctgcctgtgtgtgtgcactcgtgtcgcgccttctcccccccggggctgggttggcgcaccctcccctcccgtctactcattccccggggcgtttctttgccgatttttgaatgtgattttaaagagtgaaaaatgagactatgcgtttttataaaaaatggtgcctgattcggctgtctcagactctttttgtacctggtgaccccttttcagcttctgctgggctggggcctgatggggagggtctcggtggtaccaggtctcctccaccgccatggcttccaaggtggtctgctcgggcccaggccatcttccaggtggggtgaggcagtgggtcccacttcccctcctacccctcccagctgacagtcctctccacctagtggctgtccagtgcccattcctcaccttttcccggggaggagagagcagcttctgccacttcccaggtaagcaggaggaggtgccaacagtgttaggcctggcacagtgtctgggtgatcgggacct

SEQ ID NO: 2755 - protein, 689 aa, Homo sapiens
MADLEAVLADVSYLMAMEKSKATPAARASKKILLPEPSIRSVMQKYLEDRGEVTFEKIFSQKLGYLLFRDFCLNHLEEARPLVEFYEEIKKYEKLETEEERVARSREIFDSYIMKELLACSHPFSKSATEHVQGHLGKKQVPPDLFQPYIEEICQNLRGDVFQKFIESDKFTRFCQWKNVELNIHLTMNDFSVHRIIGRGGFGEVYGCRKRDTGKMYAMKCLDKKRIKMKQGETLALNERIMLSLVSTGDCPFIVCMSYAFHTPDKLSFILDLMNGGDLHYHLSQHGVFSEADMRFYAAEIILGLEHMHNRFVVYRDLKPANILLDEHGHVRISDLGLACDFSKKKPHASVGTHGYMAPEVLQKGVAYDSSADWFSLGCMLFKLLRGHSPFRQHKTKDKHEIDRMTLTMAVELPDSFSPELHSLLEGLLQRDVNRRLGCLGRGAQEVKESPFFRSLDWQMVFLQRYPPPLIPPRGEVNAADAFDIGSFDEEDTKGIKLLDSDQELYRNFPLTISERWQQEVAETVFDTINAETDRLEARKKAKNKQLGHEEDYALGKDCIMHGYMSKMGNPFLTQWQRRYFYLFPNRLEWRGEGEAPQSLLTMEEIQSVEETQIKERKCLLLKIRGGKQFILQCDSDPELVQWKKELRDAYREAQQLVQRVPKMKNKPRSPVVELSKVPLVQRGSANGL

SEQ ID NO: 2756 - DNA, 2219 bp, Homo sapiens
actgctgcgggggccgcggggggcgcagctggggcgcggctcggaggggaggctagggggccgtgccaggcccgaagccgaggcggggccgggatgcggcgctgaggcccagcatggccggcccgggccccaccttcccgctgcaccggctcgtctgggcgaaccggcatcgcgaactggaggccgcactgcacagccaccaggttccgccaaactcctgacaacctgcagctctgcctgaccaggccccgccgccagaccccggctctgcccctgccttccctcctgccccctcctctcccctgccaggacacgcaggccaccctctgccatctccctgcacgacattgaacaggaggacccccgcgggcggaccccactggagctggccgtgtctctgggaaacctggagtctgtgagagtgctccttcgacacaatgccaacgtgggcaaagagaaccgccagggctgggcagtcctgcaggaggcagtcagcactggagaccccgagatggtgcagctggtgctccagtatcgggactaccagagggccacgcagaggctggcgggcattccggaactgctcaacaaacttcgccaggcccccgatttctacgttgagatgaagtgggagttcaccagctgggtgccccttgtgtctaagatgtgcccaagcgatgtgtaccgcgtgtggaagcggggtgagagcctgcgagtagacaccagtctcctgggcttcgagcacgtgacctggcagcggggccggaggagcttcatcttcaagggccaggaggcaggagccctggtgatggaagtggaccatgaccggcaggtggtgcatgtggagacactggggctcactctgcaggagcccgaaacactgctggccgccatgcggcccagcgaggagcatgtggccagtcgcctcacctctcctatcgtctccacccacctggacactcgtaatgtggcctttgagaggaacaaatgtggtatctggggctggcggtctgagaagatggaaactgttagcggctacgaggccaaggtgtacagtgccaccaacgtggagctggtgacacgcacacgcacggagcacctctctgatcaggacaagtcgaggagcaaagcggggaagactccattccagtccttcctggggatggcgcagcagcattcctcccacaccggggcccccgtgcagcaggcagccagccccaccaaccccacagccatctcccctgaggagtacttcgaccccaacttcagcctggagtcacggaacattggccgccccatcgagatgtccagcaaagtacagaggttcaaggcaacactgtggctgagtgaagagcacccgctctccctgggtgaccaggtgacccccatcatcgacctaatggccatcagcaacgctcactttgccaagctgcgcgacttcatcactctgcgccttccacctggcttccccgtcaaaattgagattccccttttccacgtgctcaatgcccgcatcaccttcagcaacctgtgtggctgtgatgagcccctgagctccgtgtgggtgccggcccccagctctgctgtcgccgcatcagggaaccctttcccgtgcgaggtggaccccaccgtgtttgaagtgcccaacgggtacagcgtgctgggcatggagcgcaacgagcccctccgggacgaggacgatgacctcctgcagttcgccatccagcagagcctgcttgaagcgggcactgaggcggagcaggtgaccgtctgggaagccctgaccaacacccggcccggtgcccgccctcctccccaggccacggtttatgaggaacagcttcagctggagcgggccctccaggaaagcctgcagctgtccacagagcccaggggcccaggatcccctcccaggacacccccagcccccggtccacccagctttgaagagcagctgcgcctggccctggagttgtcttcacgggagcaggaggagcgggagcggcgcgggcagcaggaggaggaggacttacagcggatcctgcagctgtcactcactgagcactgagccatagccccgggagggctggccaggccactccctgcccacttttgtaatttatttatttataaactctctgctgctgagcttggggcctggagccccaggaatgagcaggcaggggagactgagatggaaataaagagactgtcgcagc

SEQ ID NO: 2757 - protein, 518 aa, Homo sapiens
MVQLVLQYRDYQRATQRLAGIPELLNKLRQAPDFYVEMKWEFTSWVPLVSKMCPSDVYRVWKRGESLRVDTSLLGFEHVTWQRGRRSFIFKGQEAGALVMEVDHDRQVVHVETLGLTLQEPETLLAAMRPSEEHVASRLTSPIVSTHLDTRNVAFERNKCGIWGWRSEKMETVSGYEAKVYSATNVELVTRTRTEHLSDQDKSRSKAGKTPFQSFLGMAQQHSSHTGAPVQQAASPTNPTAISPEEYFDPNFSLESRNIGRPIEMSSKVQRFKATLWLSEEHPLSLGDQVTPIIDLMAISNAHFAKLRDFITLRLPPGFPVKIEIPLFHVLNARITFSNLCGCDEPLSSVWVPAPSSAVAASGNPFPCEVDPTVFEVPNGYSVLGMERNEPLRDEDDDLLQFAIQQSLLEAGTEAEQVTVWEALTNTRPGARPPPQATVYEEQLQLERALQESLQLSTEPRGPGSPPRTPPAPGPPSFEEQLRLALELSSREQEERERRGQQEEEDLQRILQLSLTEH

SEQ ID NO: 2758 - DNA, 2808 bp, Homo sapiens
gtccgtccttcctggtcctgcgggtccaggactgtccgcggggttgagggaaggggccgtgcccggtgccagcccaggtgctcgcggcctggctccatggccctggtcacagtgagccgttcgcccccgggcagcggcgcctccacgcccgtggggccctgggaccaggcggtccagcgaaggagtcgactccagcgaaggcagagctttgcggtgctccgtggggctgtcctgggactgcaggatggaggggacaatgatgatgcagcagaggccagttctgagccaacagagaaggccccgagtgaggaggagctccacggggaccagacagacttcgggcaaggatcccagagtccccagaagcaggaggagcagaggcagcacctgcacctcatggtacagctgctgaggccgcaggatgacatccgcctggcagcccagctggaggcaccccggcctccccggctccgctacctgctggtagtttctacacgagaaggagaaggtctgagccaggatgagacggtcctcctgggcgtggatttccctgacagcagctcccccagctgcaccctgggcctggtcttgcccctctggagtgacacccaggtgtacttagatggagacgggggcttcagcgtgacgtctggtgggcaaagccggatcttcaagcccatctccatccagaccatgtgggccacactccaggtattgcaccaagcatgtgaggcagctctaggcagcggccttgtaccgggtggcagtgccctcacctgggccagccactaccaggagagactgaactccgaacagagctgcctcaatgagtggacggctatggccgacctggagtctctgcggcctcccagcgccgagcctggcgggtcctcagaacaggagcagatggagcaggcgatccgtgctgagctgtggaaagtgttggatgtcagtgacctggagagtgtcacttccaaagagatccgccaggctctggagctgcgcctggggctccccctccagcagtaccgtgacttcatcgacaaccagatgctgctgctggtggcacagcgggaccgagcctcccgcatcttcccccacctctacctgggctcagagtggaacgcagcaaacctggaggagctgcagaggaacagggtcacccacatcttgaacatggcccgggagattgacaacttctaccctgagcgcttcacctaccacaatgtgcgcctctgggatgaggagtcggcccagctgctgccgcactggaaggagacgcaccgcttcattgaggctgcaagagcacagggcacccacgtgctggtccactgcaagatgggcgtcagccgctcagcggccacagtgctggcctatgccatgaagcagtacgaatgcagcctggagcaggccctgcgccacgtgcaggagctccggcccatcgcccgccccaaccctggcttcctgcgccagctgcagatctaccagggcatcctgacggccagccgccagagccatgtctgggagcagaaagtgggtggggtctccccagaggagcacccagcccctgaagtctctacaccattcccacctcttccgccagaacctgagggtggtggggaggagaaggttgtaggcatggaagagagccaggcagccccgaaagaagagcctgggccacggccacgtataaacctccgaggggtcatgaggtccatcagtcttctggagccctccttggagctggagagcacctcagagaccagtgacatgccagaggtcttctcttcccacgagtcttcacatgaagagcctctgcagcccttcccacagcttgcaaggaccaagggaggccagcaggtggacagggggcctcagcctgccctgaagtcccgccagtcagtggttaccctccagggcagtgccgtggtggccaaccggacccaggccttccaggagcaggagcaggggcaggggcaggggcagggagagccctgcatttcctctacgcccaggtcccggaaggtggtgagacaggccagcgtgcatgacagtggagaggagggcgaggcctgagccctcacacatgcccacgctcccctgacactgaagaggatccacaactccttggagaaacaccctcacgtctgttgccgcacacattcctctcagctccgccccatacccgtcactacagcctcacctcccacccctgtcactacggcctcacctcccacccctgtcactacagcctcacctcctacagccttaagtcccaggcccatgtctgcctgtccaagggctcaagactttctaactgggatgtggtagagggactgaaggtacctttgggggcaacagcaccctagtttcattctcaactctagccctgcacactcacctgtggcacggaatgaaaacagagcttcccgtgcaaaaagggtcacgcctcccacccccgccccctccctgcacctcctgtcctctcccagttcattcctggaaccagccaggccaggcaaccagtggcccccaaaggcaggcaggatcctcaggccccagccgcgggaggctggaagggctggcagatcgcttccctcatccacctccaccggtccaggtctttgctgctgtccccagacctcctgtgacaccacgccagatcacagggcaccaggccagagatagtcttctttttgtcctttctggcctctggctagtcagtttttcatagccttacagtatctggctttgtactgagaaataaaacacattttcatatttggttaaaaaaaaaaaaaaaaaaaa

SEQ ID NO: 2759 - protein, 659 aa, Homo sapiens
MALVTVSRSPPGSGASTPVGPWDQAVQRRSRLQRRQSFAVLRGAVLGLQDGGDNDDAAEASSEPTEKAPSEEELHGDQTDFGQGSQSPQKQEEQRQHLHLMVQLLRPQDDIRLAAQLEAPRPPRLRYLLVVSTREGEGLSQDETVLLGVDFPDSSSPSCTLGLVLPLWSDTQVYLDGDGGFSVTSGGQSRIFKPISIQTMWATLQVLHQACEAALGSGLVPGGSALTWASHYQERLNSEQSCLNEWTAMADLESLRPPSAEPGGSSEQEQMEQAIRAELWKVLDVSDLESVTSKEIRQALELRLGLPLQQYRDFIDNQMLLLVAQRDRASRIFPHLYLGSEWNAANLEELQRNRVTHILNMAREIDNFYPERFTYHNVRLWDEESAQLLPHWKETHRFIEAARAQGTHVLVHCKMGVSRSAATVLAYAMKQYECSLEQALRHVQELRPIARPNPGFLRQLQIYQGILTASRQSHVWEQKVGGVSPEEHPAPEVSTPFPPLPPEPEGGGEEKVVGMEESQAAPKEEPGPRPRINLRGVMRSISLLEPSLELESTSETSDMPEVFSSHESSHEEPLQPFPQLARTKGGQQVDRGPQPALKSRQSVVTLQGSAVVANRTQAFQEQEQGQGQGQGEPCISSTPRSRKVVRQASVHDSGEEGEA

SEQ ID NO: 2760 - DNA, 2604 bp, Homo sapiens
atggccctggtcacagtgagccgttcgcccccgggcagcggcgcctccacgcccgtggggccctgggaccaggcggtccagcgaaggagtcgactccagcgaaggcagagctttgcggtgctccgtggggctgtcctgggactgcaggatggaggggacaatgatgatgcagtagaggccagttctgagccaacagagaaggccccgagtgaggaggagctccacggggaccagacagacttcgggcaaggatcccagagtccccagaagcaggaggagcagaggcagcacctgcacctcatggtacagctgctgaggccgcaggatgacatccgcctggcagcccagctggaggcaccccggcctccccggctccgctacctgctggtagtttctacacgagaaggagaaggtctgagccaggatgagacggtcctcctgggcgtggatttccctgacagcagctcccccagctgcaccctgggcctggtcttgcccctctggagtgacacccaggtgtacttagatggagacgggggcttcagcgtgacgtctggtgggcaaagccggatcttcaagcccatctccatccagaccatgtgggccacactccaggtattgcaccaagcatgtgaggcagctctaggcagcggccttgtaccgggtggcagtgccctcacctgggccagccactaccaggagagactgaactccgaacagagctgcctcaatgagtggacggctatggccgacctggagtctctgcggcctcccagcgccgagcctggcgggtcctcagaacaggagcagatggagcaggcgatccgtgctgagctgtggaaagtgttggatgtcagtgacctggagagtgtcacttccaaagagatccgccaggctctggagctgcgcctggggctccccctccagcagtaccgtgacttcatcgacaaccagatgctgctgctggtggcacagcgggaccgagcctcccgcatcttcccccacctctacctgggctcagagtggaacgcagcaaacctggaggagctgcagaggaacagggtcacccacatcttgaacatggcccgggagattgacaacttctaccctgagcgcttcacctaccacaatgtgcgcctctgggatgaggagtcggcccagctgctgccgcactggaaggagacgcaccgcttcattgaggctgcaagagcacagggcacccacgtgctggtccactgcaagatgggcgtcagccgctcagcggccacagtgctggcctatgccatgaagcagtacgaatgcagcctggagcaggccctgcgccacgtgcaggagctccggcccatcgcccgccccaaccctggcttcctgcgccagctgcagatctaccagggcatcctgacggccagaacctgagggtggtggggaggagaaggttgtaggcatggaagagagccaggcagccccgaaagaagagcctgggccacggccacgtataaacctccgaggggtcatgaggtccatcagtcttctggagccctccttggagctggagagcacctcagagaccagtgacatgccagaggtcttctcttcccacgagtcttcacatgaagagcctctgcagcccttcccacagcttgcaaggaccaagggaggccagcaggtggacagggggcctcagcctgccctgaagtcccgccagtcagtggttaccctccagggcagtgccgtggtggccaaccggacccaggccttccaggagcaggagcaggggcaggggcaggggcagggagagccctgcatttcctctacgcccaggttccggaaggtggtgagacaggccagcgtgcatgacagtggagaggagggcgaggcctgagccctcacacatgcccacgctcccctgacactgaagaggatccacaactccttggagaaacaccctcacgtctgttgccgcacacattcctctcagctccgccccatacccgtcactacagcctcacctcccacccctgtcactacggcctcacctcccacccctgtcactacagcctcacctcctacagccttaagtcccaggcccatgtctgcctgtccaagggctcaagactttctaactgggatgtggtagagggactgaaggtacctttgggggcaacagcaccctagtttcattctcaactctagccctgcacactcacctgtggcacggaatgaaaacagagcttcccgtgcaaaaagggtcacgcctcccacccccgccccctccctgcacctcctgtcctctcccagttcattcctggaaccagccaggccaggcaaccagtggcccccaaaggcaggcaggatcctcaggccccagccgcgggaggctggaagggctggcagatcgcttccctcatccacctccaccggtccaggtctttgctgctgtccccagacctcctgtgacaccacgccagatcacagggcaccaggccagagatagtcttctttttgtcctttctggcctctggctagtcagtttttcatagccttacagtatctggctttgtactgagaaataaaacacattttcataaaaaaaaaaaaaaaaaa

SEQ ID NO: 2761 - protein, 471 aa, Homo sapiens
MALVTVSRSPPGSGASTPVGPWDQAVQRRSRLQRRQSFAVLRGAVLGLQDGGDNDDAVEASSEPTEKAPSEEELHGDQTDFGQGSQSPQKQEEQRQHLHLMVQLLRPQDDIRLAAQLEAPRPPRLRYLLVVSTREGEGLSQDETVLLGVDFPDSSSPSCTLGLVLPLWSDTQVYLDGDGGFSVTSGGQSRIFKPISIQTMWATLQVLHQACEAALGSGLVPGGSALTWASHYQERLNSEQSCLNEWTAMADLESLRPPSAEPGGSSEQEQMEQAIRAELWKVLDVSDLESVTSKEIRQALELRLGLPLQQYRDFIDNQMLLLVAQRDRASRIFPHLYLGSEWNAANLEELQRNRVTHILNMAREIDNFYPERFTYHNVRLWDEESAQLLPHWKETHRFIEAARAQGTHVLVHCKMGVSRSAATVLAYAMKQYECSLEQALRHVQELRPIARPNPGFLRQLQIYQGILTART

SEQ ID NO: 2762 - DNA, 946 bp, Homo sapiens
ctctctcggtttgtctgggtcatcttgtctgcccgccgctggcctggccccgtctgtctctctcagcagctgtctttctcgcgcccactggccggtctctcctcttccccgcagttgcctccttctctgcctgcctgggtggccgccatgggccggaagcggctcatcactgattcctacccggttgtgaagaggagggaggggcccgctgggcacagcaagggggagctggcacccgagctaggggaggagccccagccccgcgacgaggaggaagcggagctggagctgctgaggcagtttgacctggcctggcagtacgggccctgcaccgggatcacacggctgcagcgctggtgtcgggccaagcatatgggcttggagcctcccccagaggtgtggcaggtgctgaagacccaccccggagacccccgcttccagtgcagtctctggcatctctatcccctatgaggcaccacgtaagacctcctgcccttagctctcttgctcaccacccaagaacctcaggacagaagcgagagcccattgctcctgctcagctcagcccggctgcggaggaacccttggcaggcagaacctggaggtgtcagaggctcaactcctccatctaaccagcaggctcccagagtccccggaagagcctgcgcagctgaagcagagtgcttctagatggagagtggtcactggggaaaaggacctggccatcaccttccaatacctgctgcctgtctccctgacccatgatctggcaagttaggcacagtcagacatggacagttgatccatgaggaaaagatgctctcccacctaaggccaggaatctgagagcaggactggctgagctcccagggcaaggggttcactaatgcttatcaataaagaatattgagcctggaaaaaaaaaaaaaaaaaaaaaaaaaaaaaa

SEQ ID NO: 2763 - protein, 107 aa, Homo sapiens
MGRKRLITDSYPVVKRREGPAGHSKGELAPELGEEPQPRDEEEAELELLRQFDLAWQYGPCTGITRLQRWCRAKHMGLEPPPEVWQVLKTHPGDPRFQCSLWHLYPL

SEQ ID NO: 2764 - DNA, 1860 bp, Homo sapiens
acgtcagaaaaaaaaaaaaaaagtttgcagaatgtcccacaccgaaaaaaaaaaaaaatccgaaaccgagcgaaaaaaacctgcgagtgggcctggcggatgggattattaaagcttcgccggagccgcggctcgccctcccactccgccagcctccgggagaggagccgcacccggccggcccggccccagccccatggacctccgagcaggggactcgtgggggatgttagcgtgcctgtgcacggtgctctggcacctccctgcagtgccagctctcaatcgcacaggggacccagggcctggcccctccatccagaaaacctatgacctcacccgctacctggagcaccaactccgcagcttggctgggacctatctgaactacctgggcccccctttcaacgagccagacttcaaccctccccgcctgggggcagagactctgcccagggccactgttgacttggaggtgtggcgaagcctcaatgacaaactgcggctgacccagaactacgaggcctacagccaccttctgtgttacttgcgtggcctcaaccgtcaggctgccactgctgagctgcgccgcagcctggcccacttctgcaccagcctccagggcctgctgggcagcattgcgggcgtcatggcagctctgggctacccactgccccagccgctgcctgggactgaacccacttggactcctggccctgcccacagtgacttcctccagaagatggacgacttctggctgctgaaggagctgcagacctggctgtggcgctcggccaaggacttcaaccggctcaagaagaagatgcagcctccagcagctgcagtcaccctgcacctgggggctcatggcttctgacttctgaccttctcctcttcgctcccccttcaaaccctgctcccactttgtgagagccagccctgtatgccaacacctgttgagccaggagacagaagctgtgagcctctggccctttcctggaccggctgggcgtgtgatgcgatcagccctgtctcctccccacctcccaaaggtctaccgagctggggaggaggtacagtaggccctgtcctgtcctgtttctacaggaagtcatgctcgagggagtgtgaagtggttcaggttggtgcagaggcgctcatggcctcctgcttcttgcctaccacttggccagtgcccacccagcccctcaggtggcacatctggagggcaggggttgaggggccaccaccacacatgcctttctggggtgaagccctttggctgccccactctccttggatgggtgttgctcccttatccccaaatcactctatacatccaattcaggaaacaaacatggtggcaattctacacaaaaagagatgagattaacagtgcagggttggggtctgcattggaggtgccctataaaccagaagagaaaatactgaaagcacaggggcagggacagaccagaccagacccaggagtctccaaagcacagagtggcaaacaaaacccgagctgagcatcaggaccttgcctcgaattgtcttccagtattacggtgcctcttctctgccccctttcccagggtatctgtgggttgccaggctggggagggcaaccatagccacaccacaggatttcctgaaagtttacaatgcagtagcattttggggtgtagggtggcagctccccaaggccctgccccccagccccacccactcatgactctaagtgtgttgtattaatatttatttatttggagatgttatttattagatgatatttattgcagaatttctattcttgtattaacaaataaaatgcttgccccagaaaaaaaaaaaaaaaaaaaa

SEQ ID NO: 2765 - protein, 225 aa, Homo sapiens
MDLRAGDSWGMLACLCTVLWHLPAVPALNRTGDPGPGPSIQKTYDLTRYLEHQLRSLAGTYLNYLGPPFNEPDFNPPRLGAETLPRATVDLEVWRSLNDKLRLTQNYEAYSHLLCYLRGLNRQAATAELRRSLAHFCTSLQGLLGSIAGVMAALGYPLPQPLPGTEPTWTPGPAHSDFLQKMDDFWLLKELQTWLWRSAKDFNRLKKKMQPPAAAVTLHLGAHGF

SEQ ID NO: 2766 - DNA, 2128 bp, Homo sapiens
gggccggcaggggcggtgcgcgggaagggaccccggacccggaggtcgcggagagctgggcagtgttggccgctggcggagcgctggggcagcatgaagtgcctggtcacgggcggcaacgtgaaggtgctcggcaaggccgtccactccctgtcccgcatcggggacgagctctacctggaacccttggaggacgggctctccctccggacggtgaactcctcccgctctgcctatgcctgctttctctttgccccgctcttcttccagcaataccaggcagccacccctggtcaggacctgctgcgctgtaagatcctgatgaagtctttcctgtctgtcttccgctcactggcgatgctggagaagacggtggaaaaatgctgcatctccctgaatggccggagcagccgcctggtggtccagctgcattgcaagttcggggtgcggaagactcacaacctgtccttccaggactgtgagtccctgcaggccgtcttcgacccagcctcgtgcccccacatgctccgcgccccagcacgggttctgggggaggctgttctgcccttctctcctgcactggctgaagtgacgctgggcattggccgtggccgcagggtcatcctgcgcagctaccacgaggaggaggcagacagcactgccaaagccatggtgactgagatgtgccttggagaggaggatttccagcagctgcaggcccaggaaggggtggccatcactttctgcctcaaggaattccgggggctcctgagctttgcagagtcagcaaacttgaatcttagcattcattttgatgctccaggcaggcccgccatcttcaccatcaaggactctttgctggacggccactttgtcttggccacactctcagacaccgactcgcactcccaggacctgggctccccagagcgtcaccagccagtgcctcagctccaggctcacagcacaccccacccggacgactttgccaatgacgacattgactcttacatgatcgccatggaaaccactataggcaatgagggctcgcgggtgctgccctccatttccctttcacctggcccccagccccccaagagccccggtccccactccgaggaggaagatgaggctgagcccagtacagtgcctgggactcccccacccaagaagttccgctcactgttcttcggctccatcctggcccctgtacgctccccccagggccccagccctgtgctggcggaagacagtgagggtgaaggctgaaccaagaacctgaagcctgtacccagaggccttggactagacgaagccccagccagtggcagaactgggtctctcagccctggggatcagaaaggtgggcttgctggagctgagctgtttcactgcctctcgcaggccccagctggctgtcactgtaaagctgtcccacagcggtcgggcctgggccgttatctccccacaacccccagccaatcaggactttccagacttggccctgaactactgacgttcctacctcttatttctcattgagcctcaggctatactccagctggccaaggctggaaacctgtctccctcaggctcaccttcctaaggaaaatgtcatagtaggtgctgctggcccctggtgatccagcttctctgccaatcatgacctgttccttcctgaagtcctgggcatgcatctgggacccccgtggagctgacaagttttccttgctttcctgatactctttggcgctgacttggaattctaagagccttggacccgagtgtgtggctagggttgccctggctggggcccggtgccgagactcccaagcggctctgtgcagaagagctgccaggcagtgtcttagatgtgagacggaggccatggcgagaatccagctttgacctttattcaagagaccagatgggttgccccaggatccggctgccagccctgaggccaagcacggctggagacccacgacctggcctgccgttgccctgagctgcagcctcggccccaggatcctgctcacagtcaccgcaggtgcaggcaggaagcagccctgggggactggacgctgctattgattcattaaaaaaagaaaagaaaaatacaaaaaaa

SEQ ID NO: 2767 - protein, 391 aa, Homo sapiens
MKCLVTGGNVKVLGKAVHSLSRIGDELYLEPLEDGLSLRTVNSSRSAYACFLFAPLFFQQYQAATPGQDLLRCKILMKSFLSVFRSLAMLEKTVEKCCISLNGRSSRLVVQLHCKFGVRKTHNLSFQDCESLQAVFDPASCPHMLRAPARVLGEAVLPFSPALAEVTLGIGRGRRVILRSYHEEEADSTAKAMVTEMCLGEEDFQQLQAQEGVAITFCLKEFRGLLSFAESANLNLSIHFDAPGRPAIFTIKDSLLDGHFVLATLSDTDSHSQDLGSPERHQPVPQLQAHSTPHPDDFANDDIDSYMIAMETTIGNEGSRVLPSISLSPGPQPPKSPGPHSEEEDEAEPSTVPGTPPPKKFRSLFFGSILAPVRSPQGPSPVLAEDSEGEG

SEQ ID NO: 2768 - DNA, 1521 bp, Homo sapiens
gcggggccgcgggccgggggcggactggggcgggcggaaggagagccaggccggaaggaggctgccggagggcgggaggcaggagcgggccaggagctgctgggctggagcggcggcgccgccatgtccgacagcgagaagctcaacctggactcgatcatcgggcgcctgctggaagggtccagggtcctgacaccccattgcgccccagtgcagggctcgcggcctggcaagaatgtacagctgacagagaacgagatccgcggtctgtgcctgaaatcccgggagatttttctgagccagcccattcttctggagctggaggcacccctcaagatctgcggtgacatacacggccagtactacgaccttctgcgactatttgagtatggcggtttccctcccgagagcaactacctctttctgggggactatgtggacaggggcaagcagtccttggagaccatctgcctgctgctggcctataagatcaagtaccccgagaacttcttcctgctccgtgggaaccacgagtgtgccagcatcaaccgcatctatggtttctacgatgagtgcaagagacgctacaacatcaaactgtggaaaaccttcactgactgcttcaactgcctgcccatcgcggccatagtggacgaaaagatcttctgctgccacggaggcctgtccccggacctgcagtctatggagcagattcggcggatcatgcggcccacagatgtgcctgaccagggcctgctgtgtgacctgctgtggtctgaccctgacaaggacgtgcagggctggggcgagaacgaccgtggcgtctcttttacctttggagccgaggtggtggccaagttcctccacaagcacgacttggacctcatctgccgagcacaccaggtggtagaagacggctacgagttctttgccaagcggcagctggtgacacttttctcagctcccaactactgtggcgagtttgacaatgctggcgccatgatgagtgtggacgagaccctcatgtgctctttccagatcctcaagcccgccgacaagaacaaggggaagtacgggcagttcagtggcctgaaccctggaggccgacccatcaccccaccccgcaattccgccaaagccaagaaatagcccccgcacaccaccctgtgccccagatgatggattgattgtacagaaatcatgctgccatgctgggggggggtcaccccgacccctcaggcccacctgtcacggggaacatggagccttggtgtatttttcttttctttttttaatgaatcaatagcagcgtccagtcccccagggctgcttcctgcctgcacctgcggtgactgtgagcaggatcctggggccgaggctgcagctcagggcaacggcaggccaggtcgtgggtctccagccgtgcttggcctcagggctggcagccggatcctggggcaacccatctggtctcttgaataaaggtcaaagctggattctcgcaaaaaaaaaaaaaaaaaa

SEQ ID NO: 2769 - protein, 341 aa, Homo sapiens
MSDSEKLNLDSIIGRLLEGSRVLTPHCAPVQGSRPGKNVQLTENEIRGLCLKSREIFLSQPILLELEAPLKICGDIHGQYYDLLRLFEYGGFPPESNYLFLGDYVDRGKQSLETICLLLAYKIKYPENFFLLRGNHECASINRIYGFYDECKRRYNIKLWKTFTDCFNCLPIAAIVDEKIFCCHGGLSPDLQSMEQIRRIMRPTDVPDQGLLCDLLWSDPDKDVQGWGENDRGVSFTFGAEVVAKFLHKHDLDLICRAHQVVEDGYEFFAKRQLVTLFSAPNYCGEFDNAGAMMSVDETLMCSFQILKPADKNKGKYGQFSGLNPGGRPITPPRNSAKAKK

SEQ ID NO: 2770 - DNA, 1488 bp, Homo sapiens
gcggggccgcgggccgggggcggactggggcgggcggaaggagagccaggccggaaggaggctgccggagggcgggaggcaggagcgggccaggagctgctgggctggagcggcggcgccgccatgtccgacagcgagaagctcaacctggactcgatcatcgggcgcctgctggaagtgcagggctcgcggcctggcaagaatgtacagctgacagagaacgagatccgcggtctgtgcctgaaatcccgggagatttttctgagccagcccattcttctggagctggaggcacccctcaagatctgcggtgacatacacggccagtactacgaccttctgcgactatttgagtatggcggtttccctcccgagagcaactacctctttctgggggactatgtggacaggggcaagcagtccttggagaccatctgcctgctgctggcctataagatcaagtaccccgagaacttcttcctgctccgtgggaaccacgagtgtgccagcatcaaccgcatctatggtttctacgatgagtgcaagagacgctacaacatcaaactgtggaaaaccttcactgactgcttcaactgcctgcccatcgcggccatagtggacgaaaagatcttctgctgccacggaggcctgtccccggacctgcagtctatggagcagattcggcggatcatgcggcccacagatgtgcctgaccagggcctgctgtgtgacctgctgtggtctgaccctgacaaggacgtgcagggctggggcgagaacgaccgtggcgtctcttttacctttggagccgaggtggtggccaagttcctccacaagcacgacttggacctcatctgccgagcacaccaggtggtagaagacggctacgagttctttgccaagcggcagctggtgacacttttctcagctcccaactactgtggcgagtttgacaatgctggcgccatgatgagtgtggacgagaccctcatgtgctctttccagatcctcaagcccgccgacaagaacaaggggaagtacgggcagttcagtggcctgaaccctggaggccgacccatcaccccaccccgcaattccgccaaagccaagaaatagcccccgcacaccaccctgtgccccagatgatggattgattgtacagaaatcatgctgccatgctgggggggggtcaccccgacccctcaggcccacctgtcacggggaacatggagccttggtgtatttttcttttctttttttaatgaatcaatagcagcgtccagtcccccagggctgcttcctgcctgcacctgcggtgactgtgagcaggatcctggggccgaggctgcagctcagggcaacggcaggccaggtcgtgggtctccagccgtgcttggcctcagggctggcagccggatcctggggcaacccatctggtctcttgaataaaggtcaaagctggattctcgcaaaaaaaaaaaaaaaaaa

SEQ ID NO: 2771 - protein, 330 aa, Homo sapiens
MSDSEKLNLDSIIGRLLEVQGSRPGKNVQLTENEIRGLCLKSREIFLSQPILLELEAPLKICGDIHGQYYDLLRLFEYGGFPPESNYLFLGDYVDRGKQSLETICLLLAYKIKYPENFFLLRGNHECASINRIYGFYDECKRRYNIKLWKTFTDCFNCLPIAAIVDEKIFCCHGGLSPDLQSMEQIRRIMRPTDVPDQGLLCDLLWSDPDKDVQGWGENDRGVSFTFGAEVVAKFLHKHDLDLICRAHQVVEDGYEFFAKRQLVTLFSAPNYCGEFDNAGAMMSVDETLMCSFQILKPADKNKGKYGQFSGLNPGGRPITPPRNSAKAKK

SEQ ID NO: 2772 - DNA, 1356 bp, Homo sapiens
gcggggccgcgggccgggggcggactggggcgggcggaaggagagccaggccggaaggaggctgccggagggcgggaggcaggagcgggccaggagctgctgggctggagcggcggcgccgccatgtccgacagcgagaagctcaacctggactcgatcatcgggcgcctgctggaaggtgacatacacggccagtactacgaccttctgcgactatttgagtatggcggtttccctcccgagagcaactacctctttctgggggactatgtggacaggggcaagcagtccttggagaccatctgcctgctgctggcctataagatcaagtaccccgagaacttcttcctgctccgtgggaaccacgagtgtgccagcatcaaccgcatctatggtttctacgatgagtgcaagagacgctacaacatcaaactgtggaaaaccttcactgactgcttcaactgcctgcccatcgcggccatagtggacgaaaagatcttctgctgccacggaggcctgtccccggacctgcagtctatggagcagattcggcggatcatgcggcccacagatgtgcctgaccagggcctgctgtgtgacctgctgtggtctgaccctgacaaggacgtgcagggctggggcgagaacgaccgtggcgtctcttttacctttggagccgaggtggtggccaagttcctccacaagcacgacttggacctcatctgccgagcacaccaggtggtagaagacggctacgagttctttgccaagcggcagctggtgacacttttctcagctcccaactactgtggcgagtttgacaatgctggcgccatgatgagtgtggacgagaccctcatgtgctctttccagatcctcaagcccgccgacaagaacaaggggaagtacgggcagttcagtggcctgaaccctggaggccgacccatcaccccaccccgcaattccgccaaagccaagaaatagcccccgcacaccaccctgtgccccagatgatggattgattgtacagaaatcatgctgccatgctgggggggggtcaccccgacccctcaggcccacctgtcacggggaacatggagccttggtgtatttttcttttctttttttaatgaatcaatagcagcgtccagtcccccagggctgcttcctgcctgcacctgcggtgactgtgagcaggatcctggggccgaggctgcagctcagggcaacggcaggccaggtcgtgggtctccagccgtgcttggcctcagggctggcagccggatcctggggcaacccatctggtctcttgaataaaggtcaaagctggattctcgcaaaaaaaaaaaaaaaaaa

SEQ ID NO: 2773 - protein, 286 aa, Homo sapiens
MSDSEKLNLDSIIGRLLEGDIHGQYYDLLRLFEYGGFPPESNYLFLGDYVDRGKQSLETICLLLAYKIKYPENFFLLRGNHECASINRIYGFYDECKRRYNIKLWKTFTDCFNCLPIAAIVDEKIFCCHGGLSPDLQSMEQIRRIMRPTDVPDQGLLCDLLWSDPDKDVQGWGENDRGVSFTFGAEVVAKFLHKHDLDLICRAHQVVEDGYEFFAKRQLVTLFSAPNYCGEFDNAGAMMSVDETLMCSFQILKPADKNKGKYGQFSGLNPGGRPITPPRNSAKAKK

SEQ ID NO: 2774 - DNA, 1766 bp, Homo sapiens
gtgaggtgctgcgggaggccccgggcaccatggcccaggccctgggggaggacctggtgcagcctcccgagctgcaggatgactccagctccttggggtccgactcagagctcagcgggcctggcccatatcgccaggccgaccgctatggattcattgggggcagctcagcagagccagggccgggccacccacctgcagacctcatccgccaacgggagatgaagtgggtggagatgacctcgcactgggagaaaaccatgtcccggcggtacaagaaggtaaagatgcagtgccggaaaggcatcccgtctgccctgcgcgcccgatgctggcccctgttgtgtggggcccatgtgtgccagaagaacagccctggcacctatcaggagctggcagaggcccctggagacccacagtggatggagaccattggcagggacctgcaccgtcaattccctctgcacgagatgtttgtgtcgcctcagggccacgggcagcaggggctcctgcaggtgctcaaggcctacaccctgtatcgaccggagcagggctactgccaggcccaggggcccgtggctgctgtgctgctcatgcacctgcccccagaggaggccttctggtgcctggtgcagatctgtgaggtctacctccctgggtactacgggccccacatggaggctgtgcggctggacgccgaggtgttcatggccctgctgcggcggctgcttccgcacgtgcacaagcacctgcagcaggtgggcgtcggacccctgctgtacctgcccgagtggttcctgtgcctcttcgcccgctccctgcccttccccacagtgctgcgtgtctgggatgccttcctcagtgagggtgccagagtactgttccgtgtggggctgacactggtgcgcctggcgctgggcactgcagagcagcgaggggcctgccctggcctcctggagacactgggagcccttcgagccatcccccccgcgcagctgcaggaggaggccttcatgtcacaggtgcacagcgtggtgctgtcagagcgggacctgcagcgggagatcaaggcccagctggcccagctgcccgattccgcgccgggacccccgccccggccacaggtccgcctcgccggggcccaagccatctttgaggcccagcagctggcaggagtgcgacgaggcgccaagcctgaggtgcctcggattgtggtgcagcccccggaggagcccagaccaccgcggcggaaaccccagacccgcggcaagactttccatgggctcctgactcgggcccggggcccccccatcgaggggccccccaggccccaacgaggctccacctccttcctggacacccgcttctgagaggaccatggacttagtgtcccccagtctcaattgcctgatggctgatgccagcccggcaaataggcaccgcactttactcttgggactcggggacttggcttccttcctggcaaggaccaggcagtggggaaggaggaggtcctccgtggtacatactgggtcaggcactagcatggaggagggtcacagagtggggcacgtgaggacccatggaaccgtcctggtgcccaggccctcacaagtaccaaagccagcaccaaaggagtcagggaaggggttggctgagtcaagggaccccagagggcaccaggaataaaatcttcttgaacagaaaaaaaaaaaaaaaaaaaaaaaaaaaaaaaaaaaaaaaaaaaaaaaaaaaaaaaaaaaaaa

SEQ ID NO: 2775 - protein, 446 aa, Homo sapiens
MAQALGEDLVQPPELQDDSSSLGSDSELSGPGPYRQADRYGFIGGSSAEPGPGHPPADLIRQREMKWVEMTSHWEKTMSRRYKKVKMQCRKGIPSALRARCWPLLCGAHVCQKNSPGTYQELAEAPGDPQWMETIGRDLHRQFPLHEMFVSPQGHGQQGLLQVLKAYTLYRPEQGYCQAQGPVAAVLLMHLPPEEAFWCLVQICEVYLPGYYGPHMEAVRLDAEVFMALLRRLLPHVHKHLQQVGVGPLLYLPEWFLCLFARSLPFPTVLRVWDAFLSEGARVLFRVGLTLVRLALGTAEQRGACPGLLETLGALRAIPPAQLQEEAFMSQVHSVVLSERDLQREIKAQLAQLPDSAPGPPPRPQVRLAGAQAIFEAQQLAGVRRGAKPEVPRIVVQPPEEPRPPRRKPQTRGKTFHGLLTRARGPPIEGPPRPQRGSTSFLDTRF

SEQ ID NO: 2776 - DNA, 5055 bp, Homo sapiens
ggtgagtcttctgtggtccctcccccacaaggcccaagtccctgggcagagagtgggcccagaggacagcaggcagcacctaggacctaagcctgggagttgccccctgcagacagcttagacccacgaccagctcccccacccccaccctgcggctgcatcctgggaggtgggcactcttagtgccctgtgacattcattcattccatggcccctcagggagctcaccttctaggagacggcacagaggctctggccctggcaaactgggattcgagcccaggcatgaggcccagtcctctgccgtctgggccacagcacaccatctcccaacaaccaagagattctcttcgtcccagcctcatcagcccccaggggatgggagagggcaggcaccaggcaacaaggtccaaagagacctcacgacttgctcaaggtggccgagcctgtcccctggaggacagactcagctgccaggcctgtccaggcctggggactgcaaagaacaagaattccattcacacgaagcctcccagcagccccatattgggggggcgccagcctcagagaggggagggacgttaggtttcatccaaagaaagcatttccgtgactcaaaatatctgcaggggggatactgtctagcctcctaatgtttagcccagggctgggcacacagtagggcttcaagacctacgtggggatgacagtggaatcacatttaggtgtcagcacactccatgccgggtcatgagacagaaataagccacctcagagtgatggctgggttcgttcattcatctactcttcagtcaacaaacacttactgagaagtggctgtgtgccaggcacgctttaggtgctggggttgcctccatgaacaaaacaagcagaaaactctgctgctgtgaagcaagctaaggcggagcccagcatggcaggggcgggaggggctggctggcaagacattgcttcctgccctccccccaggggcaccacacagaacagtttacaaagcactcccacggttgcgttcccattaacaagccttcgcccccaacacaagcctttcctctcctagtccccgggacggtgtcagccctgaacatagcccaggctgggagagtggggggcttacacccttgggtgacttaatgtgcccactggcccaccctgcccaagacctaccacttctgccctctcagctctccctggatccatcgggtcccgagtgggattgcccactgggctccaaggacctggaggaagagggcccctggggagggggctctggcctgccgcccacaggctgcttccctggctcctggcgccaggacgtgggcctggactgcaagggatcccccgagggggccgaggcccgggcttggactgtctactactacagcctcctgcagagctgtctgcagcaagctggccttccggagactcaggaccgcggccaggtgccccgcacaggctgtcctggggcggaggtgaccttgtgcgttctgggctcccccagcacctttctgcctgtgctgctggagggtggggtccagagcccgggaaacatgctcctttgcctgtcccctgcttggctgatgaaggtgccagcacccgggcagccgggtgaggcagccctgctagtctccaaggctgtgagcttccaccctgggggcctgacattcctggatgactttgtccccccgcgccgtgccacctactttttggcaggcctgggcctggggcctggccggggccgagaggcagcagaactcgcccgtgacctgacctgccccacaggagcttcggctgagctggcccggctgctggaggaccggctgctgacaaggcagttgctggcccagcagggtggtgtggctgtgccagcaaccctggctttcacctacaagccgccggggctgctgcggggaggggatgccagcctagggctacggctggtggagctgagtggcaaagagggccaggagacgctggtgaaagaggaagtggaggcttttctgcgctccgaggccctgggtgatatcctgcaggtagctgtgaagctcagtggctggcgctggcgggggcggcaggcatggcgtctgcacccgcgggcagagctgggtgcagtggtggacacagtgctggcgctgctggagaagctggaggaggaggagagtgtcctggtggaggctgtgtacccacctgcccagctgccctgctcagatggtccttcacccggccccggcctggccgtgcgaatctgtgctgtggtgtgtcggacacagggtgataggccactgctgagcaaggtggtgtgcggcgtgggccgcggggaccgccctctacggcaccacaactccctgccgaggacgctggaggtggcgctggcccagtgcggcctgggcgaggaggcgcaggtggcggctgtgcggcagcgcgtcaaggcggcggccgaggccgcgctggccgccgtgctggctctggaggccggcctgagtgccgagcagcgcggcgggcgccgggcgcacacggacttcctgggcgtggatttcgcgctgacagcggccggcggcgtgctgaccccagtggccctggagctgaacggcggcctgtgtctggaggcgtgcggcgcgctggaggggctgtgggccgcgccgcggctggggccggcggccgacgaggcggtggcggcgccgctggtggagaccatgcttcggcggtcggcgcgctgcctcatggagggaaaacagctgctggtggtcggcgctggcggcgtcagcaagaagttcgtgtgggaggcggcgcgcgactacgggctccagctgcacctcgtggagtcagaccccaaccactttgcatcccagttggtacagaccttcatccactttgacatgacagagcaccggagggatgaggagaacgcacggctgctggcagagttggtgcgggctcgcggcctcaagctagatggctgcttctcctactgggatgactgcctggtgctcacagccctgctctgccaggagctaggtctgccctgcagctccccagctgccatgcgcctggctaagcagaagagcctcacccagctgcacctgttgcaccaccatggcccaccctggcctgcgccctccctccatgctgtgccctgctgcccactggagagtgaggctgatgtggagagggccgtgcaccaggtacccctgccaggtgtcatgaagctggagttcggggcaggtgcagtgggtgtccggctggtagaggatgcgccacagtgccatgagcacttttcccggattacccgagacttgcagggcgaggccgaccacccaggcattgggctgggctggggcaatgccatgctgctgatggagtttgtggagggcaccgagcacgacgtggacctggtgttgtttggtgggcggttgctggctgcctttgtctccgacaatggccctacgaggctgcctggcttcactgagacggcggcctgcatgcccaccgggctggcaccagagcaggaggcacagatggttcaggcagccttccgctgttgcctgggctgcgggttgctcgatggagtcttcaacgtggagctcaagctgaccggggctgggcctcggcttatcgagatcaacccccgcatgggtggcttctacctgcgtgattggatcctggagctctatggtgttgacctgctgctggctgctgttatggtggcctgtggcttgcgtcctgccctgcccacccgcccacgtgctcgtggccatctggtgggcgtcatgtgccttgtgtcccagcacctgcaggccctgagttccaccgccagccgtgagaccctgcaggccctgcacgaccgtggactgctacgcctcaatctgctggaggaggccctggtgcctggcgagtatgaggagccctactgcagtgtggcctgtgccggacccagccccaccgaggcccgtctccgcctgctgggcctctgccagggcctgggcatcgatgggcccagctaccctgttgcccacttcctgtctcacttcaaatagcactggggtcagggggcagggaagcagtgctgggtggaggcactgtggtgccctctgctccctggagctcttcctgcttctctccccatcaccatgccccagccccagcctggcccgctgcaatgcctaggtctgttccagagcagcagggcaatttagacaccaaggcatcctggactcaagggcctcttgccctcccgaaggccccagtccagcctacagcttccccagcattctagccttggagaaatgacaatggccacacacacacacacacacacacacacacacctctgacgccagctccccaggtgggagtgggcccaaacccagcccctcctgtccacctctccaggtctcactctcttcctgccatctacaagaggagaggacctggctgggccccaagccttggacaaatcctgggaaaacctgagactagaacccttgtcttcctcttacccaaattctaggatagctctgaagcctgctggaaacttggtggcatccaacctgcctcattcggcctgaccggtagaggcaggtggcctgtggacagaagtaatcctctttctgctcaccccaggcagacacaactgcctatgttcccccgatgagaggaaacaggctgagagaagaaaaatgactgctccaggattataccacagtggagagcgggtcacaggacatgatgcagggtccaggtttctgttttgatcaagtcttacatgcccattcagcttctaggcccccctcacctccctgccctcattcacaagtggccctgagacacgtgaacacctccctcctatgcatcacaaaccttctccaccgagctttggtgctttggcctctggcacacctaactagcattggcagaggagagtctacactctcttcctcattcagggaagatgctttaagaaatcctgcctctgtgcagcagaggagctggaggcagctccccaggcatccctccccaaataaaggcttatgtact

SEQ ID NO: 2777 - protein, 966 aa, Homo sapiens
MCPLAHPAQDLPLLPSQLSLDPSGPEWDCPLGSKDLEEEGPWGGGSGLPPTGCFPGSWRQDVGLDCKGSPEGAEARAWTVYYYSLLQSCLQQAGLPETQDRGQVPRTGCPGAEVTLCVLGSPSTFLPVLLEGGVQSPGNMLLCLSPAWLMKVPAPGQPGEAALLVSKAVSFHPGGLTFLDDFVPPRRATYFLAGLGLGPGRGREAAELARDLTCPTGASAELARLLEDRLLTRQLLAQQGGVAVPATLAFTYKPPGLLRGGDASLGLRLVELSGKEGQETLVKEEVEAFLRSEALGDILQVAVKLSGWRWRGRQAWRLHPRAELGAVVDTVLALLEKLEEEESVLVEAVYPPAQLPCSDGPSPGPGLAVRICAVVCRTQGDRPLLSKVVCGVGRGDRPLRHHNSLPRTLEVALAQCGLGEEAQVAAVRQRVKAAAEAALAAVLALEAGLSAEQRGGRRAHTDFLGVDFALTAAGGVLTPVALELNGGLCLEACGALEGLWAAPRLGPAADEAVAAPLVETMLRRSARCLMEGKQLLVVGAGGVSKKFVWEAARDYGLQLHLVESDPNHFASQLVQTFIHFDMTEHRRDEENARLLAELVRARGLKLDGCFSYWDDCLVLTALLCQELGLPCSSPAAMRLAKQKSLTQLHLLHHHGPPWPAPSLHAVPCCPLESEADVERAVHQVPLPGVMKLEFGAGAVGVRLVEDAPQCHEHFSRITRDLQGEADHPGIGLGWGNAMLLMEFVEGTEHDVDLVLFGGRLLAAFVSDNGPTRLPGFTETAACMPTGLAPEQEAQMVQAAFRCCLGCGLLDGVFNVELKLTGAGPRLIEINPRMGGFYLRDWILELYGVDLLLAAVMVACGLRPALPTRPRARGHLVGVMCLVSQHLQALSSTASRETLQALHDRGLLRLNLLEEALVPGEYEEPYCSVACAGPSPTEARLRLLGLCQGLGIDGPSYPVAHFLSHFK

SEQ ID NO: 2778 - DNA, 2328 bp, Homo sapiens
tgtactcgtatcccctgaaggggccatcctaggccccatcctatccccctagcacccagtactagctgacctggatatgccccaccctgtggcttctgcagctgcacctcgtggagtcagaccccaaccactttgcatcccagttggtacagaccttcatccactttgacatgacagagcaccggagggatgaggagaacgcacggctgctggcagagttggtgcgggctcgcggcctcaagctagatggctgcttctcctactgggatgactgcctggtgctcacagccctgctctgccaggagctaggtctgccctgcagctccccagctgccatgcgcctggctaagcagaagagcctcacccagctgcacctgttgcaccaccatggcccaccctggcctgcgccctccctccatgctgtgccctgctgcccactggagagtgaggctgatgtggagagggccgtgcaccaggtacccctgccaggtgtcatgaagctggagttcggggcaggtgcagtgggtgtccggctggtagaggatgcgccacagtgccatgagcacttttcccggattacccgagacttgcagggcgaggccgaccacccaggcattgggctgggctggggcaatgccatgctgctgatggagtttgtggagggcaccgagcacgacgtggacctggtgttgtttggtgggcggttgctggctgcctttgtctccgacaatggccctacgaggctgcctggcttcactgagacggcggcctgcatgcccaccgggctggcaccagagcaggaggcacagatggttcaggcagccttccgctgttgcctgggctgcgggttgctcgatggagtcttcaacgtggagctcaagctgaccggggctgggcctcggcttatcgagatcaacccccgcatgggtggcttctacctgcgtgattggatcctggagctctatggtgttgacctgctgctggctgctgttatggtggcctgtggcttgcgtcctgccctgcccacccgcccacgtgctcgtggccatctggtgggcgtcatgtgccttgtgtcccagcacctgcaggccctgagttccaccgccagccgtgagaccctgcaggccctgcacgaccgtggactgctacgcctcaatctgctggaggaggccctggtgcctggcgagtatgaggagccctactgcagtgtggcctgtgccggacccagccccaccgaggcccgtctccgcctgctgggcctctgccagggcctgggcatcgatgggcccagctaccctgttgcccacttcctgtctcacttcaaatagcactggggtcagggggcagggaagcagtgctgggtggaggcactgtggtgccctctgctccctggagctcttcctgcttctctccccatcaccatgccccagccccagcctggcccgctgcaatgcctaggtctgttccagagcagcagggcaatttagacaccaaggcatcctggactcaagggcctcttgccctcccgaaggccccagtccagcctacagcttccccagcattctagccttggagaaatgacaatggccacacacacacacacacacacacacacacacctctgacgccagctccccaggtgggagtgggcccaaacccagcccctcctgtccacctctccaggtctcactctcttcctgccatctacaagaggagaggacctggctgggccccaagccttggacaaatcctgggaaaacctgagactagaacccttgtcttcctcttacccaaattctaggatagctctgaagcctgctggaaacttggtggcatccaacctgcctcattcggcctgaccggtagaggcaggtggcctgtggacagaagtaatcctctttctgctcaccccaggcagacacaactgcctatgttcccccgatgagaggaaacaggctgagagaagaaaaatgactgctccaggattataccacagtggagagcgggtcacaggacatgatgcagggtccaggtttctgttttgatcaagtcttacatgcccattcagcttctaggcccccctcacctccctgccctcattcacaagtggccctgagacacgtgaacacctccctcctatgcatcacaaaccttctccaccgagctttggtgctttggcctctggcacacctaactagcattggcagaggagagtctacactctcttcctcattcagggaagatgctttaagaaatcctgcctctgtgcagcagaggagctggaggcagctccccaggcatccctccccaaataaaggcttatgtact

SEQ ID NO: 2779 - protein, 385 aa, Homo sapiens
MTEHRRDEENARLLAELVRARGLKLDGCFSYWDDCLVLTALLCQELGLPCSSPAAMRLAKQKSLTQLHLLHHHGPPWPAPSLHAVPCCPLESEADVERAVHQVPLPGVMKLEFGAGAVGVRLVEDAPQCHEHFSRITRDLQGEADHPGIGLGWGNAMLLMEFVEGTEHDVDLVLFGGRLLAAFVSDNGPTRLPGFTETAACMPTGLAPEQEAQMVQAAFRCCLGCGLLDGVFNVELKLTGAGPRLIEINPRMGGFYLRDWILELYGVDLLLAAVMVACGLRPALPTRPRARGHLVGVMCLVSQHLQALSSTASRETLQALHDRGLLRLNLLEEALVPGEYEEPYCSVACAGPSPTEARLRLLGLCQGLGIDGPSYPVAHFLSHFK

SEQ ID NO: 2780 - DNA, 1760 bp, Homo sapiens
ggagagatgatgtttaggtccgggactgtcagtcagtgcgcggccaggtacgggccgacgggcccgcggggccggcgccgccatggcggccgtgtttgatttggatttggagacggaggaaggcagcgagggcgagggcgagccagagctcagccccgcggacgcatgtccccttgccgagttgagggcagctggcctagagcctgtgggacactatgaagaggtggagctgactgagaccagcgtgaacgttggcccagagcgcatcgggccccactgctttgagctgctgcgtgtgctgggcaaggggggctatggcaaggtgttccaggtgcgaaaggtgcaaggcaccaacttgggcaaaatatatgccatgaaagtcctaaggaaggccaaaattgtgcgcaatgccaaggacacagcacacacacgggctgagcggaacattctagagtcagtgaagcacccctttattgtggaactggcctatgccttccagactggtggcaaactctacctcatccttgagtgcctcagtggtggcgagctcttcacgcatctggagcgagagggcatcttcctggaagatacggcctgcttctacctggctgagatcacgctggccctgggccatctccactcccagggcatcatctaccgggacctcaagcccgagaacatcatgctcagcagccagggccacatcaaactgaccgactttggactctgcaaggagtctatccatgagggcgccgtcactcacaccttctgcggcaccattgagtacatggcccctgagattctggtgcgcagtggccacaaccgggctgtggactggtggagcctgggggccctgatccgcccttcaccgcagagaaccggaagaaaaccatggataagatcatcaggggcaagctggcactgcccccctacctcaccccagatgcccgggaccttgtcaaaaagtttctgaaacggaatcccagccagcggattgggggtggcccaggggatgctgctgatgtgcagagacatccctttttccggcacatgaattgggacgaccttctggcctggcgtgtggacccccctttcaggccctgtctgcagtcagaggaggacgtgagccagtttgatacccgcttcacacggcagacgccggtggacagtcctgatgacacagccctcagcgagagtgccaaccaggccttcctgggcttcacatacgtggcgccgtctgtcctggacagcatcaaggagggcttctccttccagcccaagctgcgctcacccaggcgcctcaacagtagcccccgggcccccgtcagccccctcaagttctccccttttgaggggtttcggcccagccccagcctgccggagcccacggagctacctctacctccactcctgccaccgccgccgccctcgaccaccgcccctctccccatccgtcccccctcagggaccaagaagtccaagaggggccgtgggcgtccagggcgctaggaagccgggtgggggtgagggtagcccttgagccctgtccctgcggctgtgagagcagcaggaccctgggccagttccagagacctgggggtgtgtctgggggtggggtgtgagtgcgtatgaaagtgtgtgtctgctggggcagctgtgcccctgaatcatgggcacggagggccgcccgccacgccccgcgctcaactgctcccgtggaagattaaagggctgaatcatggtgctgaaaaaaaaaaaaa

SEQ ID NO: 2781 - protein, 296 aa, Homo sapiens
MAAVFDLDLETEEGSEGEGEPELSPADACPLAELRAAGLEPVGHYEEVELTETSVNVGPERIGPHCFELLRVLGKGGYGKVFQVRKVQGTNLGKIYAMKVLRKAKIVRNAKDTAHTRAERNILESVKHPFIVELAYAFQTGGKLYLILECLSGGELFTHLEREGIFLEDTACFYLAEITLALGHLHSQGIIYRDLKPENIMLSSQGHIKLTDFGLCKESIHEGAVTHTFCGTIEYMAPEILVRSGHNRAVDWWSLGALIRPSPQRTGRKPWIRSSGASWHCPPTSPQMPGTLSKSF

SEQ ID NO: 2782 - DNA, 1782 bp, Homo sapiens
ggagagatgatgtttaggtccgggactgtcagtcagtgcgcggccaggtacgggccgacgggcccgcggggccggcgccgccatggcggccgtgtttgatttggatttggagacggaggaaggcagcgagggcgagggcgagccagagctcagccccgcggacgcatgtccccttgccgagttgagggcagctggcctagagcctgtgggacactatgaagaggtggagctgactgagaccagcgtgaacgttggcccagagcgcatcgggccccactgctttgagctgctgcgtgtgctgggcaaggggggctatggcaaggtgttccaggtgcgaaaggtgcaaggcaccaacttgggcaaaatatatgccatgaaagtcctaaggaaggccaaaattgtgcgcaatgccaaggacacagcacacacacgggctgagcggaacattctagagtcagtgaagcacccctttattgtggaactggcctatgccttccagactggtggcaaactctacctcatccttgagtgcctcagtggtggcgagctcttcacgcatctggagcgagagggcatcttcctggaagatacggcctgcttctacctggctgagatcacgctggccctgggccatctccactcccagggcatcatctaccgggacctcaagcccgagaacatcatgctcagcagccagggccacatcaaactgaccgactttggactctgcaaggagtctatccatgagggcgccgtcactcacaccttctgcggcaccattgagtacatggcccctgagattctggtgcgcagtggccacaaccgggctgtggactggtggagcctgggggccctgatgtacgacatgctcactggatcgccgcccttcaccgcagagaaccggaagaaaaccatggataagatcatcaggggcaagctggcactgcccccctacctcaccccagatgcccgggaccttgtcaaaaagtttctgaaacggaatcccagccagcggattgggggtggcccaggggatgctgctgatgtgcagagacatccctttttccggcacatgaattgggacgaccttctggcctggcgtgtggacccccctttcaggccctgtctgcagtcagaggaggacgtgagccagtttgatacccgcttcacacggcagacgccggtggacagtcctgatgacacagccctcagcgagagtgccaaccaggccttcctgggcttcacatacgtggcgccgtctgtcctggacagcatcaaggagggcttctccttccagcccaagctgcgctcacccaggcgcctcaacagtagcccccgggcccccgtcagccccctcaagttctccccttttgaggggtttcggcccagccccagcctgccggagcccacggagctacctctacctccactcctgccaccgccgccgccctcgaccaccgcccctctccccatccgtcccccctcagggaccaagaagtccaagaggggccgtgggcgtccagggcgctaggaagccgggtgggggtgagggtagcccttgagccctgtccctgcggctgtgagagcagcaggaccctgggccagttccagagacctgggggtgtgtctgggggtggggtgtgagtgcgtatgaaagtgtgtgtctgctggggcagctgtgcccctgaatcatgggcacggagggccgcccgccacgccccgcgctcaactgctcccgtggaagattaaagggctgaatcatggtgctgaaaaaaaaaaaaa

SEQ ID NO: 2783 - protein, 482 aa, Homo sapiens
MAAVFDLDLETEEGSEGEGEPELSPADACPLAELRAAGLEPVGHYEEVELTETSVNVGPERIGPHCFELLRVLGKGGYGKVFQVRKVQGTNLGKIYAMKVLRKAKIVRNAKDTAHTRAERNILESVKHPFIVELAYAFQTGGKLYLILECLSGGELFTHLEREGIFLEDTACFYLAEITLALGHLHSQGIIYRDLKPENIMLSSQGHIKLTDFGLCKESIHEGAVTHTFCGTIEYMAPEILVRSGHNRAVDWWSLGALMYDMLTGSPPFTAENRKKTMDKIIRGKLALPPYLTPDARDLVKKFLKRNPSQRIGGGPGDAADVQRHPFFRHMNWDDLLAWRVDPPFRPCLQSEEDVSQFDTRFTRQTPVDSPDDTALSESANQAFLGFTYVAPSVLDSIKEGFSFQPKLRSPRRLNSSPRAPVSPLKFSPFEGFRPSPSLPEPTELPLPPLLPPPPPSTTAPLPIRPPSGTKKSKRGRGRPGR

SEQ ID NO: 2784 - DNA, 917 bp, Homo sapiens
acttctcgctcgacacagccagagctggaggtgggtgcccggcacggaggggcctgcggaccaatggctctgccctgcaccttagggctcgggatgctgctggccctgccaggggccttgggctcgggtggcagcgcggaggacagcgtgggctccagctctgtcaccgttgtcctgctgctgctgctgctcctactgctggccactggcctagcactggcctggcgccgcctcagccgtgactcagggggctactaccacccggcccgcctaggtgccgcgctgtggggccgcacgcggcgcctgctctgggccagccccccaggtcgctggctgcaggcccgagctgagctggggtccacagacaatgaccttgagcgacaggaggatgagcaggacacagactatgaccacgtcgcggatggtggcctgcaggctgaccctggggaaggcgagcagcaatgtggagaggcgtccagcccagagcaggtccccgtgcgggctgaggaagccagagacagtgacacggagggcgacctggtcctcggctccccaggaccagcgagcgcagggggcagtgctgaggccctgctgagtgacctgcacgcctttgctggcagcgcagcctgggatgacagcgccagggcagctgggggccagggcctccatgtcaccgcactgtagaggccggtcttggtgtcccatccctgtcacagccgctcactccccgtgcctctgcttcccaagatgccatggctggactggacccccagcccacatgaccatgcctcagactgtcaccccctaccagttcccaagtccatgtgtaccccgctcaccacgggaacggccccccccaaccacaggcatcaggcaaccatttgaaataaaactccttcagcctgtgaaaaaaaaaa

SEQ ID NO: 2785 - protein, 206 aa, Homo sapiens
MALPCTLGLGMLLALPGALGSGGSAEDSVGSSSVTVVLLLLLLLLLATGLALAWRRLSRDSGGYYHPARLGAALWGRTRRLLWASPPGRWLQARAELGSTDNDLERQEDEQDTDYDHVADGGLQADPGEGEQQCGEASSPEQVPVRAEEARDSDTEGDLVLGSPGPASAGGSAEALLSDLHAFAGSAAWDDSARAAGGQGLHVTAL

SEQ ID NO: 2786 - DNA, 1920 bp, Homo sapiens
attatgaggagcaagaacgcgaaggggcctcgggtccgctaggccgggatccggagccgcccgaagccggtgccgcagccccctgcgcccccggtgcccccgacatgtccttccgcaaagtggtccggcagagcaaattccggcatgtgttcgggcagccggtcaagaacgaccagtgctatgaggacattcgcgtgtcccgtgttacctgggacagcaccttctgcgccgtcaaccccaagttcctggcggtgattgtggaggccagtggagggggtgcctttctggtgctccccctaagcaagacgggccgcattgacaaggcctacccgacggtgtgtgggcacacgggacctgtcctggacatcgactggtgtcctcacaacgacgaagtcatagccagcggctcggaggactgcacggtcatggtgtggcagatcccagagaacgggctgacctccccgctgacagagccggtggtggtactggaggggcacaccaagcgagtgggcatcatcgcctggcaccccacggcccgaaacgtgctgctcagtgcaggctgcgacaacgtggtactcatctggaatgtgggcacagcggaggagctgtaccgcctggacagcctgcaccctgacctcatctacaatgtcagctggaaccacaatggcagcctgttttgctcagcatgcaaggacaagagcgtgcgcatcatcgacccccgtcggggcaccctggtggcagagcgggagaaggctcatgagggggcccggcccatgcgggccatcttcctggcagatggcaaggtgttcaccacaggcttcagccgaatgagcgagcggcagctggcgctctgggacccagaaaacctcgaggaacccatggccctgcaggaactggactcgagcaacggggccctgctgcccttctacgaccccgacaccagtgtggtctacgtctgcggcaagggtgactccagcatccggtactttgagatcacagaggagcctccctacatccacttcctgaacacgttcaccagcaaggagccgcagcggggtatgggcagcatgcccaagcggggcctggaggtcagcaagtgcgagatcgcccggttctacaaactgcatgagcgcaagtgtgagcccatcgtcatgactgtgccaagaaagtcggacctcttccaggatgatctgtaccccgacacagccgggcccgaggcagccctggaggctgaggagtgggtgagcgggcgggatgccgacccgatcctcatctcactgcgggaggcctacgtgcccagcaagcagcgggacctgaagatcagccggcgcaacgtgttgtctgacagccggcccgccatggccccgggctcctcccacctaggggcccccgcctccaccaccactgctgctgatgccacccccagcggcagcctggccagagccggggaggctgggaagctggaggaggtgatgcaggagctgcgggccctgagggcgctggtcaaggagcagggcgaccgcatctgccgcctggaggagcagctgggccgcatggagaacggggatgcgtagggccacagccacacgccaccttcatctcctccgccgcccccttcccactcagcttctgccagcgggtcgcaccgggctagctggctgcccagagcctctgaggcagcgcaggggtcagttcccacccccacccgtcccaggcccaggccgaagccagcgcccagctttcctcactgttcctgtggaggatgtctacgcccaggcgagctcctcgacctctgagggaccatctccccgaccactgcccagccctctgctccctccccagaggaggcgggagggtgggctctatattttcattccaaataaaattctctttctaaaagccaaaaaaaaaaaaaaaaaa

SEQ ID NO: 2787 - protein, 489 aa, Homo sapiens
MSFRKVVRQSKFRHVFGQPVKNDQCYEDIRVSRVTWDSTFCAVNPKFLAVIVEASGGGAFLVLPLSKTGRIDKAYPTVCGHTGPVLDIDWCPHNDEVIASGSEDCTVMVWQIPENGLTSPLTEPVVVLEGHTKRVGIIAWHPTARNVLLSAGCDNVVLIWNVGTAEELYRLDSLHPDLIYNVSWNHNGSLFCSACKDKSVRIIDPRRGTLVAEREKAHEGARPMRAIFLADGKVFTTGFSRMSERQLALWDPENLEEPMALQELDSSNGALLPFYDPDTSVVYVCGKGDSSIRYFEITEEPPYIHFLNTFTSKEPQRGMGSMPKRGLEVSKCEIARFYKLHERKCEPIVMTVPRKSDLFQDDLYPDTAGPEAALEAEEWVSGRDADPILISLREAYVPSKQRDLKISRRNVLSDSRPAMAPGSSHLGAPASTTTAADATPSGSLARAGEAGKLEEVMQELRALRALVKEQGDRICRLEEQLGRMENGDA

SEQ ID NO: 2788 - DNA, 1927 bp, Homo sapiens
ctccgggtccctctgtcacttcctgaatcctgcttcctgcttcccagaggccgggatccggagccgcccgaagccggtgccgcagccccctgcgcccccggtgcccccgacatgtccttccgcaaagtggtccggcagagcaaattccggcatgtgttcgggcagccggtcaagaacgaccagtgctatgaggacattcgcgtgtcccgtgttacctgggacagcaccttctgcgccgtcaaccccaagttcctggcggtgattgtggaggccagtggagggggtgcctttctggtgctccccctaagcaagacgggccgcattgacaaggcctacccgacggtgtgtgggcacacgggacctgtcctggacatcgactggtgtcctcacaacgacgaagtcatagccagcggctcggaggactgcacggtcatggtgtggcagatcccagagaacgggctgacctccccgctgacagagccggtggtggtactggaggggcacaccaagcgagtgggcatcatcgcctggcaccccacggcccgaaacgtgctgctcagtgcaggctgcgacaacgtggtactcatctggaatgtgggcacagcggaggagctgtaccgcctggacagcctgcaccctgacctcatctacaatgtcagctggaaccacaatggcagcctgttttgctcagcatgcaaggacaagagcgtgcgcatcatcgacccccgtcggggcaccctggtggcagagcgggagaaggctcatgagggggcccggcccatgcgggccatcttcctggcagatggcaaggtgttcaccacaggcttcagccgaatgagcgagcggcagctggcgctctgggacccagaaaacctcgaggaacccatggccctgcaggaactggactcgagcaacggggccctgctgcccttctacgaccccgacaccagtgtggtctacgtctgcggcaagggtgactccagcatccggtactttgagatcacagaggagcctccctacatccacttcctgaacacgttcaccagcaaggagccgcagcggggtatgggcagcatgcccaagcggggcctggaggtcagcaagtgcgagatcgcccggttctacaaactgcatgagcgcaagtgtgagcccatcgtcatgactgtgccaagaaagtcggacctcttccaggatgatctgtaccccgacacagccgggcccgaggcagccctggaggctgaggagtgggtgagcgggcgggatgccgacccgatcctcatctcactgcgggaggcctacgtgcccagcaagcagcgggacctgaagatcagccggcgcaacgtgttgtctgacagccggcccgccatggccccgggctcctcccacctaggggcccccgcctccaccaccactgctgctgatgccacccccagcggcagcctggccagagccggggaggctgggaagctggaggaggtgatgcaggagctgcgggccctgagggcgctggtcaaggagcagggcgaccgcatctgccgcctggaggagcagctgggccgcatggagaacggggatgcgtagggccacagccacacgccaccttcatctcctccgccgcccccttcccactcagcttctgccagcgggtcgcaccgggctagctggctgcccagagcctctgaggcagcgcaggggtcagttcccacccccacccgtcccaggcccaggccgaagccagcgcccagctttcctcactgttcctgtggaggatgtctacgcccaggcgagctcctcgacctctgagggaccatctccccgaccactgcccagccctctgctccctccccagaggaggcgggagggtgggctctatattttcattccaaataaaattctctttctaaaagccaaaaaaaaaaaaaaaaaa

SEQ ID NO: 2789 - protein, 489 aa, Homo sapiens; identical to SEQ ID NO: 2787

SEQ ID NO: 2790 - DNA, 1429 bp, Homo sapiens
cccaaatggacactaccatggaagctgacctgggtgccactggccacaggccccgcacagagcttgatgatgaggactcctacccccaaggtggctgggacacggtcttcctggtggccctgctgctccttgggctgccagccaatgggttgatggcgtggctggccggctcccaggcccggcatggagctggcacgcgtctggcgctgctcctgctcagcctggccctctctgacttcttgttcctggcagcagcggccttccagatcctagagatccggcatgggggacactggccgctggggacagctgcctgccgcttctactacttcctatggggcgtgtcctactcctccggcctcttcctgctggccgccctcagcctcgaccgctgcctgctggcgctgtgcccacactggtaccctgggcaccgcccagtccgcctgcccctctgggtctgcgccggtgtctgggtgctggccacactcttcagcgtgccctggctggtcttccccgaggctgccgtctggtggtacgacctggtcatctgcctggacttctgggacagcgaggagctgtcgctgaggatgctggaggtcctggggggcttcctgcctttcctcctgctgctcgtctgccacgtgctcacccaggccacagcctgtcgcacctgccaccgccaacagcagcccgcagcctgccggggcttcgcccgtgtggccaggaccattctgtcagcctatgtggtcctgaggctgccctaccagctggcccagctgctctacctggccttcctgtgggacgtctactctggctacctgctctgggaggccctggtctactccgactacctgatcctactcaacagctgcctcagccccttcctctgcctcatggccagtgccgacctccggaccctgctgcgctccgtgctctcgtccttcgcggcagctctctgcgaggagcggccgggcagcttcacgcccactgagccacagacccagctagattctgagggtccaactctgccagagccgatggcagaggcccagtcacagatggatcctgtggcccagcctcaggtgaaccccacactccagccacgatcggatcccacagctcagccacagctgaaccctacggcccagccacagtcggatcccacagcccagccacagctgaacctcatggcccagccacagtcagattctgtggcccagccacaggcagacactaacgtccagacccctgcacctgctgccagttctgtgcccagtccctgtgatgaagcttccccaaccccatcctcgcatcctaccccaggggcccttgaggacccagccacacctcctgcctctgaaggagaaagccccagcagcaccccgccagaggcggccccgggcgcaggccccacgtgagggtccaggaa

SEQ ID NO: 2791 - protein, 470 aa, Homo sapiens
MDTTMEADLGATGHRPRTELDDEDSYPQGGWDTVFLVALLLLGLPANGLMAWLAGSQARHGAGTRLALLLLSLALSDFLFLAAAAFQILEIRHGGHWPLGTAACRFYYFLWGVSYSSGLFLLAALSLDRCLLALCPHWYPGHRPVRLPLWVCAGVWVLATLFSVPWLVFPEAAVWWYDLVICLDFWDSEELSLRMLEVLGGFLPFLLLLVCHVLTQATACRTCHRQQQPAACRGFARVARTILSAYVVLRLPYQLAQLLYLAFLWDVYSGYLLWEALVYSDYLILLNSCLSPFLCLMASADLRTLLRSVLSSFAAALCEERPGSFTPTEPQTQLDSEGPTLPEPMAEAQSQMDPVAQPQVNPTLQPRSDPTAQPQLNPTAQPQSDPTAQPQLNLMAQPQSDSVAQPQADTNVQTPAPAASSVPSPCDEASPTPSSHPTPGALEDPATPPASEGESPSSTPPEAAPGAGPT

SEQ ID NO: 2792 - DNA, 1466 bp, Homo sapiens
cataagcagctttatgggtcctgaaagccaagggtgcccaggggtgtggtgtctctgagccctgttatccctcccccatgaccacagagcaggcaagggggcagcagggcccaaatctggccattggccgtcagaagccccctgcgggggttgtgactcccaagagtgatgcagaggagcccccgttgaccaggaagaggagcaagaaggagagggggctccgagggtctcgaaagcgcactggcagctctggggagcagacaggccccgaggccccggggagcagcaataaccctcccagcactggagaggggccggcgggcgcaccccctgcatcccctgggccggcctcttctcgccagtcccaccgacatcgtcctgactccctgcacgacgctgctcagaggacatacgggcccctgctcaatcgagtcttcgggaaggaccgcgaactgggccccgaggagctagacgagcttcaggccgccttcgaggagtttgacactgaccgtgacggctacatcagccaccgggagctgggtgactgcatgcggaccctgggctacatgcccaccgagatggagctcctggaggtctcgcagcacatcaagatgcgcatgggcggccgtgtggactttgaggagtttgtagaactgataggcccaaagctgagggaggagacggcgcacatgctgggggtgcgagagctgcgcatcgccttccgagagtttgacagggacagggatggacgaattacggtggcggagctgcgggaggcggtaccggctctgctcggggagccgctggcgggtcctgagctggacgagatgctccgagaagtggacctcaatggggatggcaccgtagactttgacgagtttgtgatgatgctctcccgccactgaggctccaggagggaatatctgttgcccctgcggccccagacaccagccagacccaggctgcaggcctcccccaggagcctccaggatggagatggagacccagcagcccccagactacttctatccctgaaaacacctggcctcaatgttggcttgttatgttacctgcccaccctcatccttacctcctcctactcaagctgcctggagaagacctgctctcagctgcccaccgttcctcagtgtgagcaagatttgggtctctccagacctctgggaggtagggagttccctggcactggcagcattcagtggggaccccccagtggcatgatgaatggagaggatggctggaccccttccactacttatgtttataattttttttttttttaatgaacttgagccgggtgcagtggctcacacctgtaagcccagctgtcagggggcagaagcgggaggatagcttgagcccaggagtgcaagacctgcctgggcaatatactgagaccccattctccacaaaaaggaaaaataaaagacaaaaaaacaaacaaaaaa

SEQ ID NO: 2793 - protein, 275 aa, Homo sapiens
MTTEQARGQQGPNLAIGRQKPPAGVVTPKSDAEEPPLTRKRSKKERGLRGSRKRTGSSGEQTGPEAPGSSNNPPSTGEGPAGAPPASPGPASSRQSHRHRPDSLHDAAQRTYGPLLNRVFGKDRELGPEELDELQAAFEEFDTDRDGYISHRELGDCMRTLGYMPTEMELLEVSQHIKMRMGGRVDFEEFVELIGPKLREETAHMLGVRELRIAFREFDRDRDGRITVAELREAVPALLGEPLAGPELDEMLREVDLNGDGTVDFDEFVMMLSRH

SEQ ID NO: 2794 - DNA, 961 bp, Homo sapiens
aaaaaaaaaaaaaaaaaaacaatgcgggggcggggcagcggcgacgctgggtgtgtgggcgcaaatggcggcggcgcacggcgcctgagcgggccggggccatgagcgccgcccggccccagttcagcattgatgatgccttcgagctgtccctggaggacgggggccctgggcccgagtccagcggggtcgcgcgctttgggccgctgcacttcgagcgtcgggcccggttcgaggtggctgacgaggacaagcagtcccggctgcgctaccagaacctggagaacgatgaggatggagcccaggcctctccggagccggatgggggagtcggcaccagggattccagccgaacttccatccgcagctcccagtggtccttcagcaccatcagcagcagcacccagcgctcctacaacacctgctgcagctggacccaacaccctttgatccagaagaaccgccgagtggtgctggcctccttcctgctcctgctgctggggctggtgctgatcctggtcggcgtgggactggaggcgaccccctctccaggtgtctccagcgccatcttcttcgtgccgggcttcctgttgttggtgcctggagtctatcacgtgatcttcatctactgcgcggtcaagggccaccggggcttccagttcttctacctgccctacttcgagaagtgatcgcggcgcagcgtggaccccttgcgcccatgggggcgcccctcttgccctgttccgttcccctcatctcaagggaagaggccctccaggaccctcgaaaccccagcccctagggagtttgctcaggaagttcggggcatgcaggcctggccctgggaaagccgcccgtcgcctgctctgtgccttaacttattctcgggccgtgcggctgctaggttgctgttattttgtgctaataaaagagtaattaattccaaaaaaaaaaaaaaaaa

SEQ ID NO: 2795 - protein, 195 aa, Homo sapiens
MSAARPQFSIDDAFELSLEDGGPGPESSGVARFGPLHFERRARFEVADEDKQSRLRYQNLENDEDGAQASPEPDGGVGTRDSSRTSIRSSQWSFSTISSSTQRSYNTCCSWTQHPLIQKNRRVVLASFLLLLLGLVLILVGVGLEATPSPGVSSAIFFVPGFLLLVPGVYHVIFIYCAVKGHRGFQFFYLPYFEK

SEQ ID NO: 2796 - DNA, 1244 bp, Homo sapiens
gcacgaggaaaatggcgctagctcggaagctaccgaggtgctaggagttgccgaagcaagtccggaagctaccgagcgagtccggaagttgccgaaagggagcagcggggaaggaggatggcggatatcatcgcaagactccgggaggacgggatccaaaaacgtgtgatacaggaaggccgaggagagctcccggactttcaagatgggaccaaggccacgttccactaccggacgctgcacagtgacgacgagggcaccgtgctggacgacagccgggctcgtggcaagcccatggagctcatcattggcaagaagttcaagctgcctgtgtgggagaccatcgtgtgcaccatgcgagaaggggagattgcccagttcctctgtgacatcaagcatgtggtcctgtacccgctggtggccaagagtctccgcaacatcgcggtgggcaaggaccccctggagggccagcggcactgctgcggtgttgcacagatgcgtgaacacagctccctgggccatgctgacctggacgccctgcagcagaacccccagcccctcatcttccacatggagatgctgaaggtggagagccctggcacgtaccagcaggacccatgggccatgacagacgaagagaaggcaaaggcagtgccacttatccaccaggagggcaaccggttgtaccgcgaggggcatgtgaaggaggctgctgccaagtactacgatgccattgcctgcctcaagaacctgcagatgaaggaacagcctgggtcccctgaatggatccagctggacaagcagatcacgccgctgctgctcaactactgccagtgcaagctggtggtcgaggagtactacgaggtgctggaccactgctcttccatcctcaacaagtacgacgacaacgtcaaggcctacttcaagcggggcaaggcccacgcggccgtgtggaatgcccaggaggcccaggctgactttgccaaagtgctggagctggacccagccctggcgcctgtggtgagccgagagctgcgggccctggaggcacggatccggcagaaggacgaagaggacaaagcccggttccgggggatcttctcccattgacaggagcacttggccctgccttacctgccaagcccactgctgcagctgccagcccccctgcccgtgctgcgtcatgcttctgtgtatataaaggcctttatttatctctcaaaaaaaaaaaaaaaaaaaaaaaa

SEQ ID NO: 2797 - protein, 330 aa, Homo sapiens
MADIIARLREDGIQKRVIQEGRGELPDFQDGTKATFHYRTLHSDDEGTVLDDSRARGKPMELIIGKKFKLPVWETIVCTMREGEIAQFLCDIKHVVLYPLVAKSLRNIAVGKDPLEGQRHCCGVAQMREHSSLGHADLDALQQNPQPLIFHMEMLKVESPGTYQQDPWAMTDEEKAKAVPLIHQEGNRLYREGHVKEAAAKYYDAIACLKNLQMKEQPGSPEWIQLDKQITPLLLNYCQCKLVVEEYYEVLDHCSSILNKYDDNVKAYFKRGKAHAAVWNAQEAQADFAKVLELDPALAPVVSRELRALEARIRQKDEEDKARFRGIFSH

SEQ ID NO: 2798 - DNA, 4211 bp, Homo sapiens
cgcgggcggcggtgctaggctcgcctctgcctccctcgtggcgggcccggacatggggtcccgtggcctgagtccctcggccggcgcgcagggctcggggccgcgcgcaccttccccgcactgactgtcgcgccgtgccctgcgccaggaggagcggaggccgcgcgcggcccgccgagcgccttcaggatgctcatcaaggaataccacattctgctgcccatgagcctggacgagtaccaggtggcccagctctacatgatccagaaaaagagccgggaggagtctagtggtgagggcagcggcgtggagatcctggccaaccggccctacacggatgggcccgggggcagcgggcaatacacacacaaggtgtaccacgtgggctcccacatcccaggctggttccgggcactgctgcccaaggctgccctgcaggtagaagaggaatcctggaatgcctacccctacacccgaacccggtacacctgccctttcgtggagaaattctccattgaaattgagacctattacctgcctgatggggggcagcagccaaacgtcttcaacctgagcggggccgagaggagacagcgcatcctggacaccatcgacatcgtgcgggatgcagtggccccaggcgagtacaaagcagaagaggacccccggctttatcactcggtcaagacgggccgagggccactgtctgatgactgggcacggacggcggcacagacggggccccttatgtgtgcctataagctgtgcaaggttgagttccgctactggggcatgcaagccaagatcgagcagttcatccatgatgtaggtctgcgtcgggtgatgctgcgggcccaccgccaggcctggtgctggcaggatgagtggacagagctgagcatggctgacatccgggcactggaagaggagactgctcgcatgctggcccagcgcatggccaagtgcaacacaggcagtgaggggtccgaggcccagccccccgggaaaccgagcaccgaggcccggtctgcggccagcaacactggcacccccgatgggcctgaggcccccccaggcccagatgcctcccccgatgccagctttgggaagcagtggtcctcatcctcccgttcctcctactcatcccaacatggaggggctgtgtctccccagagcttgtctgagtggcgcatgcagaacattgcccgagactctgagaacagctccgaggaagagttctttgatgcccacgaaggcttctcggacagtgaggaggtcttccccaaggagatgaccaagtggaactccaatgacttcattgatgcctttgcctccccagtggaggcagagggaacgccagagcctggagccgaggcagctaaaggcattgaggatggggcccaagcacccagggactcagagggcctggatggagccggggagctgggggctgaggcatgcgcagtccacgccctcttccttatcctgcacagcggcaacatcctggactcaggccctggagacgccaactccaagcaggcggatgtgcagacgctgagctccgccttcgaggccgtcacccgcatccacttccctgaggccttgggccacgtggcgctgcgactggtgccctgtccacccatctgcgccgccgcctatgcccttgtctccaacctgagcccttacagccacgatggggacagcctgtctcgctcccaagaccacattccactggctgccctgccactgctggccacctcatcctcccgctaccagggcgccgtggccaccgtcattgcccgcaccaaccaggcctactcagccttcctgcgctcacctgagggtgccggcttctgtgggcaggtcgcactgattggagatggtgttggtggcatcctgggctttgatgcactctgccacagtgctaacgcgggcaccgggagtcggggcagcagccgccgtgggagcatgaacaatgagctgctctctccggagtttggcccagtgcgggaccccctggcagatggtgtggaaggcctgggtcggggcagcccagaaccctcggccttgcctccccagcgcatccccagcgacatggccagtcctgagcccgagggctctcagaacagccttcaggcagcccccgcaaccacctcctcctgggagccccggcgggcaagcacggccttctgcccacccgctgccagttccgaggcacctgacggccccagcagcactgcccgccttgacttcaaggtctctggcttcttcctcttcggctccccactgggcctggtgctggctctgcgcaaaactgtgatgcccgccctggaggcagcccagatgcgcccagcctgtgaacagatctacaacctcttccacgcggccgacccctgcgcctcacgcctcgagcccctgctggccccgaagttccaggccatcgccccactgaccgtgccccgctaccagaagttccccctgggagatggctcatccctgctgctggccgacactctgcagacgcactccagcctctttctggaggagctggagatgctggtgccctcaacacccacctctactagcggtgccttctggaagggcagtgagttggccactgaccccccggcccagccagccgcccccagcaccaccagtgaggtggttaagatcctggagcgctggtgggggaccaagcggatcgactactcgctgtactgccccgaggcgctcaccgcctttcccaccgtcacgctgccccacctcttccacgccagctactgggagtccgccgacgtggtggcgttcatcctgcgccaggtgatcgagaaggagcggccacagctggcggaatgcgaggagccgtccatctacagcccggccttccccagggagaagtggcagcgaaaacgcacgcaggtcaagatccggaacgtcacttccaaccaccgggcgagcgacacggtggtgtgcgagggccgcccccaggtgctaagcgggcgcttcatgtacgggcccctggacgtcgtcacgctcactggagagaaggtggatgtctacatcatgacgcagccgctgtcgggcaagtggatccactttggcaccgaagtcaccaatagctcgggccgcctcaccttcccagttcccccagaacgcgcgctgggcattggtgtctaccccgtgcgcatggtggtcaggggcgaccacacctatgccgaatgctgcctgactgtggtggcccgcggcacggaggctgtggtcttcagcatcgacggctccttcaccgccagcgtctccatcatgggcagcgaccccaaggtgcgagctggcgccgtggacgtggtcaggcactggcaggactccggctacctgatcgtgtatgtcacaggccggccggatatgcagaagcaccgcgtggtggcatggctgtcgcagcacaacttcccccacggcgtcgtctccttctgcgacggcctcacccacgacccactacgccagaaggcaatgtttctccagagcctggttcaggaggtaggactgaacatcgtggccggttatgggtctcccaaagatgtggctgtatacacggcgctggggctgtccccgagccagacctacatcgtgggccgtgccgtgcggaagctacaggcgcagtgccagttcctgtcagacggctatgtggcccacctgggccagctggaagcgggctcgcactcgcatgcctcctcgggacccccgagagctgccttgggcaagagcagctatggtgtggctgcccccgtggacttcctgcgcaaacagagccagctgcttcgctcgaggggccccagccaggcggagcgtgagggcccgggaacaccacccaccaccctggcacggggcaaagcacggagcatcagcctgaagctggacagcgaggagtgaggcccacaccagcctggacctgggttatttattgacacacccaaggggcccgaggggctgcgtgtgggaggctggggacccagacttttggccccagcgctggcccccccagccccacaccctatatctccgtgtgctcctcggtgttacttccctttcatatgaggggacccagcgccggggggagggaggagggcgtgggcatgggcgcagaggcttttccagtgtgtataaatccatgaaaataaacgccacctgcaccccaaaaaaaaaaaaaaaaaaaaaaa

SEQ ID NO: 2799 - protein, 1244 aa, Homo sapiens
MLIKEYHILLPMSLDEYQVAQLYMIQKKSREESSGEGSGVEILANRPYTDGPGGSGQYTHKVYHVGSHIPGWFRALLPKAALQVEEESWNAYPYTRTRYTCPFVEKFSIEIETYYLPDGGQQPNVFNLSGAERRQRILDTIDIVRDAVAPGEYKAEEDPRLYHSVKTGRGPLSDDWARTAAQTGPLMCAYKLCKVEFRYWGMQAKIEQFIHDVGLRRVMLRAHRQAWCWQDEWTELSMADIRALEEETARMLAQRMAKCNTGSEGSEAQPPGKPSTEARSAASNTGTPDGPEAPPGPDASPDASFGKQWSSSSRSSYSSQHGGAVSPQSLSEWRMQNIARDSENSSEEEFFDAHEGFSDSEEVFPKEMTKWNSNDFIDAFASPVEAEGTPEPGAEAAKGIEDGAQAPRDSEGLDGAGELGAEACAVHALFLILHSGNILDSGPGDANSKQADVQTLSSAFEAVTRIHFPEALGHVALRLVPCPPICAAAYALVSNLSPYSHDGDSLSRSQDHIPLAALPLLATSSSRYQGAVATVIARTNQAYSAFLRSPEGAGFCGQVALIGDGVGGILGFDALCHSANAGTGSRGSSRRGSMNNELLSPEFGPVRDPLADGVEGLGRGSPEPSALPPQRIPSDMASPEPEGSQNSLQAAPATTSSWEPRRASTAFCPPAASSEAPDGPSSTARLDFKVSGFFLFGSPLGLVLALRKTVMPALEAAQMRPACEQIYNLFHAADPCASRLEPLLAPKFQAIAPLTVPRYQKFPLGDGSSLLLADTLQTHSSLFLEELEMLVPSTPTSTSGAFWKGSELATDPPAQPAAPSTTSEVVKILERWWGTKRIDYSLYCPEALTAFPTVTLPHLFHASYWESADVVAFILRQVIEKERPQLAECEEPSIYSPAFPREKWQRKRTQVKIRNVTSNHRASDTVVCEGRPQVLSGRFMYGPLDVVTLTGEKVDVYIMTQPLSGKWIHFGTEVTNSSGRLTFPVPPERALGIGVYPVRMVVRGDHTYAECCLTVVARGTEAVVFSIDGSFTASVSIMGSDPKVRAGAVDVVRHWQDSGYLIVYVTGRPDMQKHRVVAWLSQHNFPHGVVSFCDGLTHDPLRQKAMFLQSLVQEVGLNIVAGYGSPKDVAVYTALGLSPSQTYIVGRAVRKLQAQCQFLSDGYVAHLGQLEAGSHSHASSGPPRAALGKSSYGVAAPVDFLRKQSQLLRSRGPSQAEREGPGTPPTTLARGKARSISLKLDSEE

SEQ ID NO: 2800 - DNA, 1397 bp, Homo sapiens
gcgcgcaaggcaccggtggcagcggcgacggcagctgcgacagcaacccctgctgggccgaaactgggcagagcggagcagacgtctgaagcagcgcgagtgaggcgcgagggtagcgcccgcgcccgggaagacccctcggcgcgaaccggcagcccagccccgggtcccggttcccaaggccccgcctctagggcctggggactaatcggattgagagcgcgccggcccgggccgcgaactcgccaattgcggagggcggtggccaccgcccaatccggagcagacaggtgcgaggtccggaaggcggaggccaatcggcggcggttgcgacctgctggggcaggtctcggccaataaggaggctcgagtgacatcttcgcgcaccaatcgggagtgagggagcattcgtgcccgctcgcccttccggccagacctctatttaccaggggcgtgcagcccgcttgccaatcagagcgcggctgagcggccccgcagccaacccccgaggagcggccggctggcgtccgccgcgcccaggagttggggatgtcctacaaacccatcgcccctgctcccagcagcacccctggctccagcacccctgggccgggcaccccggtccctacaggaagcgtcccgtcgccgtcgggctcagtgccaggagccggcgctcctttcagaccgctgtttaacgactttggaccgccttccatgggctacgtgcaggcgatgaagccacccggcgcccagggctcccagagcacctacacggacctgctgtcagtcatagaggagatgggcaaagagatccggcctacctatgctggcagcaagagcgccatggagcgcctgaagagaggtatcatccatgcccgggccctagtcagagagtgcctggcagagacagagcggaacgcccgcacgtaacaggaagcgcctcggcctcagcgtctggacctatccggccactgcagagcacccgcttctccctggccttcatcccgagttgcactaaccatcctgggcttcctgtcctgtgtcccttggtgggtcccctccaggaaccaaggagtggccctccaggtggcagcactaaggacacccccccacaacaagagttagcagcgaggtccccatgagtcccacccatgacctgccgacagtgttgcccaccggaacttttgtggcccctaccgctcagcccttcccagcacttctcccactttgtcccgagcctccttctcccccagcaggggcacaggcctggcacctccctgccttgtgtcctgagccatagtgactcttttatctgtgtgtcttttgctaaatatgccctttttatattaataaaagatgatttggagttgtgctctcaaaaaaaaaaaaaaaaaaaa

SEQ ID NO: 2801 - protein, 126 aa, Homo sapiens
MSYKPIAPAPSSTPGSSTPGPGTPVPTGSVPSPSGSVPGAGAPFRPLFNDFGPPSMGYVQAMKPPGAQGSQSTYTDLLSVIEEMGKEIRPTYAGSKSAMERLKRGIIHARALVRECLAETERNART

SEQ ID NO: 2802 - DNA, 986 bp, Homo sapiens
aggcagcagcatccgccgaggcccacccgggccacccccggggttccaggcctggcatggttcagggcccatggggaactgtgccaagcggccctggcgccggggccctaaggaccccttgcagtggctcggctccccaccaaggggctcctgccccagccccagctccagccccaaggagcagggggaccccgcgccaggcgtccagggctactcggtgctcaacagcctggtggggcctgcctgcatcttcctgcggcccagcattgccgccacccaactcgaccgggagctgcggcccgaggagattgaagagctgcaggtcgccttccaggagtttgaccgagaccaggacggctacattggctgccgggagctgggtgcctgcatgcggaccctgggctacatgcccaccgagatggagctcatcgagatctcacagcaaatcagtggcggaaaggtggactttgaagacttcgtggagctgatgggccccaagctgctggcagagacggcagacatgatcggtgtccgggagctacgggacgccttccgggagttcgacaccaatggggacggccgcatcagcgtgggcgagctccgggcggccctcaaggccctgctgggggagcgcctcagccagcgggaggtggacgagatcctccaggacgtggacctcaatggggacggtctggtcgacttcgaagagtttgtgcgaatgatgtctcggtgagcctgtacagaagctggaggcagcataaaggactcaaggaccacagcctctgcccaccagcatgttccttgaagcccatcgcctctagcggggaccctccttttctccccatcccacctgtgtgcagtgcccttgcctgccttacccccaccaccactttttcaataaagccgcctggccttgtctctgtcaaaaaaaaaaaaaaaaaaaaaaaaaaaaaaaaaaaaaaaaaaaaaaaaaaaaaaaaaaaaaa

SEQ ID NO: 2803 - protein, 220 aa, Homo sapiens
MGNCAKRPWRRGPKDPLQWLGSPPRGSCPSPSSSPKEQGDPAPGVQGYSVLNSLVGPACIFLRPSIAATQLDRELRPEEIEELQVAFQEFDRDQDGYIGCRELGACMRTLGYMPTEMELIEISQQISGGKVDFEDFVELMGPKLLAETADMIGVRELRDAFREFDTNGDGRISVGELRAALKALLGERLSQREVDEILQDVDLNGDGLVDFEEFVRMMSR

SEQ ID NO: 2804 - DNA, 815 bp, Homo sapiens
aggcagcagcatccgccgaggcccacccgggccacccccggggttccaggcctggcatggttcagggcccatggggaactgtgccaagcggccctggcgccggggccctaaggaccgggagctgcggcccgaggagattgaagagctgcaggtcgccttccaggagtttgaccgagaccaggacggctacattggctgccgggagctgggtgcctgcatgcggaccctgggctacatgcccaccgagatggagctcatcgagatctcacagcaaatcagtggcggaaaggtggactttgaagacttcgtggagctgatgggccccaagctgctggcagagacggcagacatgatcggtgtccgggagctacgggacgccttccgggagttcgacaccaatggggacggccgcatcagcgtgggcgagctccgggcggccctcaaggccctgctgggggagcgcctcagccagcgggaggtggacgagatcctccaggacgtggacctcaatggggacggtctggtcgacttcgaagagtttgtgcgaatgatgtctcggtgagcctgtacagaagctggaggcagcataaaggactcaaggaccacagcctctgcccaccagcatgttccttgaagcccatcgcctctagcggggaccctccttttctccccatcccacctgtgtgcagtgcccttgcctgccttacccccaccaccactttttcaataaagccgcctggccttgtctctgtcaaaaaaaaaaaaaaaaaaaaaaaaaaaaaaaaaaaaaaaaaaaaaaaaaaaaaaaaaaaaaa

SEQ ID NO: 2805 - protein, 163 aa, Homo sapiens
MGNCAKRPWRRGPKDRELRPEEIEELQVAFQEFDRDQDGYIGCRELGACMRTLGYMPTEMELIEISQQISGGKVDFEDFVELMGPKLLAETADMIGVRELRDAFREFDTNGDGRISVGELRAALKALLGERLSQREVDEILQDVDLNGDGLVDFEEFVRMMSR

SEQ ID NO: 2806 - DNA, 737 bp, Homo sapiens
ggagtttcgccgccgcagtcttcgccaccatgccgccctacaccgtggtctatttcccagttcgaggccgctgcgcggccctgcgcatgctgctggcagatcagggccagagctggaaggaggaggtggtgaccgtggagacgtggcaggagggctcactcaaagcctcctgcctatacgggcagctccccaagttccaggacggagacctcaccctgtaccagtccaataccatcctgcgtcacctgggccgcacccttgggctctatgggaaggaccagcaggaggcagccctggtggacatggtgaatgacggcgtggaggacctccgctgcaaatacatctccctcatctacaccaactatgaggcgggcaaggatgactatgtgaaggcactgcccgggcaactgaagccttttgagaccctgctgtcccagaaccagggaggcaagaccttcattgtgggagaccagatctccttcgctgactacaacctgctggacttgctgctgatccatgaggtcctagcccctggctgcctggatgcgttccccctgctctcagcatatgtggggcgcctcagcgcccggcccaagctcaaggccttcctggcctcccctgagtacgtgaacctccccatcaatggcaacgggaaacagtgagggttggggggactctgagcgggaggcagagtttgccttcctttctccaggaccaataaaatttctaagagagct

SEQ ID NO: 2807 - protein, 210 aa, Homo sapiens
MPPYTVVYFPVRGRCAALRMLLADQGQSWKEEVVTVETWQEGSLKASCLYGQLPKFQDGDLTLYQSNTILRHLGRTLGLYGKDQQEAALVDMVNDGVEDLRCKYISLIYTNYEAGKDDYVKALPGQLKPFETLLSQNQGGKTFIVGDQISFADYNLLDLLLIHEVLAPGCLDAFPLLSAYVGRLSARPKLKAFLASPEYVNLPINGNGKQ

SEQ ID NO: 2808 - DNA, 2431 bp, Homo sapiens
ctctttcgctccctccttagcccgccggctcccagcctttgatgccacaagtaaacaaacctcgcatgtcgccttctgctgggtcctggaggtcttggaagcctgatgaactcgtctttttcagtttcctggaaccctctgctgtggtcctcgtgataagagtgacctttttggcctgctctccccagctcttttccagtcctcatgcagggtatcagcattgctgagtggcctgcccaggatgacacaactgccagaactcggcctgaggtctcctaacaacaaatcccccactggtccccacccactggagcacctacttgccaggcttctcaagcgaagaaggagatccactctgatgtcgtctcccaggagccttctctgcagcatctcaggtcctggctctcacctcctcagcacccatcccatcctgtgtcactctgtatatcagcctccccagccagcctccaggccacaagccaagaggtatcaagggctcctccctgtcccactggccccacatccactgtgtctatctggtcaactttaccttccaaacattccctgcacagtgatagatggctgtggccctgtcatctctcacctgaaattaacaatgtatccttggggcctcccaccctcacatcttggctcctccagccccttctctgcaaacatggaacagtgggattattataaatctcagacccgttttgcccctttcctgcctgagagtttttgtggttccccactgccctcagaacaaagctcaagaccctttggcctggcattcaaggtcctttgtgctgccacctgtcaacctccccagttccagctcctttggctttgcccatacaagctggatctgcaccagaggatctgtcttcctcccaacttggccctagtcctcctaggagccctttggacgtcacctcccccaggaagctttctgcaaccaccctacaaccgtccctataaactttataaaaccaattagtgtggggaaaagcaagagagatcagattgttactgtgtctgtgtagaaagaagtagacataggagactccattttgttatgtactaagaaaaattcttctgccttgagattctgtgaccttacccccaaccccgtgctctctgaaacatgtgctgtgtcaactcagagttgaatggattaagggcggtgcaagatgtgctttgttaaacagatgcttgaaggcagcatgctcgttaagactcatcaccactccctaatctcaagtacccagggacacaaaaactgcggaaggccgcagggacctctgcctaggaaagccaggtattgtccaaggtttctccccatgtgatagtctgaaatatggcctcgtgggaagggaaagacctgaccgtcccccagcccgacacccgtaaagggtctgtgctgaggaggattagtaaaagaggaaggaatgcctcttgcagttgagacaagaggaaggcatctgtctcctgcctgtccctgggcaatggaatgtctcggtataaaacccgattgtatgctccatctactgagatagggaaaaaccgccttagggctggaggtgggacctgcgggcagcaatactgctttgtaaagcattgagatgtttatgtgtatgcatatctaaaagcacagcacttaatcctttacattgtctatgatgcaaagacctttgttcacgtgtttgtctgctgaccctcttcccacaattgtcttgtgaccctgacacatccccctcttcgagaaacacccacagatgatcaataaatactaagggaactcagaggctggcgggatcctccatatgctgaacgctggttccccgggtccccttatttctttctctatactttgtctctgtgtctttttcttttccaaatctctcgtcccaccttacgagaaacacccacaggtgtgtaggggcaacccacccctacaaattagggaagaagtagggggaaaagatgaaaataaaccaagcctgcagcatactcagtattcatcatgaggtcagctgctctctgacctgcttcctcatggctggttggtgcctgttgtcccggagtgacaaagaccctagattatagctgcccttaactgctgtataaataacaacttgaacatgaaatgctaaattttccttttgaagtattccttcagatcctgcatgctgataaaactactgactcaactggtccccatgaggagctggctcaccaaagaatgcggtttccaatcccaattatttcatgccccttgcttaggcaatcaacaatcccaaatttccagccccttgccctccacaatctccttaaaaaattcagtccaaaactccttggggagatggatttgaaggtctcctcccatctccaaacttggtgccctgcaatcattaaactctttctctgctgc

SEQ ID NO: 2809 - protein, 251 aa, Homo sapiens
MTQLPELGLRSPNNKSPTGPHPLEHLLARLLKRRRRSTLMSSPRSLLCSISGPGSHLLSTHPILCHSVYQPPQPASRPQAKRYQGLLPVPLAPHPLCLSGQLYLPNIPCTVIDGCGPVISHLKLTMYPWGLPPSHLGSSSPFSANMEQWDYYKSQTRFAPFLPESFCGSPLPSEQSSRPFGLAFKVLCAATCQPPQFQLLWLCPYKLDLHQRICLPPNLALVLLGALWTSPPPGSFLQPPYNRPYKLYKTN

SEQ ID NO: 2810 - DNA, 1566 bp, Homo sapiens
atcgcgccagttcctcagcctcagtgctatgaaggtgacagcgtgaggtgacccatctggcccgccgcgatgctggcaacacggcggctgctcggctggtcgcttcccgcgcgggtatctgtgcgtttcagcggcgacacgacagcacccaagaaaacctcatttggctcgctgaaggatgaagaccggattttcaccaacctgtacggccgccatgactggaggctgaaaggttccctgagtcgaggtgactggtacaagacaaaggagatcctgctgaaggggcccgactggatcctgggcgagatcaagacatcgggtttgaggggccgtggaggcgctggcttccccactggcctcaagtggagcttcatgaataagccctcagatggcaggcccaagtatctggtggtgaacgcagacgagggggagccgggcacctgcaaggaccgggagatcttacgccatgatcctcacaagctgctggaaggctgcctggtggggggccgggccatgggcgcccgcgctgcctatatctacatccgaggggaattctacaatgaggcctccaatctgcaggtggccatccgagaggcctatgaggcaggtctgattggcaagaatgcttgtggctctggctatgattttgacgtgtttgtggtgcgcggggctggggcctacatctgtggagaggagacagcgctcatcgagtccattgagggcaagcagggcaagccccgcctgaagccccccttccccgcagacgtgggagtgtttggctgccccacaactgtggccaacgtggagacagtggcagtgtcccccacaatctgccgccgtggaggtacctggtttgctggctttggcagagaacgcaactcaggcaccaaactattcaacatctctggccatgtcaaccacccttgcactgtggaggaggagatgtctgtgcccttgaaagaactgattgagaagcatgctgggggtgtcacgggcggctgggacaacctccttgctgtgatccctggcggctcgtctaccccactgatccccaagtctgtgtgtgagacggtgctgatggacttcgatgcgctggtgcaggcacagacaggcctgggcacagctgcggtgatcgtcatggaccgctcgacggacatcgtgaaagccatcgcccgcctcattgagttctataagcacgagagctgtggccagtgtaccccatgccgtgagggtgtggactggatgaacaaggtgatggcacgtttcgtgaggggggatgcccggccggccgagatcgactccctgtgggagatcagcaagcagatagaaggccatacgatttgtgctctgggtgacggggccgcctggcctgtgcagggtctgatccgccactttcggccggagctcgaggagcggatgcagcggtttgcccagcagcatcaggcccggcaggctgcctcttagcccaccaccctggcctgctgtcctgcgtctatccatgtggaatgctggacaataaagcgagtgctgcccaccctccaaaaaaaaaaaaaaaaaaaaaaaaaa

SEQ ID NO: 2811 - protein, 464 aa, Homo sapiens
MLATRRLLGWSLPARVSVRFSGDTTAPKKTSFGSLKDEDRIFTNLYGRHDWRLKGSLSRGDWYKTKEILLKGPDWILGEIKTSGLRGRGGAGFPTGLKWSFMNKPSDGRPKYLVVNADEGEPGTCKDREILRHDPHKLLEGCLVGGRAMGARAAYIYIRGEFYNEASNLQVAIREAYEAGLIGKNACGSGYDFDVFVVRGAGAYICGEETALIESIEGKQGKPRLKPPFPADVGVFGCPTTVANVETVAVSPTICRRGGTWFAGFGRERNSGTKLFNISGHVNHPCTVEEEMSVPLKELIEKHAGGVTGGWDNLLAVIPGGSSTPLIPKSVCETVLMDFDALVQAQTGLGTAAVIVMDRSTDIVKAIARLIEFYKHESCGQCTPCREGVDWMNKVMARFVRGDARPAEIDSLWEISKQIEGHTICALGDGAAWPVQGLIRHFRPELEERMQRFAQQHQARQAAS

SEQ ID NO: 2812 - DNA, 834 bp, Homo sapiens
cggccgcgcaggacttgacatgctgcccgactgcctgtcggccgagggcgagctgcgctgccgccggctgctggcaggggccacggcccggctccgcgcgcggcccgcgtcggccgcggtgctcgtgccgctctgctcagtgcgtggggtgccggcgctgctgtacacgctgcggtccagccgcctgaccgggaggcacaagggcgacgtcagtttcccaggcggcaagtgcgacccggctgaccaagatgtggtgcacacggccctgcgggaaacccgggaggagctgggcctggcagtgcccgaggagcacgtgtggggcctgctgcggcctgtgtatgatccgcaaaaggccaccgtggtgccagtgcttgctggtgtaggcccactggatccccagagcctcaggcccaactcggaggaggtgagctgggggatatgagggggttgggctgttccagtcctctgtctaccctctctgcctcctgcctgcaggtagatgaggtgtttgcactgccgctggcccacctgctgcagacgcagaatcagggctatacccacttctgccggggtggccacttccgctacacactacccgtcttcctgcatggaccacaccgggtctggggcctcacagctgtcatcactgagtttgccctgcagctgctggcacctggtacctaccagccccgcctggccggcctgacctgctcaggggctgagggtctggcccgccctaagcagcccctggcttcaccctgtcaggccagctccactccaggactgaataaaggtctttgacagctctaaaaaaaaaaaaaaaaaaaaaaaaaa

SEQ ID NO: 2813 - protein, 140 aa, Homo sapiens
MLPDCLSAEGELRCRRLLAGATARLRARPASAAVLVPLCSVRGVPALLYTLRSSRLTGRHKGDVSFPGGKCDPADQDVVHTALRETREELGLAVPEEHVWGLLRPVYDPQKATVVPVLAGVGPLDPQSLRPNSEEVSWGI

SEQ ID NO: 2814 - DNA, 1558 bp, Homo sapiens
cacgaggggtgaccaccccttccagcaggcaggttcccagccccagccaagcagtgtttctccaggagccggacagcctctctgtctccatggcagccttcctatctgctggcctcggcatacttgcaccctcagagacctaccccctacctacaaccagctctggctgggagccccggctggggtcaccattcccatcaggcccttgcaccagctctactggggcccaagctgtggccgagcccactgggcagggccccaagaacccacgtgtgtccagagtgacagttcagctggagatgaagcctctgtgggaggaattcaaccagctgggcactgagatgatcgtcaccaaggcaggcaggaggatgttcccccccttccaggtgaagatcctgggcatggactccctggccgactacgccctgctcatggacttcatccccctggacgacaagagatacaggtatgccttccacagctcggcctggctggtggcgggcaaggcagacccagccacacctggccgcgtgcacttccaccccgactcgccagccaagggtgcccagtggatgcgccagattgtgtcctttgacaagctcaagctgaccaacaacctgctggatgacaatggccacatcattctcaactctatgcaccgctaccagccccgtttccacgtggtcttcgtggacccacgcaaggacagtgagcgctatgcccaggagaacttcaagtccttcatcttcacagagacccagttcacagcagtgacagcctatcagaaccacaggatcacccagctgaaaatcgccagcaacccttttgccaaaggctttagagagagtgacctggactcctggcctgtggccccacggcccctgctcagtgtcccagcccggagtcacagcagcctcagtccctgtgtgctgaagggtgccacagacagggagaaagaccccaacaaagcttcagcttccacctccaagacccctgcttggctccatcatcagctgctgcccccacctgaggtcctgctggccccggccacctacaggcctgtcacgtatcagagcctgtactctggagccccgagccacctagggatcccaaggacccgaccagcaccataccccctccccaacatccgggctgatagggatcaaggaggcctgcctctcccagctgggctggggctcctgtcccccactgtggtgtgcctggggcctggccaggactcccagtgatgccagaagccctggggggaagccctgctaccctggaccttacaccgggtgtgggaatcagcctctgccccgccccctccagccccatctctgtctcaaggagagcagggtaggtgaaagtctagagaaagaggctacctgcccagggtcacagcaaggctgggaccatggcaagcttggaaccaggacttctacctcccaaccccagcagcctgaatactgtgccctcttgctttgggggtaactcccgaaaaccctgccttacctctcccttccccctaacattaaactatttggcatgaaaaaaaaaa

SEQ ID NO: 2815 - protein, 385 aa, Homo sapiens
MAAFLSAGLGILAPSETYPLPTTSSGWEPRLGSPFPSGPCTSSTGAQAVAEPTGQGPKNPRVSRVTVQLEMKPLWEEFNQLGTEMIVTKAGRRMFPPFQVKILGMDSLADYALLMDFIPLDDKRYRYAFHSSAWLVAGKADPATPGRVHFHPDSPAKGAQWMRQIVSFDKLKLTNNLLDDNGHIILNSMHRYQPRFHVVFVDPRKDSERYAQENFKSFIFTETQFTAVTAYQNHRITQLKIASNPFAKGFRESDLDSWPVAPRPLLSVPARSHSSLSPCVLKGATDREKDPNKASASTSKTPAWLHHQLLPPPEVLLAPATYRPVTYQSLYSGAPSHLGIPRTRPAPYPLPNIRADRDQGGLPLPAGLGLLSPTVVCLGPGQDSQ

SEQ ID NO: 2816 - DNA, 1317 bp, Homo sapiens
cggagtgacagccccacgggccacgcagcaagcagaagatccccgggagtcaccctcaaccctctggggccacgtgggcccatgaataccagcctgtctgcgagttagacgccagtcctggtggcccgggaagcccagatccgcatcagcggttctgcaccccacaccagcatgtgctcactgcctgtgccccgggagcccctgcgtcgcgtggctgtgactgggggcacgcatggcaacgagatgtcgggcgtctacctggcccggcactggctgcatgcccccgcagagctgcagagagccagcttctccgctgtgcctgtgctggccaacccggcagccacatccggctgccgccgctacgtggaccatgacctcaaccgcaccttcaccagcagcttcctcaattccaggcccaccccggacgacccatatgaggtgacaagagcccgagagctgaaccagctgctggggcccaaggcctcgggccaggcctttgactttgtccttgacctgcacaacaccacggccaacatgggcacctgcttaatcgcgaagtcctcccacgaagtctttgccatgcacctgtgccgccatctgcagctgcagtaccccgagctgtcctgccaggtcttcctgtaccagcggtctggggaggagagctacaacctggactctgtggccaaaaatggactgggtctggagctgggcccccagccacagggtgtgctgcgggctgacattttctcaaggatgaggaccctggtggccacagttctggacttcatcgaactcttcaaccagggtacggcctttcctgcctttgagatggaagcctatagacccgtgggcgtcgtggacttcccccgcaccgaggccgggcacctggcaggcactgtgcatcctcagctgcaggaccgagacttccagccactgcagcctggtgctcccatcttccagatgttcagtggggaggacctgctctatgagggagagtccacggtgtaccccgtgttcattaacgaggctgcctactatgagaagggcgttgcctttgtccagactgagaagttcacattcaccgtgcctgccatgcccgcgctgacccctgccccgagcccagcttcctaacccaagacacacctccccaacctcagtcttcccatctgaacgatgggtcctgaggcacagctctgagcacagaggtcccttctgccacctaccatgcaccatgttccttgccaggcctccccaacccctggcctcaatttccctttctataaaatggaagatgtccagaaaaaaaaaaaaaaaaaa

SEQ ID NO: 2817 - protein, 319 aa, Homo sapiens
MCSLPVPREPLRRVAVTGGTHGNEMSGVYLARHWLHAPAELQRASFSAVPVLANPAATSGCRRYVDHDLNRTFTSSFLNSRPTPDDPYEVTRARELNQLLGPKASGQAFDFVLDLHNTTANMGTCLIAKSSHEVFAMHLCRHLQLQYPELSCQVFLYQRSGEESYNLDSVAKNGLGLELGPQPQGVLRADIFSRMRTLVATVLDFIELFNQGTAFPAFEMEAYRPVGVVDFPRTEAGHLAGTVHPQLQDRDFQPLQPGAPIFQMFSGEDLLYEGESTVYPVFINEAAYYEKGVAFVQTEKFTFTVPAMPALTPAPSPAS

SEQ ID NO: 2818 - DNA, 2660 bp, Homo sapiens
accccattgattaccccattgccaggcgtgggcacgggagttggtttgggagctgccagtctcctgggaggatcgcagtcagcagagcagggctgaggcctgggggtaggagcagagcctgcgcatctggaggcagcatgtccaagaaagggagtggaggtgcagcgaaggacccaggggcagagcccacgctgggatggaccccttcgaggacacgctgcggcggctgcgtgaggccttcaactgagggcgcacgcggccggccgagttccgggctgcgcagctccagggcctgggccacttccttcaagaaaacaagcagcttctgcgcgacgtgctggcccaggacctgcataagccagctttcgaggcagacatatctgagctcatcctttgccagaacgaggttgactacgctctcaagaacctgcaggcctggatgaaggatgaaccacggtccacgaacctgttcatgaagctggactcggtcttcatctggaaggaaccctttggcctggtcctcatcatcgcaccctggaactacccactgaacctgaccctggtgctcctggtgggcgccctcgccgcagggagttgcgtggtgctgaagccgtcagaaatcagccagggcacagagaaggtcctggctgaggtgctgccccagtacctggaccagagctgctttgccgtggtgctgggcggaccccaggagacagggcagctgctagagcacaagttggactacatcttcttcacagggagccctcgtgtgggcaagattgtcatgactgctgccaccaagcacctgacgcctgtcaccctggagctggggggcaagaacccctgctacgtggacgacaactgcgacccccagaccgtggccaaccgcgtggcctggttctgctacttcaatgccggccagacctgcgtggcccctgactacgtcctgtgcagccccgagatgcaggagaggctgctgcccgccctgcagagcaccatcacccgtttctatggcgacgacccccagagctccccaaacctgggccgcatcatcaaccagaaacagttccagcggctgcgggcattgctgggctgcggccgcgtggccattgggggccagagcaacgagagcgatcgctacatcgcccccacggtgctggtggacgtgcaggagacggagcctgtgatgcaggaggagatcttcgggcccatcctgcccatcgtgaacgtgcagagcgtggacgaggccatcaagttcatcaaccggcaggagaagcccctggccctgtacgccttctccaacagcagccaggttgtgaaccagatgctggagcggaccagcagcggcagctttggaggcaatgagggcttcacctacatatctctgctgtccgtgccattcgggggagtcggccacagtgggatgggccggtaccacggcaagttcaccttcgacaccttctcccaccaccgcacctgcctgctcgccccctccggcctggagaaattaaaggagatccactacccaccctataccgactggaaccagcagctgttacgctggggcatgggctcccagagctgcaccctcctgtgagcgtcccacccgcctccaacgggtcacacagagaaacctgagtctagccatgaggggcttatgctcccaactcacattgttcctccagaccgcaggttcccccagcctcaggttgctggagctgtcacatgactgcatcctgcctgccagggctgcaaagcaaggtcttgcttctatctgggggacgctgctcgagagaggccaagaggccgcagaacatgccaggtgtcctcactcaccccaccctccccaattccagccctttgccctctcggtcagggttggccaggcccagtcacaggggcagtgtcaccctggaaaatacagtgccctgccttcttaggggcatcagccctgaacggttgagagcgtggagccctccaggcctttgctctcccctctaggcacacgcgcacttccatctctgccccatcccaactgcaccagcactgcctcccccagggatcctctcacatcccacactggtctctgcaccacccctctggttcacaccgcaccctgcactcacccacagcagctccatccactgggaaaactggggtttgcatcactccactgcacagtgttagtgggacctgggggcaagtcccttgacttctctgagcctcagtttccttatgtgaaagttgctggaaccaaaatggagtcacttatgccaaactctaataaaatggagtcggggggccacatagaagccctcacacacacatgcccgtaacaggatttatcacaagacacgcctgcatgtagaccagacacagggcgtatggaaagcacgtcctcaagactgtagtattccagatgagctgcagatgcttacctaccacggccgtctccaccagaaaaccatcgccaactcctgcgatcagcttgtgacttacaaaccttgtttaaaagctgcttacatggacttctgtcctttaaaagcttccccttggctgtggccctctgtgtatgcctgggatccttccaagcactcatagcccagataggaatcctctgctcctcccaaataaattcatctgttctggaaaaaaaaaaa

SEQ ID NO: 2819 - protein, 385 aa, Homo sapiens
MKDEPRSTNLFMKLDSVFIWKEPFGLVLIIAPWNYPLNLTLVLLVGALAAGSCVVLKPSEISQGTEKVLAEVLPQYLDQSCFAVVLGGPQETGQLLEHKLDYIFFTGSPRVGKIVMTAATKHLTPVTLELGGKNPCYVDDNCDPQTVANRVAWFCYFNAGQTCVAPDYVLCSPEMQERLLPALQSTITRFYGDDPQSSPNLGRIINQKQFQRLRALLGCGRVAIGGQSNESDRYIAPTVLVDVQETEPVMQEEIFGPILPIVNVQSVDEAIKFINRQEKPLALYAFSNSSQVVNQMLERTSSGSFGGNEGFTYISLLSVPFGGVGHSGMGRYHGKFTFDTFSHHRTCLLAPSGLEKLKEIHYPPYTDWNQQLLRWGMGSQSCTLL

SEQ ID NO: 2820 - DNA, 2504 bp, Homo sapiens
gtgaagaaggatgtggttgcttccccttccaccataactgatggaccccttcgaggacacgctgcggcggctgcgtgaggccttcaactgagggcgcacgcggccggccgagttccgggctgcgcagctccagggcctgggccacttccttcaagaaaacaagcagcttctgcgcgacgtgctggcccaggacctgcataagccagctttcgaggcagacatatctgagctcatcctttgccagaacgaggttgactacgctctcaagaacctgcaggcctggatgaaggatgaaccacggtccacgaacctgttcatgaagctggactcggtcttcatctggaaggaaccctttggcctggtcctcatcatcgcaccctggaactacccactgaacctgaccctggtgctcctggtgggcgccctcgccgcagggagttgcgtggtgctgaagccgtcagaaatcagccagggcacagagaaggtcctggctgaggtgctgccccagtacctggaccagagctgctttgccgtggtgctgggcggaccccaggagacagggcagctgctagagcacaagttggactacatcttcttcacagggagccctcgtgtgggcaagattgtcatgactgctgccaccaagcacctgacgcctgtcaccctggagctggggggcaagaacccctgctacgtggacgacaactgcgacccccagaccgtggccaaccgcgtggcctggttctgctacttcaatgccggccagacctgcgtggcccctgactacgtcctgtgcagccccgagatgcaggagaggctgctgcccgccctgcagagcaccatcacccgtttctatggcgacgacccccagagctccccaaacctgggccgcatcatcaaccagaaacagttccagcggctgcgggcattgctgggctgcggccgcgtggccattgggggccagagcaacgagagcgatcgctacatcgcccccacggtgctggtggacgtgcaggagacggagcctgtgatgcaggaggagatcttcgggcccatcctgcccatcgtgaacgtgcagagcgtggacgaggccatcaagttcatcaaccggcaggagaagcccctggccctgtacgccttctccaacagcagccaggttgtgaaccagatgctggagcggaccagcagcggcagctttggaggcaatgagggcttcacctacatatctctgctgtccgtgccattcgggggagtcggccacagtgggatgggccggtaccacggcaagttcaccttcgacaccttctcccaccaccgcacctgcctgctcgccccctccggcctggagaaattaaaggagatccactacccaccctataccgactggaaccagcagctgttacgctggggcatgggctcccagagctgcaccctcctgtgagcgtcccacccgcctccaacgggtcacacagagaaacctgagtctagccatgaggggcttatgctcccaactcacattgttcctccagaccgcaggttcccccagcctcaggttgctggagctgtcacatgactgcatcctgcctgccagggctgcaaagcaaggtcttgcttctatctgggggacgctgctcgagagaggccaagaggccgcagaacatgccaggtgtcctcactcaccccaccctccccaattccagccctttgccctctcggtcagggttggccaggcccagtcacaggggcagtgtcaccctggaaaatacagtgccctgccttcttaggggcatcagccctgaacggttgagagcgtggagccctccaggcctttgctctcccctctaggcacacgcgcacttccatctctgccccatcccaactgcaccagcactgcctcccccagggatcctctcacatcccacactggtctctgcaccacccctctggttcacaccgcaccctgcactcacccacagcagctccatccactgggaaaactggggtttgcatcactccactgcacagtgttagtgggacctgggggcaagtcccttgacttctctgagcctcagtttccttatgtgaaagttgctggaaccaaaatggagtcacttatgccaaactctaataaaatggagtcggggggccacatagaagccctcacacacacatgcccgtaacaggatttatcacaagacacgcctgcatgtagaccagacacagggcgtatggaaagcacgtcctcaagactgtagtattccagatgagctgcagatgcttacctaccacggccgtctccaccagaaaaccatcgccaactcctgcgatcagcttgtgacttacaaaccttgtttaaaagctgcttacatggacttctgtcctttaaaagcttccccttggctgtggccctctgtgtatgcctgggatccttccaagcactcatagcccagataggaatcctctgctcctcccaaataaattcatctgttctggaaaaaaaaaaa

SEQ ID NO: 2821 - protein, 385 aa, Homo sapiens; identical to SEQ ID NO: 2819

SEQ ID NO: 2822 - DNA, 2334 bp, Homo sapiens
gtcccggccgccgggaggaagtggccgggcggtcgcagggactccggggcgaccgccgcgagtccgcagtagttcgggccatggaggcggagccgccgctctacccgatggcgggggctgcggggccgcagggcgacgaggacctgctcggggtcccggacgggcccgaggccccgctggacgagctggtgggcgcgtaccccaactacaacgaggaggaggaggagcgccgctactaccgccgcaagcgcctgggcgtgctcaagaacgtgctggctgccagcgccgggggcatgctcacctacggcgtctacctgggcctcctgcagatgcagctgatcctgcactacgacgagacctaccgcgaggtgaagtatggcaacatggggctgcccgacatcgacagcaaaatgctgatgggcatcaacgtgactcccatcgccgccctgctctacacacctgtgctcatcaggttttttggaacgaagtggatgatgttcctcgctgtgggcatctacgccctctttgtctccaccaactactgggagcgctactacacgcttgtgccctcggctgtggccctgggcatggccatcgtgcctctttgggcttccatgggcaactacatcaccaggatggcgcagaagtaccatgagtactcccactacaaggagcaggatgggcaggggatgaagcagcggcctccgcggggctcccacgcgccctatctcctggtcttccaagccatcttctacagcttcttccatctgagcttcgcctgcgcccagctgcccatgatttatttcctgaaccactacctgtatgacctgaaccacacgctgtacaatgtgcagagctgcggcaccaacagccacgggatcctcagcggcttcaacaagacggttctgcggacgctcccgcggagcggaaacctcattgtggtggagagcgtgctcatggcagtggccttcctggccatgctgctggtgctgggtttgtgcggagccgcttaccggcccacggaggagatcgatctgcgcagcgtgggctggggcaacatcttccagctgcccttcaagcacgtgcgtgactaccgcctgcgccacctcgtgcctttctttatctacagcggcttcgaggtgctctttgcctgcactggtatcgccttgggctatggcgtgtgctcggtggggctggagcggctggcttacctcctcgtggcttacagcctgggcgcctcagccgcctcactcctgggcctgctgggcctgtggctgccacgcccggtgcccctggtggccggagcaggggtgcacctgctgctcaccttcatcctctttttctgggcccctgtgcctcgggtcctgcaacacagctggatcctctatgtggcagctgccctttggggtgtgggcagtgccctgaacaagactggactcagcacactcctgggaatcttgtacgaagacaaggagagacaggacttcatcttcaccatctaccactggtggcaggctgtggccatcttcaccgtgtacctgggctcgagcctgcacatgaaggctaagctggcggtgctgctggtgacgctggtggcggccgcggtctcctacctgcggatggagcagaagctgcgccggggcgtggccccgcgccagccccgcatcccgcggccccagcacaaggtgcgcggttaccgctacttggaggaggacaactcggacgagagcgacgcggagggcgagcatggggacggcgcggaggaggaggcgccgcccgcagggcccaggcctggccccgagcccgctggactcggccgccggccctgcccgtacgaacaggcgcaggggggagacgggccggaggagcagtgaggggccgcctggtccccggactcagcctccctcctcgccggcctcagtttaccacgtctgaggtcggggggaccccctccgagtcccgcgctgtcttcaaaggcccctgtctcccctcccccacgttggggacgcccctcccagagcccaggtcacctccgggcttccgcagccccctccaaggcggagtggagccttgggaacccctcggccaagcacaggggttcgaaaatacagctgaaaccccgcgggcccttagcacgcgccccagcgccggagcacggtcagggtcttcttgcgacccggcccgctccagatccccacagctctcggccgcggacccgggccgcgtgtgagcgcactttgcacctcctatccccagggtccgccgagagccacgattttttacagaaaatgagcaataaagagattttgtactgtcaaaaaaaaaaaaaaaaaa

SEQ ID NO: 2823 - protein, 597 aa, Homo sapiens
MEAEPPLYPMAGAAGPQGDEDLLGVPDGPEAPLDELVGAYPNYNEEEEERRYYRRKRLGVLKNVLAASAGGMLTYGVYLGLLQMQLILHYDETYREVKYGNMGLPDIDSKMLMGINVTPIAALLYTPVLIRFFGTKWMMFLAVGIYALFVSTNYWERYYTLVPSAVALGMAIVPLWASMGNYITRMAQKYHEYSHYKEQDGQGMKQRPPRGSHAPYLLVFQAIFYSFFHLSFACAQLPMIYFLNHYLYDLNHTLYNVQSCGTNSHGILSGFNKTVLRTLPRSGNLIVVESVLMAVAFLAMLLVLGLCGAAYRPTEEIDLRSVGWGNIFQLPFKHVRDYRLRHLVPFFIYSGFEVLFACTGIALGYGVCSVGLERLAYLLVAYSLGASAASLLGLLGLWLPRPVPLVAGAGVHLLLTFILFFWAPVPRVLQHSWILYVAAALWGVGSALNKTGLSTLLGILYEDKERQDFIFTIYHWWQAVAIFTVYLGSSLHMKAKLAVLLVTLVAAAVSYLRMEQKLRRGVAPRQPRIPRPQHKVRGYRYLEEDNSDESDAEGEHGDGAEEEAPPAGPRPGPEPAGLGRRPCPYEQAQGGDGPEEQ

SEQ ID NO: 2824 - DNA, 2857 bp, Homo sapiens
gacatttcttaacagcagggccaccaggcagagcgggacagccaggaggaagggcagcttggcagagcctcaggatggacccccttggggacacgctgcggcgactgcgggaggccttccacgcggggcgcacgcggccagctgagttccgggctgcgcagctccaaggcctgggccgcttcctgcaagaaaacaagcagcttctgcacgacgcactggcccaggacctgcacaagtcagccttcgagtcggaggtgtctgaggttgccatcagccagggcgaggtcaccctggccctcaggaacctccgggcctggatgaaggacgagcgtgtgcccaagaacctggccacgcagctggactccgccttcatccggaaggagccctttggcctggtcctcatcattgcgccctggaactatccgctgaacctgacgctggtgcccctcgtgggagccctcgctgcagggaactgtgtggtgctgaagccatcggagattagcaagaacgtcgagaagatcctggccgaggtgctgccccaatacgtggaccagagctgctttgctgtggtgctgggcgggccccaggagacggggcagctgctagagcacaggttcgactacatcttcttcacagggagccctcgtgtgggcaagattgttatgactgctgccgccaagcacctgacacctgtcaccctggagctggggggcaagaacccttgctacgtggacgacaactgcgacccccagaccgtggccaaccgcgtggcctggttccgctacttcaacgccggccagacctgcgtggcccccgactacgtcctatgcagccctgagatgcaggagaggctgctgcctgccctgcagagcaccatcacccgtttctatggcgacgacccccagagctccccaaacctgggccgcatcatcaaccagaaacagttccagcggctgcgggcattgctgggctgcggccgtgtggccattgggggccagagcgatgagagcgatcgctacatcgcccccacggtgctggtggatgtgcaggagatggagcctgtgatgcaggaggagatcttcgggcccatcctgcccatcgtgaacgtgcagagcttggacgaggccatcgagttcatcaaccggcgggagaagcccctggccctgtacgccttctccaacagcagccaggtggtcaagcgggtgctgacccagaccagcagcgggggcttctgtgggaacgacggcttcatgcacatgaccctggccagcctgccttttggaggagtgggtgccagtgggatgggccggtaccatggcaagttctccttcgacaccttctcccaccatcgcgcctgcctcctgcgcagcccggggatggagaagctcaacgccctccgctacccgccgcaatcgccgcgccgcctgaggatgctgctggtggccatggaggcccaaggctgcagctgcacactgctctgagcccttccccaggcccaggctgtagaccaccatgacagctgtcgcctgcggctggtggagacggggcctgggctcccgggcccgaggaggaaaaggattgccaaggctccagggcacccctcaaagcagcgcctgcctcctccctcctgggtcttccctctccctgcctcagcctcctccctcagccgctcccaaccatgagagccgaggtgggaggcatgggaaacagtgcagtgactcaccccctgcccccgcaccaaccacccatattcaggagaagaggacagacacggcacctctgagtcacccctctcctgtggagcgggcgtccgaggggccctggcatctgactcaggccacaccatggaatcactgcatccaaggccattcctgccctctctgagtctcagtttttccatttgttcagtggagagaattaaccattgatacctcctggctgggtgaggcggctcacacctgtaatcccagcactttgggaggccgaggcaggcggatcacctgaaatcaggagttcaagatcagcctggctaacatggcgaaaccccgtctctactaaaaatacaaaaattagcctggcgtggtggcgcatgcctgtaatcccagctactcaggaggctaaggcaggagaatcgcttgaacccgggaggtggaggttgccgtgagctgagattgcgtcactgaactccggcctgggtgacagaaggaggctctgccttaaaaaaaaaaaaaaaaaaaacctcctgggactgttgcaaggatgaaatgaaggattgagggattgagggattgctgagctggagctccaggtgtcctatctttctcagtggggtggcacggagcggggccgcctccctcttctctccaggcaggtggggctgtggttatgcgatagggtctcccttccctccagcccatgccagaggagcttgtaactctttatcctcatggtgcccactacgagtcatactcttccccatgctgctcatcctcctgggccccatccactcagccaaagcagaatgcagggtttcctgcctgacaacccttctcacctcccaagtcccacttttgaacaagctgatgattctgaaactggcccaatttcctaacaagccggatgcttgagaaacctacatttggacaatgagaggctgctcctgcggcctgcgggccacctcctcttccttggctcctgctttctttttagactatatcaacctacaactttagtcgggaagagggacaggggtggacctgagtttcgtctcctgtctctctggctgatgtcacctgaataaagccttcttccctggcaaaaaaaaaaaaaaaaaaaaaaaaaaaaaaaaaaaaaaaaa

SEQ ID NO: 2825 - protein, 468 aa, Homo sapiens
MDPLGDTLRRLREAFHAGRTRPAEFRAAQLQGLGRFLQENKQLLHDALAQDLHKSAFESEVSEVAISQGEVTLALRNLRAWMKDERVPKNLATQLDSAFIRKEPFGLVLIIAPWNYPLNLTLVPLVGALAAGNCVVLKPSEISKNVEKILAEVLPQYVDQSCFAVVLGGPQETGQLLEHRFDYIFFTGSPRVGKIVMTAAAKHLTPVTLELGGKNPCYVDDNCDPQTVANRVAWFRYFNAGQTCVAPDYVLCSPEMQERLLPALQSTITRFYGDDPQSSPNLGRIINQKQFQRLRALLGCGRVAIGGQSDESDRYIAPTVLVDVQEMEPVMQEEIFGPILPIVNVQSLDEAIEFINRREKPLALYAFSNSSQVVKRVLTQTSSGGFCGNDGFMHMTLASLPFGGVGASGMGRYHGKFSFDTFSHHRACLLRSPGMEKLNALRYPPQSPRRLRMLLVAMEAQGCSCTLL

SEQ ID NO: 2826 - DNA, 2746 bp, Homo sapiens
gacatttcttaacagcagggccaccaggcagagcgggacagccaggaggaagggcagcttggcagagcctcaggatggacccccttggggacacgctgcggcgactgcgggaggccttccacgcggggcgcacgcggccagctgagttccgggctgcgcagctccaaggcctgggccgcttcctgcaagaaaacaagcagcttctgcacgacgcactggcccaggacctgcacaaggccacgcagctggactccgccttcatccggaaggagccctttggcctggtcctcatcattgcgccctggaactatccgctgaacctgacgctggtgcccctcgtgggagccctcgctgcagggaactgtgtggtgctgaagccatcggagattagcaagaacgtcgagaagatcctggccgaggtgctgccccaatacgtggaccagagctgctttgctgtggtgctgggcgggccccaggagacggggcagctgctagagcacaggttcgactacatcttcttcacagggagccctcgtgtgggcaagattgttatgactgctgccgccaagcacctgacacctgtcaccctggagctggggggcaagaacccttgctacgtggacgacaactgcgacccccagaccgtggccaaccgcgtggcctggttccgctacttcaacgccggccagacctgcgtggcccccgactacgtcctatgcagccctgagatgcaggagaggctgctgcctgccctgcagagcaccatcacccgtttctatggcgacgacccccagagctccccaaacctgggccgcatcatcaaccagaaacagttccagcggctgcgggcattgctgggctgcggccgtgtggccattgggggccagagcgatgagagcgatcgctacatcgcccccacggtgctggtggatgtgcaggagatggagcctgtgatgcaggaggagatcttcgggcccatcctgcccatcgtgaacgtgcagagcttggacgaggccatcgagttcatcaaccggcgggagaagcccctggccctgtacgccttctccaacagcagccaggtggtcaagcgggtgctgacccagaccagcagcgggggcttctgtgggaacgacggcttcatgcacatgaccctggccagcctgccttttggaggagtgggtgccagtgggatgggccggtaccatggcaagttctccttcgacaccttctcccaccatcgcgcctgcctcctgcgcagcccggggatggagaagctcaacgccctccgctacccgccgcaatcgccgcgccgcctgaggatgctgctggtggccatggaggcccaaggctgcagctgcacactgctctgagcccttccccaggcccaggctgtagaccaccatgacagctgtcgcctgcggctggtggagacggggcctgggctcccgggcccgaggaggaaaaggattgccaaggctccagggcacccctcaaagcagcgcctgcctcctccctcctgggtcttccctctccctgcctcagcctcctccctcagccgctcccaaccatgagagccgaggtgggaggcatgggaaacagtgcagtgactcaccccctgcccccgcaccaaccacccatattcaggagaagaggacagacacggcacctctgagtcacccctctcctgtggagcgggcgtccgaggggccctggcatctgactcaggccacaccatggaatcactgcatccaaggccattcctgccctctctgagtctcagtttttccatttgttcagtggagagaattaaccattgatacctcctggctgggtgaggcggctcacacctgtaatcccagcactttgggaggccgaggcaggcggatcacctgaaatcaggagttcaagatcagcctggctaacatggcgaaaccccgtctctactaaaaatacaaaaattagcctggcgtggtggcgcatgcctgtaatcccagctactcaggaggctaaggcaggagaatcgcttgaacccgggaggtggaggttgccgtgagctgagattgcgtcactgaactccggcctgggtgacagaaggaggctctgccttaaaaaaaaaaaaaaaaaaaacctcctgggactgttgcaaggatgaaatgaaggattgagggattgagggattgctgagctggagctccaggtgtcctatctttctcagtggggtggcacggagcggggccgcctccctcttctctccaggcaggtggggctgtggttatgcgatagggtctcccttccctccagcccatgccagaggagcttgtaactctttatcctcatggtgcccactacgagtcatactcttccccatgctgctcatcctcctgggccccatccactcagccaaagcagaatgcagggtttcctgcctgacaacccttctcacctcccaagtcccacttttgaacaagctgatgattctgaaactggcccaatttcctaacaagccggatgcttgagaaacctacatttggacaatgagaggctgctcctgcggcctgcgggccacctcctcttccttggctcctgctttctttttagactatatcaacctacaactttagtcgggaagagggacaggggtggacctgagtttcgtctcctgtctctctggctgatgtcacctgaataaagccttcttccctggcaaaaaaaaaaaaaaaaaaaaaaaaaaaaaaaaaaaaaaaaa

SEQ ID NO: 2827 - protein, 431 aa, Homo sapiens
MDPLGDTLRRLREAFHAGRTRPAEFRAAQLQGLGRFLQENKQLLHDALAQDLHKATQLDSAFIRKEPFGLVLIIAPWNYPLNLTLVPLVGALAAGNCVVLKPSEISKNVEKILAEVLPQYVDQSCFAVVLGGPQETGQLLEHRFDYIFFTGSPRVGKIVMTAAAKHLTPVTLELGGKNPCYVDDNCDPQTVANRVAWFRYFNAGQTCVAPDYVLCSPEMQERLLPALQSTITRFYGDDPQSSPNLGRIINQKQFQRLRALLGCGRVAIGGQSDESDRYIAPTVLVDVQEMEPVMQEEIFGPILPIVNVQSLDEAIEFINRREKPLALYAFSNSSQVVKRVLTQTSSGGFCGNDGFMHMTLASLPFGGVGASGMGRYHGKFSFDTFSHHRACLLRSPGMEKLNALRYPPQSPRRLRMLLVAMEAQGCSCTLL

SEQ ID NO: 2828 - DNA, 779 bp, Homo sapiens
cccgctggcccaatggcagcgtcctacagtgtagcctccgcctcccgattgactggcctgcttggcaaggcaagtagcggcggcgcttcaagatgcgctgcctgaccacgcctatgctgctgcgggccctggcccaggctgcacgtgcaggacctcctggtggccggagcctccacagcagtgcagtggcagccacctacaagtatgtgaacatgcaggatcccgagatggacatgaagtcagtgactgaccgggcagcccgcaccctgctgtggactgagctcttccgaggcctgggcatgaccctgagctacctgttccgggaaccggccaccatcaactacccgttcgagaagggcccgctgagccctcgcttccgtggggagcatgcgctgcgccggtacccatccggggaggagcgttgcattgcctgcaagctctgcgaggccatctgccccgcccaggccatcaccatcgaggctgagccaagagctgatggcagccgccggaccacccgctatgacatcgacatgaccaagtgcatctactgcggcttctgccaggaggcctgtcccgtggatgccatcgtcgagggccccaactttgagttctccacggagacccatgaggagctgctgtacaacaaggagaagttgctcaacaacggggacaagtgggaggccgagatcgccgccaacatccaggctgactacttgtatcggtgacgccccaccggcctgcagcccctgctgcccaataaaaccactccgaccccacgg

SEQ ID NO: 2829 - protein, 210 aa, Homo sapiens
MRCLTTPMLLRALAQAARAGPPGGRSLHSSAVAATYKYVNMQDPEMDMKSVTDRAARTLLWTELFRGLGMTLSYLFREPATINYPFEKGPLSPRFRGEHALRRYPSGEERCIACKLCEAICPAQAITIEAEPRADGSRRTTRYDIDMTKCIYCGFCQEACPVDAIVEGPNFEFSTETHEELLYNKEKLLNNGDKWEAEIAANIQADYLYR

SEQ ID NO: 2830 - DNA, 2700 bp, Homo sapiens
gcggcgcctagtcccgggctggcgggagtgcagttctgagtcccgcccggcgtgcgcggagcggggcagccagcagcggaggcgcggcgcgcagcacacccggggaccatgggctccatgttccggagcgaggaggtggccctggtccagctctttctgcccacagcggctgcctacacctgcgtgagtcggctgggcgagctgggcctcgtggagttcagagacctcaacgcctcggtgagcgccttccagagacgctttgtggttgatgttcggcgctgtgaggagctggagaagaccttcaccttcctgcaggaggaggtgcggcgggctgggctggtcctgcccccgccaaaggggaggctgccggcacccccaccccgggacctgctgcgcatccaggaggagacggagcgcctggcccaggagctgcgggatgtgcggggcaaccagcaggccctgcgggcccagctgcaccagctgcagctccacgccgccgtgctacgccagggccatgaacctcagctggcagccgcccacacagatggggcctcagagaggacgcccctgctccaggcccccggggggccgcaccaggacctgagggtcaactttgtggcaggtgccgtggagccccacaaggcccctgccctagagcgcctgctctggagggcctgccgcggcttcctcattgccagcttcagggagctggagcagccgctggagcaccccgtgacgggcgagccagccacgtggatgaccttcctcatctcctactggggtgagcagatcggacagaagatccgcaagatcacggactgcttccactgccacgtcttcccgtttctgcagcaggaggaggcccgcctcggggccctgcagcagctgcaacagcagagccaggagctgcaggaggtcctcggggagacagagcggttcctgagccaggtgctaggccgggtgctgcagctgctgccgccagggcaggtgcaggtccacaagatgaaggccgtgtacctggccctgaaccagtgcagcgtgagcaccacgcacaagtgcctcattgccgaggcctggtgctctgtgcgagacctgcccgccctgcaggaggccctgcgggacagctcgatggaggagggagtgagtgccgtggctcaccgcatcccctgccgggacatgccccccacactcatccgcaccaaccgcttcacggccagcttccagggcatcgtggatgcctacggcgtgggccgctaccaggaggtcaaccccgctccctacaccatcatcaccttccccttcctgtttgctgtgatgttcggggatgtgggccacgggctgctcatgttcctcttcgccctggccatggtccttgcggagaaccgaccggctgtgaaggccgcgcagaacgagatctggcagactttcttcaggggccgctacctgctcctgcttatgggcctgttctccatctacaccggcttcatctacaacgagtgcttcagtcgcgccaccagcatcttcccctcgggctggagtgtggccgccatggccaaccagtctggctggagtgatgcattcctggcccagcacacgatgcttaccctggatcccaacgtcaccggtgtcttcctgggaccctacccctttggcatcgatcctatttggagcctggctgccaaccacttgagcttcctcaactccttcaagatgaagatgtccgtcatcctgggcgtcgtgcacatggcctttggggtggtcctcggagtcttcaaccacgtgcactttggccagaggcaccggctgctgctggagacgctgccggagctcaccttcctgctgggactcttcggttacctcgtgttcctagtcatctacaagtggctgtgtgtctgggctgccagggccgcctcggcccccagcatcctcatccacttcatcaacatgttcctcttctcccacagccccagcaacaggctgctctacccccggcaggaggtggtccaggccacgctggtggtcctggccttggccatggtgcccatcctgctgcttggcacacccctgcacctgctgcaccgccaccgccgccgcctgcggaggaggcccgctgaccgacaggaggaaaacaaggccgggttgctggacctgcctgacgcatctgtgaatggctggagctccgatgaggaaaaggcagggggcctggatgatgaagaggaggccgagctcgtcccctccgaggtgctcatgcaccaggccatccacaccatcgagttctgcctgggctgcgtctccaacaccgcctcctacctgcgcctgtgggccctgagcctggcccacgcccagctgtccgaggttctgtgggccatggtgatgcgcataggcctgggcctgggccgggaggtgggcgtggcggctgtggtgctggtccccatctttgccgcctttgccgtgatgaccgtggctatcctgctggtgatggagggactctcagccttcctgcacgccctgcggctgcactgggtggaattccagaacaagttctactcaggcacgggctacaagctgagtcccttcaccttcgctgccacagatgactagggcccactgcaggtcctgccagacctccttcctgacctctgaggcaggagaggaataaagacggtccgccctggcagtgaaaaaaaaaaaaaaaaaaaa

SEQ ID NO: 2831 - protein, 830 aa, Homo sapiens
MGSMFRSEEVALVQLFLPTAAAYTCVSRLGELGLVEFRDLNASVSAFQRRFVVDVRRCEELEKTFTFLQEEVRRAGLVLPPPKGRLPAPPPRDLLRIQEETERLAQELRDVRGNQQALRAQLHQLQLHAAVLRQGHEPQLAAAHTDGASERTPLLQAPGGPHQDLRVNFVAGAVEPHKAPALERLLWRACRGFLIASFRELEQPLEHPVTGEPATWMTFLISYWGEQIGQKIRKITDCFHCHVFPFLQQEEARLGALQQLQQQSQELQEVLGETERFLSQVLGRVLQLLPPGQVQVHKMKAVYLALNQCSVSTTHKCLIAEAWCSVRDLPALQEALRDSSMEEGVSAVAHRIPCRDMPPTLIRTNRFTASFQGIVDAYGVGRYQEVNPAPYTIITFPFLFAVMFGDVGHGLLMFLFALAMVLAENRPAVKAAQNEIWQTFFRGRYLLLLMGLFSIYTGFIYNECFSRATSIFPSGWSVAAMANQSGWSDAFLAQHTMLTLDPNVTGVFLGPYPFGIDPIWSLAANHLSFLNSFKMKMSVILGVVHMAFGVVLGVFNHVHFGQRHRLLLETLPELTFLLGLFGYLVFLVIYKWLCVWAARAASAPSILIHFINMFLFSHSPSNRLLYPRQEVVQATLVVLALAMVPILLLGTPLHLLHRHRRRLRRRPADRQEENKAGLLDLPDASVNGWSSDEEKAGGLDDEEEAELVPSEVLMHQAIHTIEFCLGCVSNTASYLRLWALSLAHAQLSEVLWAMVMRIGLGLGREVGVAAVVLVPIFAAFAVMTVAILLVMEGLSAFLHALRLHWVEFQNKFYSGTGYKLSPFTFAATDD

SEQ ID NO: 2832 - DNA, 2480 bp, Homo sapiens
ggacgcccctgctccaggcccccggggggccgcaccaggacctgagggtcaagtgagtgagggatgacctcatgccctttctggccagcccagaacccctggccagtcgctgggctgggccaggctgagctccgactccttgtccagtgctctccccaggctggccccgcctcctccttcaggcccggaacttcccacagtcccaagccctagccctagggggttctcctcttctggtcctgcccgggaggcctcctgccttcccctgtgggcagggccagtgtgcccaattgcccgattgcccgtgctgggcagggtcctgcccggggggcctggtgggggaggcagggcaggaggttggagcagccctgcccagccccgtggccgccagctttgtggcaggtgccgtggagccccacaaggcccctgccctagagcgcctgctctggagggcctgccgcggcttcctcattgccagcttcagggagctggagcagccgctggagcaccccgtgacgggcgagccagccacgtggatgaccttcctcatctcctactggggtgagcagatcggacagaagatccgcaagatcacggactgcttccactgccacgtcttcccgtttctgcagcaggaggaggcccgcctcggggccctgcagcagctgcaacagcagagccaggagctgcaggaggtcctcggggagacagagcggttcctgagccaggtgctaggccgggtgctgcagctgctgccgccagggcaggtgcaggtccacaagatgaaggccgtgtacctggccctgaaccagtgcagcgtgagcaccacgcacaagtgcctcattgccgaggcctggtgctctgtgcgagacctgcccgccctgcaggaggccctgcgggacagctcgatggaggagggagtgagtgccgtggctcaccgcatcccctgccgggacatgccccccacactcatccgcaccaaccgcttcacggccagcttccagggcatcgtggatgcctacggcgtgggccgctaccaggaggtcaaccccgctccctacaccatcatcaccttccccttcctgtttgctgtgatgttcggggatgtgggccacgggctgctcatgttcctcttcgccctggccatggtccttgcggagaaccgaccggctgtgaaggccgcgcagaacgagatctggcagactttcttcaggggccgctacctgctcctgcttatgggcctgttctccatctacaccggcttcatctacaacgagtgcttcagtcgcgccaccagcatcttcccctcgggctggagtgtggccgccatggccaaccagtctggctggagtgatgcattcctggcccagcacacgatgcttaccctggatcccaacgtcaccggtgtcttcctgggaccctacccctttggcatcgatcctatttggagcctggctgccaaccacttgagcttcctcaactccttcaagatgaagatgtccgtcatcctgggcgtcgtgcacatggcctttggggtggtcctcggagtcttcaaccacgtgcactttggccagaggcaccggctgctgctggagacgctgccggagctcaccttcctgctgggactcttcggttacctcgtgttcctagtcatctacaagtggctgtgtgtctgggctgccagggccgcctcggcccccagcatcctcatccacttcatcaacatgttcctcttctcccacagccccagcaacaggctgctctacccccggcaggaggtggtccaggccacgctggtggtcctggccttggccatggtgcccatcctgctgcttggcacacccctgcacctgctgcaccgccaccgccgccgcctgcggaggaggcccgctgaccgacaggaggaaaacaaggccgggttgctggacctgcctgacgcatctgtgaatggctggagctccgatgaggaaaaggcagggggcctggatgatgaagaggaggccgagctcgtcccctccgaggtgctcatgcaccaggccatccacaccatcgagttctgcctgggctgcgtctccaacaccgcctcctacctgcgcctgtgggccctgagcctggcccacgcccagctgtccgaggttctgtgggccatggtgatgcgcataggcctgggcctgggccgggaggtgggcgtggcggctgtggtgctggtccccatctttgccgcctttgccgtgatgaccgtggctatcctgctggtgatggagggactctcagccttcctgcacgccctgcggctgcactgggtggaattccagaacaagttctactcaggcacgggctacaagctgagtcccttcaccttcgctgccacagatgactagggcccactgcaggtcctgccagacctccttcctgacctctgaggcaggagaggaataaagacggtccgccctggcagtgaaaaaaaaaaaaaaaaaaaa

SEQ ID NO: 2833 - protein, 614 aa, Homo sapiens
MTFLISYWGEQIGQKIRKITDCFHCHVFPFLQQEEARLGALQQLQQQSQELQEVLGETERFLSQVLGRVLQLLPPGQVQVHKMKAVYLALNQCSVSTTHKCLIAEAWCSVRDLPALQEALRDSSMEEGVSAVAHRIPCRDMPPTLIRTNRFTASFQGIVDAYGVGRYQEVNPAPYTIITFPFLFAVMFGDVGHGLLMFLFALAMVLAENRPAVKAAQNEIWQTFFRGRYLLLLMGLFSIYTGFIYNECFSRATSIFPSGWSVAAMANQSGWSDAFLAQHTMLTLDPNVTGVFLGPYPFGIDPIWSLAANHLSFLNSFKMKMSVILGVVHMAFGVVLGVFNHVHFGQRHRLLLETLPELTFLLGLFGYLVFLVIYKWLCVWAARAASAPSILIHFINMFLFSHSPSNRLLYPRQEVVQATLVVLALAMVPILLLGTPLHLLHRHRRRLRRRPADRQEENKAGLLDLPDASVNGWSSDEEKAGGLDDEEEAELVPSEVLMHQAIHTIEFCLGCVSNTASYLRLWALSLAHAQLSEVLWAMVMRIGLGLGREVGVAAVVLVPIFAAFAVMTVAILLVMEGLSAFLHALRLHWVEFQNKFYSGTGYKLSPFTFAATDD

SEQ ID NO: 2834 - DNA, 2733 bp, Homo sapiens
ggcagaggagcgagtgcagcggccagcagcacatccccgctccacagtcgccgcagtcgccgcagccgccgccgccgccccgcgcgcccaaccgccgcggccccctgccccgccggcctgccagtgagagagcggcgagggggcgcccggccggactctgagcctagtcctctcgcgctgcggccgcccgcgcctcctcggccgcctgtcgggcatgaaaaccaaattctgcaccgggggcgaggcggagccctcgccgctcgggctgctgctgagctgcggtagcggcagcgcggccccggcgcccggcgtggggcagcagcgcgacgccgccagcgacctcgagtccaagcagctgggcggccaacagccgccgctcgcgctgccccctccgccgccgctgccgctgccgctgccgctgccccagcccccgccgccgcagccgcccgcagacgagcagccggagccccggacgcggcgcagggcctatctgtggtgcaaggagttcctgcccggcgcctggcggggcctccgcgaggacgagttccacatcagtgtcatcagaggcggccttagcaacatgctgttccagtgctccctacctgacaccacagccacccttggtgatgagcctcggaaagtgctcctgcggctgtatggagcgattttgcagatgaggtcctgtaataaagagggatccgaacaagctcagaaagaaaatgaatttcaaggggctgaggccatggttctggagagcgttatgtttgccattctcgcagagaggtcacttgggccaaaactctatggcatctttccccaaggccgactggagcagttcatcccgagccggcgattagatactgaagaattaagtttgccagatatttctgcagaaatcgccgagaaaatggctacatttcatggtatgaaaatgccattcaataaggaaccaaaatggctttttggcacaatggaaaagtatctaaaggaagtgctgagaattaaatttactgaggaatccagaattaaaaagctccacaaattgctcagttacaatctgcccttggaactggaaaacctgagatcattgcttgaatctactccatctccagttgtattttgtcataatgactgtcaagaaggtaatatcttgttgctggaaggccgagagaattctgaaaaacagaaactgatgctcattgatttcgaatacagcagttacaattacaggggattcgacattggaaatcacttctgtgagtggatgtatgattatagctatgaaaaatacccttttttcagagcaaacatccggaagtatcccaccaagaaacaacagctccattttatttccagttacttgcctgcattccaaaatgactttgaaaacctcagtactgaagaaaaatccattataaaagaagaaatgttgcttgaagttaataggtttgcccttgcatctcatttcctctggggactgtggtccattgtacaagccaagatttcatctattgaatttgggtacatggactacgcccaagcaaggtttgatgcctatttccaccagaagaggaagcttggggtgtgactgtggggaggactccatccacctcatcactggactgcatggggaggcagcagagcggggtcccctctgtgcttcgactactgctcctgtggcaggaggctttgggtggctcactactgaacacatgtgtatgatactaaagacggtattaaaatggagcgacgtttatttcatctcttgtttacgatttcactaggactcagaaacgagatcgggaagcagaaatatagtgcaatagtgcaacatctctgaatccttttaatctagagaaggcatttcatatttgggggctaaggtttccagtcagatgaggcaaacagcaagagtaagcagtgttacttgcaggtactttggttaatgttgatttaaattttcatgaatgtgctggtgaacactgtgaccaggcttttgtagatggcgatgtgttatagacggtgctcactcccaagggacagcaagtgagcagagatgtactgcaaagtcgccagtcactgctgcaaggtggcctctgcctggggcctccagaagctgctcctttaccctcttggtcccatggctgaagctggagcagcggattgctctggagcagccaaggccgccagcgtgtggagcagagctctcccctcctgctgggcgtgtgtgacactgatgagtttcactgtactgcatgtgacttctcccctgcccttcctcctgatggagtgtgcagacagccatgcgtggccacgggggcagtgtgaggacctccctgtctcccggctcccctcccaggggagccagctgcttgacctagctctttgggcctctcctgccctctgctctgcctggagtgtcggatcctgtgagtaggctgggcctcccctgggcagggttctccaagggcccggtttcccggcccttacctttcctgatgcccctgacatcatcattcttgtgggagacagcagcctgtatgtggtgtggggcgtggatcgagtgtagctgtgaaatccatatatatgaaatgtcctgcgggatacagtcttagctgacttttttttactctgaactcttatttgaattgttttttgtgcatatatttctgctaccacagagattgtactatacaaataaaaaaataaaaacccaaaaaaaaaaaaaaaaaa

SEQ ID NO: 2835 - protein, 457 aa, Homo sapiens
MKTKFCTGGEAEPSPLGLLLSCGSGSAAPAPGVGQQRDAASDLESKQLGGQQPPLALPPPPPLPLPLPLPQPPPPQPPADEQPEPRTRRRAYLWCKEFLPGAWRGLREDEFHISVIRGGLSNMLFQCSLPDTTATLGDEPRKVLLRLYGAILQMRSCNKEGSEQAQKENEFQGAEAMVLESVMFAILAERSLGPKLYGIFPQGRLEQFIPSRRLDTEELSLPDISAEIAEKMATFHGMKMPFNKEPKWLFGTMEKYLKEVLRIKFTEESRIKKLHKLLSYNLPLELENLRSLLESTPSPVVFCHNDCQEGNILLLEGRENSEKQKLMLIDFEYSSYNYRGFDIGNHFCEWMYDYSYEKYPFFRANIRKYPTKKQQLHFISSYLPAFQNDFENLSTEEKSIIKEEMLLEVNRFALASHFLWGLWSIVQAKISSIEFGYMDYAQARFDAYFHQKRKLGV

SEQ ID NO: 2836 - DNA, 2679 bp, Homo sapiens
ggcagaggagcgagtgcagcggccagcagcacatccccgctccacagtcgccgcagtcgccgcagccgccgccgccgccccgcgcgcccaaccgccgcggccccctgccccgccggcctgccagtgagagagcggcgagggggcgcccggccggactctgagcctagtcctctcgcgctgcggccgcccgcgcctcctcggccgcctgtcgggcatgaaaaccaaattctgcaccgggggcgaggcggagccctcgccgctcgggctgctgctgagctgcggtagcggcagcgcggccccggcgcccggcgtggggcagcagcgcgacgccgccagcgacctcgagtccaagcagctgggcggccaacagccgccgctcgcgctgccccctccgccgccgctgccgctgccgctgccgctgccccagcccccgccgccgcagccgcccgcagacgagcagccggagccccggacgcggcgcagggcctatctgtggtgcaaggagttcctgcccggcgcctggcggggcctccgcgaggacgagttccacatcagtgtcatcagaggcggccttagcaacatgctgttccagtgctccctacctgacaccacagccacccttggtgatgagcctcggaaagtgctcctgcggctgtatggagcgattttgcagatgggggctgaggccatggttctggagagcgttatgtttgccattctcgcagagaggtcacttgggccaaaactctatggcatctttccccaaggccgactggagcagttcatcccgagccggcgattagatactgaagaattaagtttgccagatatttctgcagaaatcgccgagaaaatggctacatttcatggtatgaaaatgccattcaataaggaaccaaaatggctttttggcacaatggaaaagtatctaaaggaagtgctgagaattaaatttactgaggaatccagaattaaaaagctccacaaattgctcagttacaatctgcccttggaactggaaaacctgagatcattgcttgaatctactccatctccagttgtattttgtcataatgactgtcaagaaggtaatatcttgttgctggaaggccgagagaattctgaaaaacagaaactgatgctcattgatttcgaatacagcagttacaattacaggggattcgacattggaaatcacttctgtgagtggatgtatgattatagctatgaaaaatacccttttttcagagcaaacatccggaagtatcccaccaagaaacaacagctccattttatttccagttacttgcctgcattccaaaatgactttgaaaacctcagtactgaagaaaaatccattataaaagaagaaatgttgcttgaagttaataggtttgcccttgcatctcatttcctctggggactgtggtccattgtacaagccaagatttcatctattgaatttgggtacatggactacgcccaagcaaggtttgatgcctatttccaccagaagaggaagcttggggtgtgactgtggggaggactccatccacctcatcactggactgcatggggaggcagcagagcggggtcccctctgtgcttcgactactgctcctgtggcaggaggctttgggtggctcactactgaacacatgtgtatgatactaaagacggtattaaaatggagcgacgtttatttcatctcttgtttacgatttcactaggactcagaaacgagatcgggaagcagaaatatagtgcaatagtgcaacatctctgaatccttttaatctagagaaggcatttcatatttgggggctaaggtttccagtcagatgaggcaaacagcaagagtaagcagtgttacttgcaggtactttggttaatgttgatttaaattttcatgaatgtgctggtgaacactgtgaccaggcttttgtagatggcgatgtgttatagacggtgctcactcccaagggacagcaagtgagcagagatgtactgcaaagtcgccagtcactgctgcaaggtggcctctgcctggggcctccagaagctgctcctttaccctcttggtcccatggctgaagctggagcagcggattgctctggagcagccaaggccgccagcgtgtggagcagagctctcccctcctgctgggcgtgtgtgacactgatgagtttcactgtactgcatgtgacttctcccctgcccttcctcctgatggagtgtgcagacagccatgcgtggccacgggggcagtgtgaggacctccctgtctcccggctcccctcccaggggagccagctgcttgacctagctctttgggcctctcctgccctctgctctgcctggagtgtcggatcctgtgagtaggctgggcctcccctgggcagggttctccaagggcccggtttcccggcccttacctttcctgatgcccctgacatcatcattcttgtgggagacagcagcctgtatgtggtgtggggcgtggatcgagtgtagctgtgaaatccatatatatgaaatgtcctgcgggatacagtcttagctgacttttttttactctgaactcttatttgaattgttttttgtgcatatatttctgctaccacagagattgtactatacaaataaaaaaataaaaacccaaaaaaaaaaaaaaaaaa

SEQ ID NO: 2837 - protein, 439 aa, Homo sapiens
MKTKFCTGGEAEPSPLGLLLSCGSGSAAPAPGVGQQRDAASDLESKQLGGQQPPLALPPPPPLPLPLPLPQPPPPQPPADEQPEPRTRRRAYLWCKEFLPGAWRGLREDEFHISVIRGGLSNMLFQCSLPDTTATLGDEPRKVLLRLYGAILQMGAEAMVLESVMFAILAERSLGPKLYGIFPQGRLEQFIPSRRLDTEELSLPDISAEIAEKMATFHGMKMPFNKEPKWLFGTMEKYLKEVLRIKFTEESRIKKLHKLLSYNLPLELENLRSLLESTPSPVVFCHNDCQEGNILLLEGRENSEKQKLMLIDFEYSSYNYRGFDIGNHFCEWMYDYSYEKYPFFRANIRKYPTKKQQLHFISSYLPAFQNDFENLSTEEKSIIKEEMLLEVNRFALASHFLWGLWSIVQAKISSIEFGYMDYAQARFDAYFHQKRKLGV

SEQ ID NO: 2838 - DNA, 2711 bp, Homo sapiens
ggtgctgcggcccgcgccgccatcttggattttactctccatttttctctggaattatttttggtgattaattttctgggggggactgggacgcggggcccggcggcgcggccccgcatcgcagcggccgggcagcggggcctgggacgcgccccgaggaggagcggggcggcgcaggcggagagaacattgaaagtattctctaagctatttgaagagagtgactaaatgcacctgggtcaggctgtctgtgggtatgaagtggttgggagaatccaagaacatggtggtgaatggcaggagaaatggaggcaagttgtctaatgaccatcagcagaatcaatcaaaattacagcacacggggaaggacaccctgaaggctggcaaaaatgcagtcgagaggaggtcgaacagatgtaatggtaactcgggatttgaaggacagagtcgctatgtaccatcctctggaatgtccgccaaggaactctgtgaaaatgatgacctagcaaccagtttggttcttgatccctatttaggttttcaaacacacaaaatgaatactagcgcctttccttcgaggagctcaaggcatttttcaaaatctgacagtttttctcacaacaaccctgtgagatttaggcctattaaaggaaggcaggaagaactaaaggaagtaattgaacgttttaagaaagatgaacacttggagaaagccttcaaatgtttgacttcaggcgaatgggcacggcactattttctcaacaagaataaaatgcaggagaaattattcaaagaacatgtatttatttatttgcgaatgtttgcaactgacagtggatttgaaatattgccatgtaatagatactcatcagaacaaaatggagccaaaatagttgcaacaaaagagtggaaacgaaatgacaaaatagaattactggtgggttgtattgccgaactttcagaaattgaggagaacatgctacttagacatggagaaaacgacttcagtgtcatgtactccacaaggaaaaactgtgctcaactctggctgggtcctgctgcgtttataaaccatgattgcagacctaattgtaagtttgtgtcaactggtcgagatacagcatgtgtgaaggctctaagagacattgaacctggagaagaaatttcttgttattatggagatgggttctttggagaaaataatgagttctgcgagtgttacacttgcgaaagacggggcactggtgcttttaaatccagagtgggactgcctgcgcctgctcctgttatcaatagcaaatatggactcagagaaacagataaacgtttaaataggcttaaaaagttaggtgacagcagcaaaaattcagacagtcaatctgtcagctctaacactgatgcagataccactcaggaaaaaaacaatgcaagtaagtaagggagatttgataagcatatcttttaaaagtattttcacacaatttgctttataaagtgtgcttcagtagttttaaacttttaaatactcagagagactgggacttgtgagctttggctgcacttcaaggctctagacgtgatttgagtagaggcacagtctgtatcccatctctaacttcagtaccgtcctctagactatttttcttgaataccttggtaactggatatgagttcttcatcatatgttccaaggtcatcatatgttttaaacattttcaaggtgttagagactgtgatgatgtcgctaagtcctgcaagaagacaaaaggactgagtagaattaaattagactctatacattccagtgcctagccagtttgttagaaaagatgatggacttggggaattcatagcttctggccttaaggcttccaccttttcattgcttgctgacctttttcaaaacgaactgactcagttcagcagaccaccagtaccagactcagaattgtgatagaggagcattttgaacagtgccgtattgtgacatgctgtattggctactccagaaagtaggagtaaagatggaaaggagaaagaagcaacctctgagattccagtggtgtgtgggggcaagatctgatggaaactgaaaaagagaacgaagactaaacaaagagaaaggaaagagaagaaaccctaaatgggcaaaggaaagcacatcctgtttgcggagctttgaaatattggaaccatttctaattgctcctgtttttctgggtaacaccagttttctgtagttgccactaaagcagtagactcttgagtctcacttgtctctgagagagacagaagttagaaagttttgacttggcgattccgaaagtatgcctttgttggcacttaaatgtccagtgagacttcttggcaccttagagccctctgagatactgattattttaggttcttctccctactttcagatgttttcagcccaacactgggtgctctcttccactacagagaatcctgaagaaaagggaaggtgtttcccatgatggtgaatgtcactgccatgaattcctgaatctacctgctgctgggagtcagagtccaagcataacccgtgtagcataaaagcagcgctgtagccctattccagtctttttcgttaatgtccagagtgaacaacaagagttagtcaatcattaactgttgactgttgattctcataataaatgcagcataacgacaaaaaaaaaaaaaaaaaa

SEQ ID NO: 2839 - protein, 393 aa, Homo sapiens
MKWLGESKNMVVNGRRNGGKLSNDHQQNQSKLQHTGKDTLKAGKNAVERRSNRCNGNSGFEGQSRYVPSSGMSAKELCENDDLATSLVLDPYLGFQTHKMNTSAFPSRSSRHFSKSDSFSHNNPVRFRPIKGRQEELKEVIERFKKDEHLEKAFKCLTSGEWARHYFLNKNKMQEKLFKEHVFIYLRMFATDSGFEILPCNRYSSEQNGAKIVATKEWKRNDKIELLVGCIAELSEIEENMLLRHGENDFSVMYSTRKNCAQLWLGPAAFINHDCRPNCKFVSTGRDTACVKALRDIEPGEEISCYYGDGFFGENNEFCECYTCERRGTGAFKSRVGLPAPAPVINSKYGLRETDKRLNRLKKLGDSSKNSDSQSVSSNTDADTTQEKNNASK

SEQ ID NO: 2840 - DNA, 4562 bp, Homo sapiens
ggtgctgcggcccgcgccgccatcttggattttactctccatttttctctggaattatttttggtgattaattttctgggggggactgggacgcggggcccggcggcgcggccccgcatcgcagcggccgggcagcggggcctgggacgcgccccgaggaggagcggggcggcgcaggcggagagaacattgaaagtattctctaagctatttgaagagagtgactaaatgcacctgggtcaggctgtctgtgggtatgaagtggttgggagaatccaagaacatggtggtgaatggcaggagaaatggaggcaagttgtctaatgaccatcagcagaatcaatcaaaattacagcacacggggaaggacaccctgaaggctggcaaaaatgcagtcgagaggaggtcgaacagatgtaatggtaactcgggatttgaaggacagagtcgctatgtaccatcctctggaatgtccgccaaggaactctgtgaaaatgatgacctagcaaccagtttggttcttgatccctatttaggttttcaaacacacaaaatgaatactagcgcctttccttcgaggagctcaaggcatttttcaaaatctgacagtttttctcacaacaaccctgtgagatttaggcctattaaaggaaggcaggaagaactaaaggaagtaattgaacgttttaagaaagatgaacacttggagaaagccttcaaatgtttgacttcaggcgaatgggcacggcactattttctcaacaagaataaaatgcaggagaaattattcaaagaacatgtatttatttatttgcgaatgtttgcaactgacagtggatttgaaatattgccatgtaatagatactcatcagaacaaaatggagccaaaatagttgcaacaaaagagtggaaacgaaatgacaaaatagaattactggtgggttgtattgccgaactttcagaaattgaggagaacatgctacttagacatggagaaaacgacttcagtgtcatgtactccacaaggaaaaactgtgctcaactctggctgggtcctgctgcgtttataaaccatgattgcagacctaattgtaagtttgtgtcaactggtcgagatacagcatgtgtgaaggctctaagagacattgaacctggagaagaaatttcttgttattatggagatgggttctttggagaaaataatgagttctgcgagtgttacacttgcgaaagacggggcactggtgcttttaaatccagagtgggactgcctgcgcctgctcctgttatcaatagcaaatatggactcagagaaacagataaacgtttaaataggcttaaaaagttaggtgacagcagcaaaaattcagacagtcaatctgtcagctctaacactgatgcagataccactcaggaaaaaaacaatgcaacttctaaccgaaaatcttcagttggcgtaaaaaagaatagcaagagcagaacgttaacgaggcaatctatgtcaagaattccagcttcttccaactctacctcatctaagctaactcatataaataattccagggtaccaaagaaactgaagaagcctgcaaagcctttactttcaaagataaaattgagaaatcattgcaagcggctggagcaaaagaatgcttcaagaaaactcgaaatgggaaacttagtactgaaagagcctaaagtagttctgtataaaaatttgcccattaaaaaagataaggagccagagggaccagcccaagccgcagttgccagcgggtgcttgactagacacgcggcgagagaacacagacagaatcctgtgagaggtgctcattcgcagggggagagctcgccctgcacctacataactcggcggtcagtgaggacaagaacaaatctgaaggaggcctctgacatcaagcttgaaccaaatacgttgaatggctataaaagcagtgtgacggaaccttgccccgacagtggtgaacagctgcagccagctcctgtgctgcaggaggaagaactggctcatgagactgcacaaaaaggggaggcaaagtgtcataagagtgacacaggcatgtccaaaaagaagtcacgacaaggaaaacttgtgaaacagtttgcaaaaatagaggaatctactccagtgcacgattctcctggaaaagacgacgcggtaccagatttgatgggtccccattctgaccagggtgagcacagtggcactgtgggcgtgcctgtgagctacacagactgtgctccttcacccgtcggttgttcagttgtgacatcagatagcttcaaaacaaaagacagctttagaactgcaaaaagtaaaaagaagaggcgaatcacaaggtatgatgcacagttaatcctagaaaataactctgggattcccaaattgactcttcgtaggcgtcatgatagcagcagcaaaacaaatgaccaagagaatgatggaatgaactcttccaaaataagcatcaagttaagcaaagaccatgacaacgataacaatctctatgtagcaaagcttaataatggatttaactcaggatcaggcagtagttctacaaaattaaaaatccagctaaaacgagatgaggaaaatagggggtcttatacagaggggcttcatgaaaatggggtgtgctgcagtgatcctctttctctcttggagtctcgaatggaggtggatgactatagtcagtatgaggaagaaagtacagatgattcctcctcttctgagggcgatgaagaggaggatgactatgatgatgactttgaagacgattttattcctcttcctccagctaagcgcttgaggttaatagttggaaaagactctatagatattgacatttcttcaaggagaagagaagatcagtctttaaggcttaatgcctaagctcttggtcttaacttgacctgggataactactttaaagaaataaaaaattccagtcaattattcctcaactgaaagtttagtggcagcacttctattgtcccttcacttatcagcatactattgtagaaagtgtacagcatactgactcaattcttaagtctgatttgtgcaaatttttatcgtactttttaaatagccttcttacgtgcaattctgagttagaggtaaagccctgttgtaaaataaaggctcaagcaaaattgtacagtgatagcaactttccacacaggacgttgaaaacagtaatgtggctacacagtttttttaactgtaagagcatcagctggctctttaatatatgactaaacaataatttaaaacaaatcatagtagcagcatattaagggtttctagtatgctaatatcaccagcaatgatctttggctttttgatttatttgctagatgtttcccccttggagttttgtcagtttcacactgtttgctggcccaggtgtactgtttgtggcctttgttaatatcgcaaaccattggttgggagtcagattggtttcttaaaaaaaaaaaaaaaatgacatacgtgacagctcacttttcagttcattatatgtacgagggtagcagtgtgtgggatgaggttcgatacagcgtatttattgcttgtcatgtaaattaaaaaccttgtatttaactcttttcaatccttttagataaaattgttctttgcaagaatgattggtgcttattttttcaaaaatttgctgtgaacaacgtgatgacaacaagcaacatttatctaatgaactacagctatcttaatttggttcttcaagttttctgttgcacttgtaaaatgctacaaggaatattaaaaaaatctattcactttaacttataatagtttatgaaataaaaacatgagtcacagcttttgttctgtggtaacctataaaaaaagtttgtctttgagattcaatgtaaagaactgaaaacaatgtatatgttgtaaatatttgtgtgttgtgagaaatttttgtcataagaaattaaaagaacttaccaggaaggtttttaagtttagaaatattcatgccaataaaataggaaattataaatatatagttttaagcactgcatcagtgggagttcttggcttatgttagtttatgttagtttattatgaaaacatcaaagatttttttgactatattatcagttaaacaaaaaggagtcagatttaatttgttttttgaagcactttgagaaattaattttaattaacttaatgagcaaatttttattactactttatgttcaataccaggttcttttcatttctctggattattttgcaaatcattggacagagaatttgggaatataaatctgtaacaggtgtttgacaccagtaggtctctttatttctgggaaatgtgtacctgtactttctgatatacagtgttcctaagtaaaaatcaattcaggggatttgtatagtgtctataggaaagtagcccatgtcttgaaatatgaaaaggaatctgaaggtcatgaaaagtccagtggagaaaatctcaatgcttactgttactactaattgattcctactagtttccaggtttggg

SEQ ID NO: 2841 - protein, 885 aa, Homo sapiens
MKWLGESKNMVVNGRRNGGKLSNDHQQNQSKLQHTGKDTLKAGKNAVERRSNRCNGNSGFEGQSRYVPSSGMSAKELCENDDLATSLVLDPYLGFQTHKMNTSAFPSRSSRHFSKSDSFSHNNPVRFRPIKGRQEELKEVIERFKKDEHLEKAFKCLTSGEWARHYFLNKNKMQEKLFKEHVFIYLRMFATDSGFEILPCNRYSSEQNGAKIVATKEWKRNDKIELLVGCIAELSEIEENMLLRHGENDFSVMYSTRKNCAQLWLGPAAFINHDCRPNCKFVSTGRDTACVKALRDIEPGEEISCYYGDGFFGENNEFCECYTCERRGTGAFKSRVGLPAPAPVINSKYGLRETDKRLNRLKKLGDSSKNSDSQSVSSNTDADTTQEKNNATSNRKSSVGVKKNSKSRTLTRQSMSRIPASSNSTSSKLTHINNSRVPKKLKKPAKPLLSKIKLRNHCKRLEQKNASRKLEMGNLVLKEPKVVLYKNLPIKKDKEPEGPAQAAVASGCLTRHAAREHRQNPVRGAHSQGESSPCTYITRRSVRTRTNLKEASDIKLEPNTLNGYKSSVTEPCPDSGEQLQPAPVLQEEELAHETAQKGEAKCHKSDTGMSKKKSRQGKLVKQFAKIEESTPVHDSPGKDDAVPDLMGPHSDQGEHSGTVGVPVSYTDCAPSPVGCSVVTSDSFKTKDSFRTAKSKKKRRITRYDAQLILENNSGIPKLTLRRRHDSSSKTNDQENDGMNSSKISIKLSKDHDNDNNLYVAKLNNGFNSGSGSSSTKLKIQLKRDEENRGSYTEGLHENGVCCSDPLSLLESRMEVDDYSQYEEESTDDSSSSEGDEEEDDYDDDFEDDFIPLPPAKRLRLIVGKDSIDIDISSRRREDQSLRLNA

SEQ ID NO: 2842 - DNA, 2050 bp, Homo sapiens
gcctgggttgcgctgccggccacgtccccgcgccgggcctcaggctccttcctactgtccgagggccaccaggccgccgggggcctgctgcgcccggatgcgtctgttactagagtggagagtctaccttcgtctcacatgtgccacaaaggatggcatggcccgggagtgccccaccacgtggctttcaccccctgcaaagccagacttcgcccagcgacacagtgtcaagcccacagctctccaaggaggaagatggtccaggctgggagcatccccttagcagcagcctctgatcccttggccaagcaggagggaaccattagcagcctgaggagctggctggctgggagcctcggggaccgcccagccttgctcccagctcacccacaagatgtggacagctcttgtgctcatttggattttctccttgtccttatctgaaagccatgcggcatccaacgatccacgcaactttgtccctaacaaaatgtggaagggattagtcaagaggaatgcatctgtggaaacagttgataataaaacgtctgaggatgtaaccatggcagcagcttctcctgtcacattgaccaaagggacttcggcagcccacctcaactctatggaagtcacaacagaggacacaagcaggacagatgtgagtgaaccagcaacttcaggaggtgcagctgatggtgtgacctccattgctcccacggctgtggcctccagtacgactgcggcctccattacgactgcggcctccagtatgactgtggcctccagtgctcccacgactgcagcctccagtacaactgtggcctccattgctcccacgactgcagcctccagtatgactgcggcctccagcactcccatgacacttgcactccccgcgcccacgtccacttccacagggcggaccccgtccactaccgccactgggcatccatctctcagcacagccctcgcacaagtgccaaagagcagcgcgttgccaagaacagcaaccctggccacattggccacacgtgctcagactgtagcgaccacagcaaacacaagcagccccatgagcactcgtccaagtccttccaagcacatgcccagtgacaccgcggcaagccctgtaccccctatgcgtccccaagcacaaggtcccattagccaggtgtcagtggaccagcctgtggttaacacaacaaataaatccacacccatgccctcaaacacaaccccagagcccgcccccacccccacagtggtgaccaccaccaaggcacaagccagggagccaactgccagcccagtgccagtacctcacaccagcccaatccctgagatggaggccatgtcccccacgacacagccaagccccatgccatatacccagagggccgctgggccaggcacatcccaggcaccggagcaggtagagactgaagccacaccaggtactgattccactgggccaacacccaggagctcagggggcactaagatgccagccacggactcgtgccagcccagcacccaaggccagtacatggtggtcaccactgagcccctcacccaggccgtggtagacaaaactctccttctggtggtgctgttactcggggtgacccttttcatcacagtcttggttttgtttgccctgcaggcctatgagagctacaagaagaaggactacacccaggtggactacttaatcaacgggatgtatgcggactcagaaatgtgaggggggcgggggcctggcgggaggcctggccccttcctcgtcctttccttttgcctttgagaccaaaccaagtgcttccaaattcttttggtgcaattgaggagatatgccagatgcttaaacacatttaattgctgtcagattaattccatgatcactaaagagttgctgcttttttcatatttatttttgtaaatgattctgtgcccaggagcagctgggggttccacctcagggtggggcgggcaggaccccgtctccccaggtgtcggagcctgacctgaattaaagtactgactgctcgcc

SEQ ID NO: 2843 - protein, 449 aa, Homo sapiens
MWTALVLIWIFSLSLSESHAASNDPRNFVPNKMWKGLVKRNASVETVDNKTSEDVTMAAASPVTLTKGTSAAHLNSMEVTTEDTSRTDVSEPATSGGAADGVTSIAPTAVASSTTAASITTAASSMTVASSAPTTAASSTTVASIAPTTAASSMTAASSTPMTLALPAPTSTSTGRTPSTTATGHPSLSTALAQVPKSSALPRTATLATLATRAQTVATTANTSSPMSTRPSPSKHMPSDTAASPVPPMRPQAQGPISQVSVDQPVVNTTNKSTPMPSNTTPEPAPTPTVVTTTKAQAREPTASPVPVPHTSPIPEMEAMSPTTQPSPMPYTQRAAGPGTSQAPEQVETEATPGTDSTGPTPRSSGGTKMPATDSCQPSTQGQYMVVTTEPLTQAVVDKTLLLVVLLLGVTLFITVLVLFALQAYESYKKKDYTQVDYLINGMYADSEM

SEQ ID NO: 2844 - DNA, 855 bp, Homo sapiens
cctttcctttcagcggagcgcggcggcaagatggcagtgcaaatatccaagaagaggaagtttgtcgctgatggcatcttcaaagctgaactgaatgagtttcttactcgggagctggctgaagatggctactctggagttgaggtgcgagttacaccaaccaggacagaaatcattatcttagccaccagaacacagaatgttcttggtgagaagggccggcggattcgggaactgactgctgtagttcagaagaggtttggctttccagagggcagtgtagagctttatgctgaaaaggtggccactagaggtctgtgtgccattgcccaggcagagtctctgcgttacaaactcctaggagggcttgctgtgcggagggcctgctatggtgtgctgcggttcatcatggagagtggggccaaaggctgcgaggttgtggtgtctgggaaactccgaggacagagggctaaatccatgaagtttgtggatggcctgatgatccacagcggagaccctgttaactactacgttgacactgctgtgcgccacgtgttgctcagacagggtgtgctgggcatcaaggtgaagatcatgctgccctgggacccaactggtaagattggccctaagaagcccctgcctgaccacgtgagcattgtggaacccaaagatgagatactgcccaccacccccatctcagaacagaagggtgggaagccagagccgcctgccatgccccagccagtccccacagcataacagggtctccttggcagctgtattctggagtctggatgttgctctctaaagacctttaataaaattttgtacaaagacaaaaaaaaaaaaaaa

SEQ ID NO: 2845 - protein, 243 aa, Homo sapiens
MAVQISKKRKFVADGIFKAELNEFLTRELAEDGYSGVEVRVTPTRTEIIILATRTQNVLGEKGRRIRELTAVVQKRFGFPEGSVELYAEKVATRGLCAIAQAESLRYKLLGGLAVRRACYGVLRFIMESGAKGCEVVVSGKLRGQRAKSMKFVDGLMIHSGDPVNYYVDTAVRHVLLRQGVLGIKVKIMLPWDPTGKIGPKKPLPDHVSIVEPKDEILPTTPISEQKGGKPEPPAMPQPVPTA

SEQ ID NO: 2846 - DNA, 148 bp, Homo sapiens
cttcgatgaagagatgatgacgagtctgacttggggatgttctctttgcccaggtggcctactctgtgctgcgttctgtggcacagtttaaagagccctggttgaagtaatttcctaaagatgacttagaggcatttgtctgagaagg

SEQ ID NO: 2847 - DNA, 146 bp, Homo sapiens
cttcagtgatgacacgatgacgagtcagaaaggtcacgtcctgctcttggtccttgtcagtgccatgttctgtggtgctgtgcacgagttcctttggcagaagtgtcctatttattgatcgatttagaggcatttgtctgagaagg

SEQ ID NO: 2848 - DNA, 1511 bp, Homo sapiens
ggccgcctgcgcgccgccaacagcctagcgctgcgccgcgtggccgccgccttctcgctggccccgctggccgagcgctgcggccgcgtcctgcgtcaggccttcgccgaggtggcgcgccacgccgacttcctggagctggcgcctgacgaggtggtggcgctgctggcggaccccgcgctgggcgtggcgcgcgaggaggccgtgtttgaagcggccatgcgctgggtgcgccacgacgcgccggcccgccgcggccagctgcgacgcctgctggagcacgtgcgcctgccgctactggcgcccgcttacttcctggagaaggtggaggcggacgagctgctgcaggcctgcggcgagtgccgcccgctgctgctcgaggctcgcgcctgcttcatcctgggccgcgaggccggtgcgctgcggacccggccgcggagattcatggacctagctgaagtgatcgtggtcatcggcggttgcgaccgcaaaggtctcctgaagctgcccttcgccgatgcctaccatccagagagccagcggtggaccccactgcccagcctgcccggctacactcgctcagaattcgccgcctgtgctctccgcaatgacgtctacgtctccggaggccacatcaacagtcatgatgtgtggatgtttagctcccatctgcacacctggatcaaggtagcctctctgcacaagggcaggtggaggcacaagatggcagttgtgcaggggcagctgttcgcggtgggtggcttcgacggcctgaggcgcctgcacagcgtggagcgctacgaccccttctccaacacctgggcggccgccgcgcccctcccggaggccgtgagctcggcggcggtggcgtcctgcgcgggcaagctcttcgtgattgggggcgccaggcagggcggcgtcaacacggacaaggtgcagtgctttgaccccaaggaggaccggtggagcctgcggtcaccagcacccttctcacagcggtgtctcgaggctgtctcccttgaggacaccatctatgtcatggggggtctcatgagcaaaatcttcacctatgatccaggcacagatgtgtggggggaggcagctgtcctccccagccctgtggaaagctgtggagtcactgtgtgtgacgggaaggtccacatccttggcgggcgggatgatcgcggagaaagcaccgataaggtcttcacctttgaccccagcagtgggcaggtggaggtccagccatccctgcagcgctgcaccagctcccacggctgtgtcaccatcatccagagcttgggcaggtgattcagatttggacagcctgagccaggaggcggagaggcaggcggagctcagatgcacactctgctccctcatggcacctccacgcaaacagcccttaacttaatggtcccttttcttgtataaataaaatcttgttgggtctgtgttccagctgcagtctgccctgcctggagatggaatgtctaaaaaaaaaaaaaaaa

SEQ ID NO: 2849 - protein, 363 aa, Homo sapiens
MRWVRHDAPARRGQLRRLLEHVRLPLLAPAYFLEKVEADELLQACGECRPLLLEARACFILGREAGALRTRPRRFMDLAEVIVVIGGCDRKGLLKLPFADAYHPESQRWTPLPSLPGYTRSEFAACALRNDVYVSGGHINSHDVWMFSSHLHTWIKVASLHKGRWRHKMAVVQGQLFAVGGFDGLRRLHSVERYDPFSNTWAAAAPLPEAVSSAAVASCAGKLFVIGGARQGGVNTDKVQCFDPKEDRWSLRSPAPFSQRCLEAVSLEDTIYVMGGLMSKIFTYDPGTDVWGEAAVLPSPVESCGVTVCDGKVHILGGRDDRGESTDKVFTFDPSSGQVEVQPSLQRCTSSHGCVTIIQSLGR

SEQ ID NO: 2850 - DNA, 3503 bp, Homo sapiens
ggccgggagctcgggagtcggccgccgcgccgaggttcgccccgttttgcagagagagccgagtcgggacctggaaagacgtccccgcggggctccggccgccgcgcctccccgccggcgcctgccctgccctgcccgtcccagccccgcggttcggggcgtgcggccgggacgcgcggagccccggccctgacccgctgcgccgggacgggacgctcctaacgccgccgtaccggtccgtggttgcagggtcgctccgcgcctttccgtcagtgagggtcggaaccccagctccagggctagcgcagtgtggccccaggccctcgcctccggtgcacgggaccccggacccccccaagcctctggcttcacgagaccccaaccttcagttggaacagcttggaacagcgcgagcgcccgggaagccctggccgggtcgtgcgctccgtgaggggtcctaggcgggcaggacagtcggaccgaaccgccgggctggtgccgcgagcccaggctgtcaccttcgtcccgcctcaggcgaggggttcagcgcctgccccgaagataacacaggggtccccttctgtcccggcggcccgcgagagccaaggctgcagctctcccagtgaagtgatatcactgcctctgtggacaagacacctccaggagcccagctcacagccaccggtaccttcttccaggacaagctgggggcctccatgggcgcctgagggccaggcgccagggccgtgggcacgagtatggtgagacaccagcccctgcagtactacgagccacagctgtgcctctcctgcctcacgggcatctacggctgccgttggaagcgctaccagcgctcccatgatgataccacaccgtgggagcgcctctggttcctgctcctcaccttcacctttggcctcacgctcacctggctttacttctggtgggaagtccacaatgactatgatgaattcaactggtacctctacaaccgcatgggctactggagcgactggcccgtacccatccttgtgaccacagctgctgccttcgcatacatcgctggcctcctggtcctggcactatgtcacattgccgtggggcagcagatgaacctgcactggctgcacaagatcgggctggtggtcatcctggcttccacggtggtggccatgtcggccgtggcccagctgtgggaggacgagtgggaggtgctgctgatctccctgcagggcacagcgccattcctgcatgtgggggctgtggcagcagtcaccatgctctcctggatcgtggcaggacagttcgcccgtgcagagcggacctcctcccaggtgaccattctctgtaccttcttcaccgtggtgtttgccctctacctggcccctctcaccatctcctctccctgcatcatggagaagaaagacctcggccccaagcctgctctcattggccaccgcggggcccccatgctggctccagagcacacgctcatgtccttccggaaggccctcgagcagaagctgtacgggctccaggctgacattaccatcagcctggacggcgtgcccttcctcatgcatgacaccaccctgcggcgcaccaccaacgtggaggaggagttcccggagctggcccgcaggcctgcctccatgcttaactggaccaccctgcagagactcaacgctggccagtggttcctgaagactgaccccttctggacagccagctccctgtcaccctccgaccacagagaggcccagaaccagtccatctgcagcctggcagagctcctggagctggccaagggcaatgccacactgctgctcaacctgcgtgacccgccccgggagcacccctaccgcagcagttttatcaacgtgactctggaggccgtgctgcactccggcttcccccagcaccaggtcatgtggctgcctagcaggcagaggcccctggtgcggaaggtggctcccggcttccaacagacatcaggctccaaggaggcagtcgccagcctgcggagaggccacatccagcggctgaacctgcgctacactcaggtgtcccgccaggagctcagggactacgcgtcctggaacctgagtgtgaacctctacacagtcaacgcaccgtggctcttctccctgctgtggtgtgcgggggtcccatccgtcacctctgacaactcccacaccctgtcccaggtgccttcccccctctggatcatgcccccggacgagtactgtctcatgtgggtcactgccgacctggtctccttcaccctcatcgtgggcatcttcgtgctccagaagtggcgcctgggtggcatacggagctacaaccctgagcagatcatgctgagtgctgcggtgcgccggaccagccgggacgtcagcatcatgaaggagaagcttattttctcagagatcagcgatggtgtagaggtctccgatgtgctctccgtatgttcagacaacagttatgacacatatgccaacagcaccgccacccctgtgggcccccgagggggtggcagccacaccaagaccctcatagagcggagtgggcgttagctgaagacatgtctgtcccacctgtacctgacacagaagctggggagcctaggagagctggtggaagtgtgtctgaactcggagtgctctgggagcgggctccacagcctccttgtgggctccagccccttgtcagccgcagcctctcttgagggggactccctgtctcctgaggcccagctgggccaggactccatcctttcagatgcccctgcaggcctggggctccttctgggaagtatggggcctagggcttggtccccctcttctgaggccctctcctgtatcccgacctggaagctttgatgggtcatgggccatgccataccccctgtggcaatggagtgtgtggatgctcacctgtgccatctgtcctcctgtctgtgccaggaggcacctgagttctctgctgttatcctgccccaagggcctgggccgagcctctacctgaagcaactctgctcttcctgtcagtctcaaagcacaaggaggttcagcccaggaggaagccagctgcaatgtggagacacgtcctcctccccaacccacctcatgccaccgccaaccccctgccccaggagcgggcctgagccacgtcccctaggagcagctggagatggccaaaagagtgagctcaggactactggatcccatgcccaggtgtccagcagacctcaaggcagaagggtcacctaacccaggagtccacagactgatgtgacctcaggttcccacatcagtggccacagggcagggcccacctggtagaagtgttctggatatggccagggtgggtgtgtggctaagtgggcctgaacagagggaacctagggcccttggcaatgtgatttaaagctgccatcttgcggaaaaaaaaaaaaaaaaaaaaaaaaaaaaaaaaaaaaaaaaaaaaaaaaaaaaaaaaaa

SEQ ID NO: 2851 - protein, 605 aa, Homo sapiens
MVRHQPLQYYEPQLCLSCLTGIYGCRWKRYQRSHDDTTPWERLWFLLLTFTFGLTLTWLYFWWEVHNDYDEFNWYLYNRMGYWSDWPVPILVTTAAAFAYIAGLLVLALCHIAVGQQMNLHWLHKIGLVVILASTVVAMSAVAQLWEDEWEVLLISLQGTAPFLHVGAVAAVTMLSWIVAGQFARAERTSSQVTILCTFFTVVFALYLAPLTISSPCIMEKKDLGPKPALIGHRGAPMLAPEHTLMSFRKALEQKLYGLQADITISLDGVPFLMHDTTLRRTTNVEEEFPELARRPASMLNWTTLQRLNAGQWFLKTDPFWTASSLSPSDHREAQNQSICSLAELLELAKGNATLLLNLRDPPREHPYRSSFINVTLEAVLHSGFPQHQVMWLPSRQRPLVRKVAPGFQQTSGSKEAVASLRRGHIQRLNLRYTQVSRQELRDYASWNLSVNLYTVNAPWLFSLLWCAGVPSVTSDNSHTLSQVPSPLWIMPPDEYCLMWVTADLVSFTLIVGIFVLQKWRLGGIRSYNPEQIMLSAAVRRTSRDVSIMKEKLIFSEISDGVEVSDVLSVCSDNSYDTYANSTATPVGPRGGGSHTKTLIERSGR

SEQ ID NO: 2852 - DNA, 2242 bp, Homo sapiens
caccggatctgcttccagggcttggtttcgctttgcctggctcttggctaggcctggcgccccgcgcggagccgagcaggtggcagccgaggagtggcgggggctggaacatttaaccctttgggagcacctgccctctcccagagggcgcgtccccggatcaggcccggtgccccgcagcgcgcgtgggtcctggctggctggaaggaggccctgaccttgctttctctcccgtgccaggtctgccaaggaccatgggtgccgcgctggggacaggcacgcggctggctccctggccgggccgggcctgcggcgccctcccgcgctggacacccaccgcgcccgcccaaggctgccactccaagcctggcccggcgcgccctgtgcccctgaagaagcgcggatacgatgtcaccaggaaccctcatctcaacaaggggatggcctttacccttgaagaaaggctgcagcttggaatccacggcctaatcccgccctgctttctgagccaggacgtccagctcctccgaatcatgagatattacgagcggcagcagagtgacctggacaagtacatcattctcatgacactccaagaccggaacgagaagctcttctaccgagtgctgacttcggacgtggagaagttcatgccaatcgtgtacacgcctaccgtggggctggcctgtcagcactatggcctgactttccgcaggccccgtggactgttcatcaccattcatgacaaaggtcatcttgcaacaatgctgaattcttggccagaagacaatattaaggccgtggtggtgactgatggggagcgcatcctgggcctgggagacctgggctgctacggcatgggcatccctgtgggcaagctggccctgtacacggcatgcggaggggtgaacccgcagcagtgcctccctgtgctgctggacgtcggcaccaacaatgaggagctgctcagagaccctctgtacatcggcctgaaacaccagcgcgtgcacgggaaggcatacgatgacttgctggatgagttcatgcaggctgtgacagacaagtttggaataaattgcctcatccaatttgaagacttcgccaatgccaatgccttccgcctgctcaacaaataccgtaacaagtactgcatgttcaatgatgacatccaaggcacagcctccgttgctgtggcagggatcttggctgctctgcgaatcaccaagaacaagctttccaatcacgtgtttgttttccaaggtgcaggcgaggcagctatgggcattgcccacctccttgtcatggccctagagaaagaaggtgtaccgaaggcagaggccacaagaaagatctggatggtggactctaaagggctcattgtcaaggggaggagccacctgaaccatgaaaaggagatgtttgcccaagaccatcctgaagtcaactccctggaggaggtggtgaggctggtgaagcccacagccatcataggtgttgctgccatcgcaggagccttcacggagcagattctgagggacatggcctccttccacgagcgccctatcatctttgccctgagcaaccccaccagcaaggccgagtgcacggctgagaagtgctaccgggtcaccgagggccgagggatttttgccagtggaagtccttttaagagtgtgactctggaagatggcaagaccttcattcctgggcagggaaacaatgcttacgtgttccccggggtggcactgggagtcatcgccggcgggatccggcacatcccagatgagatcttcctcctgacagcagagcaaattgcccaggaagtctctgagcagcatctgtcccaggggagactctacccaccactcagcaccatccgagacgtgtctttgagaattgccatcaaagttctcgactacgcgtacaaacacaacctggcttcctactacccagagcctaaggacaaggaggcttttgtaagatccctggtctacactccagactatgactcctttacactggacagctacacttggcccaaggaagccatgaatgttcagacggtctgaggcagtctcagaggctagtatggggctagatgaagcccagagtaacacccacaatataaatgggttccaaaatggcccaagtgaatccttgtcgctgtgttttttcttttaaactttctggtgtgagaggagatgccaaggcatacagtgaataaaagccttgtctctgaaaa

SEQ ID NO: 2853 - protein, 604 aa, Homo sapiens
MGAALGTGTRLAPWPGRACGALPRWTPTAPAQGCHSKPGPARPVPLKKRGYDVTRNPHLNKGMAFTLEERLQLGIHGLIPPCFLSQDVQLLRIMRYYERQQSDLDKYIILMTLQDRNEKLFYRVLTSDVEKFMPIVYTPTVGLACQHYGLTFRRPRGLFITIHDKGHLATMLNSWPEDNIKAVVVTDGERILGLGDLGCYGMGIPVGKLALYTACGGVNPQQCLPVLLDVGTNNEELLRDPLYIGLKHQRVHGKAYDDLLDEFMQAVTDKFGINCLIQFEDFANANAFRLLNKYRNKYCMFNDDIQGTASVAVAGILAALRITKNKLSNHVFVFQGAGEAAMGIAHLLVMALEKEGVPKAEATRKIWMVDSKGLIVKGRSHLNHEKEMFAQDHPEVNSLEEVVRLVKPTAIIGVAAIAGAFTEQILRDMASFHERPIIFALSNPTSKAECTAEKCYRVTEGRGIFASGSPFKSVTLEDGKTFIPGQGNNAYVFPGVALGVIAGGIRHIPDEIFLLTAEQIAQEVSEQHLSQGRLYPPLSTIRDVSLRIAIKVLDYAYKHNLASYYPEPKDKEAFVRSLVYTPDYDSFTLDSYTWPKEAMNVQTV

SEQ ID NO: 2854 - DNA, 2090 bp, Homo sapiens
gctcctcaccccgcctgctccgcagcgggaccgcgtagacctcagctccccgagcagcgcaggtgggccagggaaggagaggaccgaggtctgccaaggaccatgggtgccgcgctggggacaggcacgcggctggctccctggccgggccgggcctgcggcgccctcccgcgctggacacccaccgcgcccgcccaaggctgccactccaagcctggcccggcgcgccctgtgcccctgaagaagcgcggatacgatgtcaccaggaaccctcatctcaacaaggggatggcctttacccttgaagaaaggctgcagcttggaatccacggcctaatcccgccctgctttctgagccaggacgtccagctcctccgaatcatgagatattacgagcggcagcagagtgacctggacaagtacatcattctcatgacactccaagaccggaacgagaagctcttctaccgagtgctgacttcggacgtggagaagttcatgccaatcgtgtacacgcctaccgtggggctggcctgtcagcactatggcctgactttccgcaggccccgtggactgttcatcaccattcatgacaaaggtcatcttgcaacaatgctgaattcttggccagaagacaatattaaggccgtggtggtgactgatggggagcgcatcctgggcctgggagacctgggctgctacggcatgggcatccctgtgggcaagctggccctgtacacggcatgcggaggggtgaacccgcagcagtgcctccctgtgctgctggacgtcggcaccaacaatgaggagctgctcagagaccctctgtacatcggcctgaaacaccagcgcgtgcacgggaaggcatacgatgacttgctggatgagttcatgcaggctgtgacagacaagtttggaataaattgcctcatccaatttgaagacttcgccaatgccaatgccttccgcctgctcaacaaataccgtaacaagtactgcatgttcaatgatgacatccaaggcacagcctccgttgctgtggcagggatcttggctgctctgcgaatcaccaagaacaagctttccaatcacgtgtttgttttccaaggtgcaggcgaggcagctatgggcattgcccacctccttgtcatggccctagagaaagaaggtgtaccgaaggcagaggccacaagaaagatctggatggtggactctaaagggctcattgtcaaggggaggagccacctgaaccatgaaaaggagatgtttgcccaagaccatcctgaagtcaactccctggaggaggtggtgaggctggtgaagcccacagccatcataggtgttgctgccatcgcaggagccttcacggagcagattctgagggacatggcctccttccacgagcgccctatcatctttgccctgagcaaccccaccagcaaggccgagtgcacggctgagaagtgctaccgggtcaccgagggccgagggatttttgccagtggaagtccttttaagagtgtgactctggaagatggcaagaccttcattcctgggcagggaaacaatgcttacgtgttccccggggtggcactgggagtcatcgccggcgggatccggcacatcccagatgagatcttcctcctgacagcagagcaaattgcccaggaagtctctgagcagcatctgtcccaggggagactctacccaccactcagcaccatccgagacgtgtctttgagaattgccatcaaagttctcgactacgcgtacaaacacaacctggcttcctactacccagagcctaaggacaaggaggcttttgtaagatccctggtctacactccagactatgactcctttacactggacagctacacttggcccaaggaagccatgaatgttcagacggtctgaggcagtctcagaggctagtatggggctagatgaagcccagagtaacacccacaatataaatgggttccaaaatggcccaagtgaatccttgtcgctgtgttttttcttttaaactttctggtgtgagaggagatgccaaggcatacagtgaataaaagccttgtctctgaaaa

SEQ ID NO: 2855 - protein, 604 aa, Homo sapiens; identical to SEQ ID NO: 2853

SEQ ID NO: 2856 - DNA, 3750 bp, Homo sapiens
gcgctgctcgccagcttgctcgcactcggctgtgcggcggggcaggcatgggagccgcgcgctctctcccggcgcccacacctgtctgagcggcgcagcgagccgcggcccgggcgggctgctcggcgcggaacagtgctcggcatggcagggattccagggctcctcttccttctcttctttctgctctgtgctgttgggcaagtgagcccttacagtgccccctggaaacccacttggcctgcataccgcctccctgtcgtcttgccccagtctaccctcaatttagccaagccagactttggagccgaagccaaattagaagtatcttcttcatgtggaccccagtgtcataagggaactccactgcccacttacgaagaggccaagcaatatctgtcttatgaaacgctctatgccaatggcagccgcacagagacgcaggtgggcatctacatcctcagcagtagtggagatggggcccaacaccgagactcagggtcttcaggaaagtctcgaaggaagcggcagatttatggctatgacagcaggttcagcatttttgggaaggacttcctgctcaactaccctttctcaacatcagtgaagttatccacgggctgcaccggcaccctggtggcagagaagcatgtcctcacagctgcccactgcatacacgatggaaaaacctatgtgaaaggaacccagaagcttcgagtgggcttcctaaagcccaagtttaaagatggtggtcgaggggccaacgactccacttcagccatgcccgagcagatgaaatttcagtggatccgggtgaaacgcacccatgtgcccaagggttggatcaagggcaatgccaatgacatcggcatggattatgattatgccctcctggaactcaaaaagccccacaagagaaaatttatgaagattggggtgagccctcctgctaagcagctgccagggggcagaattcacttctctggttatgacaatgaccgaccaggcaatttggtgtatcgcttctgtgacgtcaaagacgagacctatgacttgctctaccagcaatgcgatgcccagccaggggccagcgggtctggggtctatgtgaggatgtggaagagacagcagcagaagtgggagcgaaaaattattggcattttttcagggcaccagtgggtggacatgaatggttccccacaggatttcaacgtggctgtcagaatcactcctctcaaatatgcccagatttgctattggattaaaggaaactacctggattgtagggaggggtgacacagtgttccctcctggcagcaattaagggtcttcatgttcttattttaggagaggccaaattgttttttgtcattggcgtgcacacgtgtgtgtgtgtgtgtgtgtgtgtgtaaggtgtcttataatcttttacctatttcttacaattgcaagatgactggctttactatttgaaaactggtttgtgtatcatatcatatatcatttaagcagtttgaaggcatacttttgcatagaaataaaaaaaatactgatttggggcaatgaggaatatttgacaattaagttaatcttcacgtttttgcaaactttgatttttatttcatctgaacttgtttcaaagatttatattaaatatttggcatacaagagatatgaattcttatatgtgtgcatgtgtgttttcttctgagattcatcttggtggtgggtttttttgtttttttaattcagtgcctgatctttaatgcttccataaggcagtgttcccatttaggaactttgacagcatttgttaggcagaatattttggatttggaggcatttgcatggtagtctttgaacagtaaaatgatgtgttgactatactgatacacatattaaactataccttatagtaaaccagtatcccaagctgcttttagttccaaaaatagtttcttttccaaaggttgttgctctactttgtaggaagtctttgcatatggccctcccaactttaaagtcataccagagtggccaagagtgtttatcccaacccttccatttaacaggatttcactcacatttctggaactagctatttttcagaagacaataatcagggcttaattagaacaggctgtatttcctcccagcaaacagttgtggccacactaaaaacaatcatagcattttacccctggattatagcacatctcatgttttatcatttggatggagtaatttaaaatgaattaaattccagagaacaatggaagcattgcctggcagatgtcacaacagaataaccacttgtttggagcctggcacagtcctccagcctgatcaaaaattattctgcatagttttcagtgtgctttctgggagctatgtacttcttcaatttggaaacttttctctctcatttatagtgaaaatacttggaagttactttaagaaaaccagtgtggcctttttccctctagctttaaaagggccgcttttgctggaatgctctaggttatagataaacaattaggtataatagcaaaaatgaaaattggaagaatgcaaaatggatcagaatcatgccttccaataaaggcctttacacatgttttatcaatatgattatcaaatcacagcatatacagaaaagacttggacttattgtatgtttttattttatggctctcggcctaagcacttctttctaaatgtatcggagaaaaaatcaaatggactacaagcacgtgtttgctgtgcttgcaccccaggtaaacctgcattgtagcaatttgtaaggatattcagatggagcactgtcacttagacattctctgggggattttctgcttgtctttcttgagctttttggaaggataattctgataaggcactcaagaaacgtacaaccacagtgctttcttcaaatcatatgagaaatactatgcatagcaaggagatgcagagccgccaggaaaattctgagttccagcacaattttctttggaatctaacaggaatctagcctgaggaagaagggaggtctccatttctatgtctggtatttgggggttttgtttgtttttgctttagcttggtgaaaaaaagttcactgaacaccaagaccagaatggatttttttaaaaaaatagatgttccttttgtgaagcaccttgattccttgattttgattttttgcaaagttagacaatggcacaaagtcaaaatgaaatcaatgtttagttcacaagtagatgtaatttactaaagaatgatacacccatatgctatatacagcttaactcacagaactgtaaaagaaaattataaaataattcaacatgtccatctttttagtgataataaaagaaagcatggtattaaactatcatagaagtagacagaaaaagaaaaaaggactcatggcattattaatataattagtgctttacatgtgttagttatacatattagaagcatatttgcctagtaaggctagtagaaccacatttcccaaagtgtgctccttaaacactcatgccttatgattttctaccaaaagtaaaaagggttgtattaagtcagaggaagatgcctctccattttccctctctttatcagaggttcacatgcctgtctgcacattaaaagctctgggaagacctgttgtaaagggacaagttgaggttgtaaaatctgcatttaaataaacatctttgatcacaaaaaaaaaaaaaaaaaaaa

SEQ ID NO: 2857 - protein, 383 aa, Homo sapiens
MAGIPGLLFLLFFLLCAVGQVSPYSAPWKPTWPAYRLPVVLPQSTLNLAKPDFGAEAKLEVSSSCGPQCHKGTPLPTYEEAKQYLSYETLYANGSRTETQVGIYILSSSGDGAQHRDSGSSGKSRRKRQIYGYDSRFSIFGKDFLLNYPFSTSVKLSTGCTGTLVAEKHVLTAAHCIHDGKTYVKGTQKLRVGFLKPKFKDGGRGANDSTSAMPEQMKFQWIRVKRTHVPKGWIKGNANDIGMDYDYALLELKKPHKRKFMKIGVSPPAKQLPGGRIHFSGYDNDRPGNLVYRFCDVKDETYDLLYQQCDAQPGASGSGVYVRMWKRQQQKWERKIIGIFSGHQWVDMNGSPQDFNVAVRITPLKYAQICYWIKGNYLDCREG

SEQ ID NO: 2858 - DNA, 4518 bp, Homo sapiens
acaaaatggtcctttagaaaatacatctgaattgctggctaatttcttgatttgcgactcaacgtaggacatcgcttgttcgtagctatcagaaccctcctgaattttccccaccatgctatctttattggcttgaactcctttcctaaaatggtccttctgttgatcctgtcagtcttacttttgaaagaagatgtccgtgggagtgcacagtccagtgagaggagggtggtggctcacatgccgggtgacatcattattggagctctcttttctgttcatcaccagcctactgtggacaaagttcatgagaggaagtgtggggcggtccgtgaacagtatggcattcagagagtggaggccatgctgcataccctggaaaggatcaattcagaccccacactcttgcccaacatcacactgggctgtgagataagggactcctgctggcattcggctgtggccctagagcagagcattgagttcataagagattccctcatttcttcagaagaggaagaaggcttggtacgctgtgtggatggctcctcctcttccttccgctccaagaagcccatagtaggggtcattgggcctggctccagttctgtagccattcaggtccagaatttgctccagcttttcaacatacctcagattgcttactcagcaaccagcatggatctgagtgacaagactctgttcaaatatttcatgagggttgtgccttcagatgctcagcaggcaagggccatggtggacatagtgaagaggtacaactggacctatgtatcagccgtgcacacagaaggcaactatggagaaagtgggatggaagccttcaaagatatgtcagcgaaggaagggatttgcatcgcccactcttacaaaatctacagtaatgcaggggagcagagctttgataagctgctgaagaagctcacaagtcacttgcccaaggcccgggtggtggcctgcttctgtgagggcatgacggtgagaggtctgctgatggccatgaggcgcctgggtctagcgggagaatttctgcttctgggcagtgatggctgggctgacaggtatgatgtgacagatggatatcagcgagaagctgttggtggcatcacaatcaagctccaatctcccgatgtcaagtggtttgatgattattatctgaagctccggccagaaacaaaccaccgaaacccttggtttcaagaattttggcagcatcgttttcagtgccgactggaagggtttccacaggagaacagcaaatacaacaagacttgcaatagttctctgactctgaaaacacatcatgttcaggattccaaaatgggatttgtgatcaacgccatctattcgatggcctatgggctccacaacatgcagatgtccctctgcccaggctatgcaggactctgtgatgccatgaagccaattgatggacggaaacttttggagtccctgatgaaaaccaattttactggggtttctggagatacgatcctattcgatgagaatggagactctccaggaaggtatgaaataatgaatttcaaggaaatgggaaaagattactttgattatatcaacgttggaagttgggacaatggagaattaaaaatggatgatgatgaagtatggtccaagaaaagcaacatcatcagatctgtgtgcagtgaaccatgtgagaaaggccagatcaaggtgatccgaaagggagaagtcagctgttgttggacctgtacaccttgtaaggagaatgagtatgtctttgatgagtacacatgcaaggcatgccaactggggtcttggcccactgatgatctcacaggttgtgacttgatcccagtacagtatcttcgatggggtgaccctgaacccattgcagctgtggtgtttgcctgccttggcctcctggccaccctgtttgttactgtagtcttcatcatttaccgtgatacaccagtagtcaagtcctcaagcagggaactctgctacattatccttgctggcatctgcctgggctacttatgtaccttctgcctcattgcgaagcccaaacagatttactgctaccttcagagaattggcattggtctctccccagccatgagctactcagcccttgtaacaaagaccaaccgtattgcaaggatcctggctggcagcaagaagaagatctgtaccaaaaagcccagattcatgagtgcctgtgcccagctagtgattgctttcattctcatatgcatccagttgggcatcatcgttgccctctttataatggagcctcctgacataatgcatgactacccaagcattcgagaagtctacctgatctgtaacaccaccaacctaggagttgtcactccacttggatacaatggattgttgattttgagctgcaccttctatgcgttcaagaccagaaatgttccagctaacttcaacgaggccaagtatatcgccttcacaatgtacacgacctgcattatatggctagcttttgtgccaatctactttggcagcaactacaaaatcatcaccatgtgtttctcggtcagcctcagtgccacagtggccctaggctgcatgtttgtgccgaaggtgtacatcatcctggccaaaccagagagaaacgtgcgcagcgccttcaccacatctaccgtggtgcgcatgcatgtaggggatggcaagtcatcctccgcagccagcagatccagcagcctagtcaacctgtggaagagaaggggctcctctggggaaaccttaagttccaatggaaaatccgtcacgtgggcccagaatgagaagagcagccgggggcagcacctgtggcagcgcctgtccatccacatcaacaagaaagaaaaccccaaccaaacggccgtcatcaagcccttccccaagagcacggagagccgtggcctgggcgctggcgctggcgcaggcgggagcgctgggggcgtgggggccacgggcggtgcgggctgcgcaggcgccggcccaggcgggcccgagtccccagacgccggccccaaggcgctgtatgatgtggccgaggctgaggagcacttcccggcgcccgcgcggccgcgctcaccgtcgcccatcagcacgctgagccaccgcgcgggctcggccagccgcacggacgacgatgtgccgtcgctgcactcggagcctgtggcgcgcagcagctcctcgcagggctccctcatggagcagatcagcagtgtggtcacccgcttcacggccaacatcagcgagctcaactccatgatgctgtccaccgcggcccccagccccggcgtcggcgccccgctctgctcgtcctacctgatccccaaagagatccagttgcccacgaccatgacgacctttgccgaaatccagcctctgccggccatcgaagtcacgggcggcgcgcagcccgcggcaggggcgcaggcggctggggacgcggcccgggagagccccgcggccggtcccgaggctgcggccgccaagccagacctggaggagctggtggctctcaccccgccgtcccccttcagagactcggtggactcggggagcacaacccccaactcgccagtgtccgagtcggccctctgtatcccgtcgtctcccaaatatgacactcttatcataagagattacactcagagctcctcgtcgttgtgaatgtccctggaaagcacgccggcctgcgcgtgcggagcggagccccccgtgttcacacacacacaatggcaagcatagtcgcctggttacggcccagggggaatatgccaagggaccccttaatggaaacacagatcagtagtgctatctcatgacaaccacaagaaaccgacgacaaatcttttgcgagattttcttctagtggcttagaaacatggcttttaagaaacacggtgatatctttgagggtgacaaggcgtctcttcaaacagttccataccaactgctttgctctagggaagcagtgcgtgtgaaacagcgtaacggagggtgaagagcatagttaataagcaactgtaaaaagttttatttgtttactttaattcttttcccctgtaaaaagttttatttgtttactttaattcttttcccagaaaagagtctttgattcaccaaacatgaatgtacattttctaacaaactcaaaatctgggaccaaaacatcaacttttttctttcttttttctttctttttgttttttctttcctgtaaagaccttgaaaagaccttgaaaagcagtaacttgggtccagtatttacggaggcgttgtgaatgtgtcccatgcataacacactactggatagtgagtcgtgcgctaatgtactacgtagggcttctaccagagattttcctctccaattgggttgtgaaatactcttccaaaagcctgcatcggggattccacctacttatttcagattcacctccattaaccaagaaaaccagtggaagatttcttgactatttcaccatgttgccaatc

SEQ ID NO: 2859 - protein, 1180 aa, Homo sapiens
MVLLLILSVLLLKEDVRGSAQSSERRVVAHMPGDIIIGALFSVHHQPTVDKVHERKCGAVREQYGIQRVEAMLHTLERINSDPTLLPNITLGCEIRDSCWHSAVALEQSIEFIRDSLISSEEEEGLVRCVDGSSSSFRSKKPIVGVIGPGSSSVAIQVQNLLQLFNIPQIAYSATSMDLSDKTLFKYFMRVVPSDAQQARAMVDIVKRYNWTYVSAVHTEGNYGESGMEAFKDMSAKEGICIAHSYKIYSNAGEQSFDKLLKKLTSHLPKARVVACFCEGMTVRGLLMAMRRLGLAGEFLLLGSDGWADRYDVTDGYQREAVGGITIKLQSPDVKWFDDYYLKLRPETNHRNPWFQEFWQHRFQCRLEGFPQENSKYNKTCNSSLTLKTHHVQDSKMGFVINAIYSMAYGLHNMQMSLCPGYAGLCDAMKPIDGRKLLESLMKTNFTGVSGDTILFDENGDSPGRYEIMNFKEMGKDYFDYINVGSWDNGELKMDDDEVWSKKSNIIRSVCSEPCEKGQIKVIRKGEVSCCWTCTPCKENEYVFDEYTCKACQLGSWPTDDLTGCDLIPVQYLRWGDPEPIAAVVFACLGLLATLFVTVVFIIYRDTPVVKSSSRELCYIILAGICLGYLCTFCLIAKPKQIYCYLQRIGIGLSPAMSYSALVTKTNRIARILAGSKKKICTKKPRFMSACAQLVIAFILICIQLGIIVALFIMEPPDIMHDYPSIREVYLICNTTNLGVVTPLGYNGLLILSCTFYAFKTRNVPANFNEAKYIAFTMYTTCIIWLAFVPIYFGSNYKIITMCFSVSLSATVALGCMFVPKVYIILAKPERNVRSAFTTSTVVRMHVGDGKSSSAASRSSSLVNLWKRRGSSGETLSSNGKSVTWAQNEKSSRGQHLWQRLSIHINKKENPNQTAVIKPFPKSTESRGLGAGAGAGGSAGGVGATGGAGCAGAGPGGPESPDAGPKALYDVAEAEEHFPAPARPRSPSPISTLSHRAGSASRTDDDVPSLHSEPVARSSSSQGSLMEQISSVVTRFTANISELNSMMLSTAAPSPGVGAPLCSSYLIPKEIQLPTTMTTFAEIQPLPAIEVTGGAQPAAGAQAAGDAARESPAAGPEAAAAKPDLEELVALTPPSPFRDSVDSGSTTPNSPVSESALCIPSSPKYDTLIIRDYTQSSSSL

SEQ ID NO: 2860 - DNA, 1964 bp, Homo sapiens
atcactgtagtagtagctggaaagagaaatctgtgactccaattagccagttcctgcagaccttgtgaggactagaggaagaatgctcctggctgttttgtactgcctgctgtggagtttccagacctccgctggccatttccctagagcctgtgtctcctctaagaacctgatggagaaggaatgctgtccaccgtggagcggggacaggagtccctgtggccagctttcaggcagaggttcctgtcagaatatccttctgtccaatgcaccacttgggcctcaatttcccttcacaggggtggatgaccgggagtcgtggccttccgtcttttataataggacctgccagtgctctggcaacttcatgggattcaactgtggaaactgcaagtttggcttttggggaccaaactgcacagagagacgactcttggtgagaagaaacatcttcgatttgagtgccccagagaaggacaaattttttgcctacctcactttagcaaagcataccatcagctcagactatgtcatccccatagggacctatggccaaatgaaaaatggatcaacacccatgtttaacgacatcaatatttatgacctctttgtctggatgcattattatgtgtcaatggatgcactgcttgggggatctgaaatctggagagacattgattttgcccatgaagcaccagcttttctgccttggcatagactcttcttgttgcggtgggaacaagaaatccagaagctgacaggagatgaaaacttcactattccatattgggactggcgggatgcagaaaagtgtgacatttgcacagatgagtacatgggaggtcagcaccccacaaatcctaacttactcagcccagcatcattcttctcctcttggcagattgtctgtagccgattggaggagtacaacagccatcagtctttatgcaatggaacgcccgagggacctttacggcgtaatcctggaaaccatgacaaatccagaaccccaaggctcccctcttcagctgatgtagaattttgcctgagtttgacccaatatgaatctggttccatggataaagctgccaatttcagctttagaaatacactggaaggatttgctagtccacttactgggatagcggatgcctctcaaagcagcatgcacaatgccttgcacatctatatgaatggaacaatgtcccaggtacagggatctgccaacgatcctatcttccttcttcaccatgcatttgttgacagtatttttgagcagtggctccgaaggcaccgtcctcttcaagaagtttatccagaagccaatgcacccattggacataaccgggaatcctacatggttccttttataccactgtacagaaatggtgatttctttatttcatccaaagatctgggctatgactatagctatctacaagattcagacccagactcttttcaagactacattaagtcctatttggaacaagcgagtcggatctggtcatggctccttggggcggcgatggtaggggccgtcctcactgccctgctggcagggcttgtgagcttgctgtgtcgtcacaagagaaagcagcttcctgaagaaaagcagccactcctcatggagaaagaggattaccacagcttgtatcagagccatttataaaaggcttaggcaatagagtagggccaaaaagcctgacctcactctaactcaaagtaatgtccaggttcccagagaatatctgctggtatttttctgtaaagaccatttgcaaaattgtaacctaatacaaagtgtagccttcttccaactcaggtagaacacacctgtctttgtcttgctgttttcactcagcccttttaacattttcccctaagcccatatgtctaaggaaaggatgctatttggtaatgaggaactgttatttgtatgtgaattaaagtgctcttatttt

SEQ ID NO: 2861 - protein, 529 aa, Homo sapiens [sequence omitted]

SEQ ID NO: 2862 - DNA, 4164 bp, Homo sapiens
aattcgcctctgccacaggctgcaaaggacccgaggaaccgctctctctgaactgtgctgatgggcaggaggatgggagacaggaattgagagtcacagaggaaggacagtggagtctggcatcttattggtgtctttaaaggattgccatttaatgccattcaagatctactaagcatcatttttgcatgactactgcaaaaggattactttacagataccagttcctttgtcaagagcatactttggaccctgttttcagaaagcagggcactctttaatgaagaaacaccagagctgttaaacacattgagacacagaagattctagtgactgaggatggcttcctcttggaaactaatgctgtttctgtcagtcaccatgtgtctttcagagtattcaaaatctcttcctggtctctccacttcatatgctgctttgttaagaattaagaagagttcatcttcatctctctttggttccaaaaccagaccacgatacagcagcccttcattaggaacactgagtgcttcttcacccagctggctaggggcagctcagaattattattcccccatcaatctttatcattcctcagatgccttcaaacaagatgaaagtgtggactatgggccagtttttgtgcaagaaccagatgatattatttttccaactgattctgatgaaaagaaggtagcattgaattgtgaagttcgtggcaatccagttcccagttacagatggcttcgaaatggaacagaaatagatctggaaagtgattatcgctacagtttgatagatggcaccttcattataagcaatccaagtgaagcaaaggattctggtcattatcagtgtttagcaaccaacactgtggggagtattcttagtagagaagctacactgcagtttgcctatctgggaaattttagtggccggacaagaagtgcagtctctgtgagggaaggccagggtgtcgttctgatgtgctctcctccgccacattcaccagagatcatctatagctgggtatttaatgagttcccttcctttgtggcggaagacagccggcggttcatctcccaggagacaggcaacctttatatttctaaagtccaaacatcagatgttggcagctatatttgtctggtgaaaaacacagtgacgaatgctagagtccttagtcctccaacgccactcactctgcgtaatgatggtgtgatgggagaatatgagccgaaaattgaggtccattttcctttcacggttacagctgctaaaggaacaactgttaagatggaatgctttgcacttggcaaccccgttccaacaatcacatggatgaaggttaatggttatattcctagtaaggcacgtctgcggaaatctcaggcggtgctggaaataccgaatgtacagctggatgatgcaggcatttatgagtgcagagctgaaaactcacgtggaaaaaattcctttcgtggacaattacaagtatacacctacccacactgggtagaaaaactgaatgatactcagttagacagtgggagccctctccgatgggaatgtaaggctactggaaaacccagacccacgtatcgttggctgaagaatggagtacccctctcacctcagagtagggttgagatggttaatggagtattgatgatccacaatgtgaatcaatcagatgctggaatgtatcagtgtttggctgaaaataagtatggagccatttacgctagtgctgagctgaagattctagcttcagctcccacttttgcactgaatcaactgaagaaaacaataattgttaccaaagaccaagaagttgtcatagagtgcaaaccccaaggctctccaaaaccaaccatctcttggaagaaaggagacagagcagttagagaaaacaaaagaatagctattcttccagacgggagtctacggatcctaaatgcttccaaatcagacgagggaaagtacgtttgccgaggggaaaacgtctttggttctgctgaaattatagcttcgctatctgtaaaagaacctacaaggatagaacttactcctaaaagaacagaattgacagtgggagaaagcattgtccttaattgcaaagcaattcacgatgctagtttggatgtcactttctactggactctgaaaggacagcctattgatttcgaggaagagggtggacattttgaaagcatcagggcccaagcatcctctgcagatttaatgatcaggaacatccttctgatgcatgctgggagatatggctgcagggtacagaccacagcagacagtgtgtcagatgaggcagaacttcttgttaggggacccccaggcccacctgggatagtaattgttgaggaaataaccgaaagtacggccacactgtcctggagcccagcagctgacaaccacagcccaatctcctcctacaaccttcaagctcgcagcccattttccctgggctggcaaacagtaaagacagtcccagaaatcataacaggggacatggagtcagccatggctgtggacctaaatccctgggtggaatatgaatttcgagtggtagccaccaaccctattgggacaggagatccaagcaccccatctcgaatgatccgcacaaatgaagcagttccgaagacagcacccaccaatgtaagcggaagaagtggaagaaggcatgagttagtcattgcctgggagccagtatctgaagagtttcagaatggggaaggcttcggctatattgtggctttcagacccaatggaacacgtggctggaaggaaaaaatggtgacatcctctgaagcttccaaattcatttatcgagatgaaagtgtccctcctcttactccctttgaagtgaaagttggcgtttataacaataaaggagatgggccttttagtcaaattgtggtcatctgttcagctgaaggagaacccagtgctgctcccacagatgtcaaggcgacaagtgtgtctgtgtcagagattcttgttgcatggaaacacattaaagagagtctaggaagaccacagggatttgaggttggttactggaaagacatggaacaggaagatacagcagaaacagtcaaaactagagggaatgagtctttcgtcatcctaacaggattagaaggaaatacgttatatcacttcacagtgagggcttacaatggagctggatatgggccacctagcagtgaagtgagtgcaaccaccaagaaatcccctcctagtcaagcacctagcaacctcaggtgggagcagcaaggctctcaggtttctctgggctgggaacccgtcataccattagccaacgaatctgaagttgtgggttacaaggttttttataggcaagagggtcacagcaacagccaagttattgaaacacagaaacttcaagcagtagtaccactcccagatgctggagtctatattattgaagttcgagcatatagtgaaggaggagatggaacagctagttctcaaattagggtaccatcatattcaggtggaaaaatcacaagtgcacagtcgacccttcactctctctccacatcttcgtcatcagtcaccttgctcttggcattgatgattccttcaacttcctggtgaaaactgctgacttaatttgcttttgtttgctttagcttggtaacagcggtgaatagagtgtagtgtaagtggagaaccaggatcctgagatgagcttgagctttaaaaacttgggactatacatggtgaacttacaggaggttaggggggaaatattacttatccatcaggtttctctttggtttttgtaaacggagaggacagttcttagtccagtaaaaatatgcagattgtatgtaatgaatttttgtaaacaaaggtaatttctgtcaaatgtattctttacttttttaatatgttgggattttattttatatctgatgactccgagtgtgtgccatccatttgttaagtaactggcctttagcagatctgtttcaaaaacaaatacaaaaatgagaatgaaaagtttgcttaagactaagtccagtgtttttcattttccctttggctgaatatttcaattgacaaaccagcaggacatatgaaaaatgcttcagtgatgtggtccattataagata

SEQ ID NO: 2863 - protein, 1100 aa, Homo sapiens
MASSWKLMLFLSVTMCLSEYSKSLPGLSTSYAALLRIKKSSSSSLFGSKTRPRYSSPSLGTLSASSPSWLGAAQNYYSPINLYHSSDAFKQDESVDYGPVFVQEPDDIIFPTDSDEKKVALNCEVRGNPVPSYRWLRNGTEIDLESDYRYSLIDGTFIISNPSEAKDSGHYQCLATNTVGSILSREATLQFAYLGNFSGRTRSAVSVREGQGVVLMCSPPPHSPEIIYSWVFNEFPSFVAEDSRRFISQETGNLYISKVQTSDVGSYICLVKNTVTNARVLSPPTPLTLRNDGVMGEYEPKIEVHFPFTVTAAKGTTVKMECFALGNPVPTITWMKVNGYIPSKARLRKSQAVLEIPNVQLDDAGIYECRAENSRGKNSFRGQLQVYTYPHWVEKLNDTQLDSGSPLRWECKATGKPRPTYRWLKNGVPLSPQSRVEMVNGVLMIHNVNQSDAGMYQCLAENKYGAIYASAELKILASAPTFALNQLKKTIIVTKDQEVVIECKPQGSPKPTISWKKGDRAVRENKRIAILPDGSLRILNASKSDEGKYVCRGENVFGSAEIIASLSVKEPTRIELTPKRTELTVGESIVLNCKAIHDASLDVTFYWTLKGQPIDFEEEGGHFESIRAQASSADLMIRNILLMHAGRYGCRVQTTADSVSDEAELLVRGPPGPPGIVIVEEITESTATLSWSPAADNHSPISSYNLQARSPFSLGWQTVKTVPEIITGDMESAMAVDLNPWVEYEFRVVATNPIGTGDPSTPSRMIRTNEAVPKTAPTNVSGRSGRRHELVIAWEPVSEEFQNGEGFGYIVAFRPNGTRGWKEKMVTSSEASKFIYRDESVPPLTPFEVKVGVYNNKGDGPFSQIVVICSAEGEPSAAPTDVKATSVSVSEILVAWKHIKESLGRPQGFEVGYWKDMEQEDTAETVKTRGNESFVILTGLEGNTLYHFTVRAYNGAGYGPPSSEVSATTKKSPPSQAPSNLRWEQQGSQVSLGWEPVIPLANESEVVGYKVFYRQEGHSNSQVIETQKLQAVVPLPDAGVYIIEVRAYSEGGDGTASSQIRVPSYSGGKITSAQSTLHSLSTSSSSVTLLLALMIPSTSW

SEQ ID NO: 2864 - DNA, 3942 bp, Homo sapiens
aattcgcctctgccacaggctgcaaaggacccgaggaaccgctctctctgaactgtgctgatgggcaggaggatgggagacaggaattgagagtcacagaggaaggacagtggagtctggcatcttattggtgtctttaaaggattgccatttaatgccattcaagatctactaagcatcatttttgcatgactactgcaaaaggattactttacagataccagttcctttgtcaagagcatactttggaccctgttttcagaaagcagggcactctttaatgaagaaacaccagagctgttaaacacattgagacacagaagattctagtgactgaggatggcttcctcttggaaactaatgctgtttctgtcagtcaccatgtgtctttcagaaagtgtggactatgggccagtttttgtgcaagaaccagatgatattatttttccaactgattctgatgaaaagaaggtagcattgaattgtgaagttcgtggcaatccagttcccagttacagatggcttcgaaatggaacagaaatagatctggaaagtgattatcgctacagtttgatagatggcaccttcattataagcaatccaagtgaagcaaaggattctggtcattatcagtgtttagcaaccaacactgtggggagtattcttagtagagaagctacactgcagtttgcctatctgggaaattttagtggccggacaagaagtgcagtctctgtgagggaaggccagggtgtcgttctgatgtgctctcctccgccacattcaccagagatcatctatagctgggtatttaatgagttcccttcctttgtggcggaagacagccggcggttcatctcccaggagacaggcaacctttatatttctaaagtccaaacatcagatgttggcagctatatttgtctggtgaaaaacacagtgacgaatgctagagtccttagtcctccaacgccactcactctgcgtaatgatggtgtgatgggagaatatgagccgaaaattgaggtccattttcctttcacggttacagctgctaaaggaacaactgttaagatggaatgctttgcacttggcaaccccgttccaacaatcacatggatgaaggttaatggttatattcctagtaaggcacgtctgcggaaatctcaggcggtgctggaaataccgaatgtacagctggatgatgcaggcatttatgagtgcagagctgaaaactcacgtggaaaaaattcctttcgtggacaattacaagtatacacctacccacactgggtagaaaaactgaatgatactcagttagacagtgggagccctctccgatgggaatgtaaggctactggaaaacccagacccacgtatcgttggctgaagaatggagtacccctctcacctcagagtagggttgagatggttaatggagtattgatgatccacaatgtgaatcaatcagatgctggaatgtatcagtgtttggctgaaaataagtatggagccatttacgctagtgctgagctgaagattctagcttcagctcccacttttgcactgaatcaactgaagaaaacaataattgttaccaaagaccaagaagttgtcatagagtgcaaaccccaaggctctccaaaaccaaccatctcttggaagaaaggagacagagcagttagagaaaacaaaagaatagctattcttccagacgggagtctacggatcctaaatgcttccaaatcagacgagggaaagtacgtttgccgaggggaaaacgtctttggttctgctgaaattatagcttcgctatctgtaaaagaacctacaaggatagaacttactcctaaaagaacagaattgacagtgggagaaagcattgtccttaattgcaaagcaattcacgatgctagtttggatgtcactttctactggactctgaaaggacagcctattgatttcgaggaagagggtggacattttgaaagcatcagggcccaagcatcctctgcagatttaatgatcaggaacatccttctgatgcatgctgggagatatggctgcagggtacagaccacagcagacagtgtgtcagatgaggcagaacttcttgttaggggacccccaggcccacctgggatagtaattgttgaggaaataaccgaaagtacggccacactgtcctggagcccagcagctgacaaccacagcccaatctcctcctacaaccttcaagctcgcagcccattttccctgggctggcaaacagtaaagacagtcccagaaatcataacaggggacatggagtcagccatggctgtggacctaaatccctgggtggaatatgaatttcgagtggtagccaccaaccctattgggacaggagatccaagcaccccatctcgaatgatccgcacaaatgaagcagttccgaagacagcacccaccaatgtaagcggaagaagtggaagaaggcatgagttagtcattgcctgggagccagtatctgaagagtttcagaatggggaaggcttcggctatattgtggctttcagacccaatggaacacgtggctggaaggaaaaaatggtgacatcctctgaagcttccaaattcatttatcgagatgaaagtgtccctcctcttactccctttgaagtgaaagttggcgtttataacaataaaggagatgggccttttagtcaaattgtggtcatctgttcagctgaaggagaacccagtgctgctcccacagatgtcaaggcgacaagtgtgtctgtgtcagagattcttgttgcatggaaacacattaaagagagtctaggaagaccacagggatttgaggttggttactggaaagacatggaacaggaagatacagcagaaacagtcaaaactagagggaatgagtctttcgtcatcctaacaggattagaaggaaatacgttatatcacttcacagtgagggcttacaatggagctggatatgggccacctagcagtgaagtgagtgcaaccaccaagaaatcccctcctagtcaagcacctagcaacctcaggtgggagcagcaaggctctcaggtttctctgggctgggaacccgtcataccattagccaacgaatctgaagttgtgggttacaaggttttttataggcaagagggtcacagcaacagccaagttattgaaacacagaaacttcaagcagtagtaccactcccagatgctggagtctatattattgaagttcgagcatatagtgaaggaggagatggaacagctagttctcaaattagggtaccatcatattcaggtggaaaaatcacaagtgcacagtcgacccttcactctctctccacatcttcgtcatcagtcaccttgctcttggcattgatgattccttcaacttcctggtgaaaactgctgacttaatttgcttttgtttgctttagcttggtaacagcggtgaatagagtgtagtgtaagtggagaaccaggatcctgagatgagcttgagctttaaaaacttgggactatacatggtgaacttacaggaggttaggggggaaatattacttatccatcaggtttctctttggtttttgtaaacggagaggacagttcttagtccagtaaaaatatgcagattgtatgtaatgaatttttgtaaacaaaggtaatttctgtcaaatgtattctttacttttttaatatgttgggattttattttatatctgatgactccgagtgtgtgccatccatttgttaagtaactggcctttagcagatctgtttcaaaaacaaatacaaaaatgagaatgaaaagtttgcttaagactaagtccagtgtttttcattttccctttggctgaatatttcaattgacaaaccagcaggacatatgaaaaatgcttcagtgatgtggtccattataagata

SEQ ID NO: 2865 - protein, 1026 aa, Homo sapiens
MASSWKLMLFLSVTMCLSESVDYGPVFVQEPDDIIFPTDSDEKKVALNCEVRGNPVPSYRWLRNGTEIDLESDYRYSLIDGTFIISNPSEAKDSGHYQCLATNTVGSILSREATLQFAYLGNFSGRTRSAVSVREGQGVVLMCSPPPHSPEIIYSWVFNEFPSFVAEDSRRFISQETGNLYISKVQTSDVGSYICLVKNTVTNARVLSPPTPLTLRNDGVMGEYEPKIEVHFPFTVTAAKGTTVKMECFALGNPVPTITWMKVNGYIPSKARLRKSQAVLEIPNVQLDDAGIYECRAENSRGKNSFRGQLQVYTYPHWVEKLNDTQLDSGSPLRWECKATGKPRPTYRWLKNGVPLSPQSRVEMVNGVLMIHNVNQSDAGMYQCLAENKYGAIYASAELKILASAPTFALNQLKKTIIVTKDQEVVIECKPQGSPKPTISWKKGDRAVRENKRIAILPDGSLRILNASKSDEGKYVCRGENVFGSAEIIASLSVKEPTRIELTPKRTELTVGESIVLNCKAIHDASLDVTFYWTLKGQPIDFEEEGGHFESIRAQASSADLMIRNILLMHAGRYGCRVQTTADSVSDEAELLVRGPPGPPGIVIVEEITESTATLSWSPAADNHSPISSYNLQARSPFSLGWQTVKTVPEIITGDMESAMAVDLNPWVEYEFRVVATNPIGTGDPSTPSRMIRTNEAVPKTAPTNVSGRSGRRHELVIAWEPVSEEFQNGEGFGYIVAFRPNGTRGWKEKMVTSSEASKFIYRDESVPPLTPFEVKVGVYNNKGDGPFSQIVVICSAEGEPSAAPTDVKATSVSVSEILVAWKHIKESLGRPQGFEVGYWKDMEQEDTAETVKTRGNESFVILTGLEGNTLYHFTVRAYNGAGYGPPSSEVSATTKKSPPSQAPSNLRWEQQGSQVSLGWEPVIPLANESEVVGYKVFYRQEGHSNSQVIETQKLQAVVPLPDAGVYIIEVRAYSEGGDGTASSQIRVPSYSGGKITSAQSTLHSLSTSSSSVTLLLALMIPSTSW

SEQ ID NO: 2866 - DNA, 2920 bp, Homo sapiens
gagtcatctgatagctcatcaagctctgaagatgagtgggttgaggctgttccatcccagactcctgacaaggaaaaagcctggaaagtgaaagatgaaaagtcaggaaaagatgacacccaaattatcaagagggatgagtggatgactgttgattttatgtctgttaaaactgtgtcatcatcatcactcaaagctgaaaaggaaactatgaggaaaatagagcaagagaaaaaccaagcgcttgaacagtccaaactgatggaaagagaattgaatccgtactggaaggatggtgggacaggtcttccacctgaagactgtagtgtgtcatcgattactaaagtttcagtggtagaagatggtggattaagctggctaaggaaatcttatctaagaatgaaggaacaagctgagaaacaaagtagaaactttgaggacattgtagccgaaagatatgggtcaatggaaatatttcagtcaaaattagaagatgctgaaaaagctgcatccacgaaagaagattatagacgggaacggtggaggaaacccacatattcagataaagcacaaaattgtcaagaaagtagagaatcagacttagtaaaatatggtaacagttcaagggatagatatgctacaacagatactgcaaaaaatagcaataatgaaaaatttattggtgatgaaaaagataagagacctgggtctttagaaacgtgtagaagagaatctaacccaaggcaaaatcaagagttttcttttggcaatttgagagctaaattcttgagaccctctgatgatgaagaactgtcatttcacagcaagggcagaaaatttgaaccacttagttcatcttcagcattggtagctcagggctctttgtgtagtggttttagaaaacccaccaagaacagtgaagaaagattaacatcatggagtcgctctgatgggagaggagacaagaaacattcaaatcaaaagccatcggaaaccagtactgatgaacaccaacatgttccagaagacccaagagaaaaatcacaagatgaagtcttgagagatgaccctccaaaaaaagaacatctacgggatacaaagtctacatttgctggcagtccagagcgtgagtccattcacatcctgagtgttgatgagaagaacaagttgggagccaagattatcaaagcagagatgatggggaatatggaattagctgaacaacttaaagttcaacttgaaaaggcaaataaattcaaagaaactataacacagataccaaaaaaatctggggtagagaatgaagaccagcaagaagtaatccttgtcagaacagatcagtctggaagagtatggcctgtgaacacacccggaaagtctctggaatcacaaggaggaagaagaaagagacagatggtttcaacccatgaggaaagagaaagggtcagatactttcatgatgatgataatctaagcctaaatgatttagtcaaaaatgaaaagatgggaacagcagaaaatcaaaacaagctctttatgagaatggcatctaagtttatgggaaaaacagatggagactattacaccctggatgacatgtttgtctccaaagcagctgagagagaacgtcttggtgaagaggaagagaaccaaaggaaaaaagctattgctgagcatcggagtcttgctgcacaaatggaaaaatgtctgtattgttttgacagctctcaatttcccaagcatcttattgttgcaataggtgttaaggtttatttatgtttacccaacgtacggtctcttactgaggggcactgcctgatagtccctttgcagcaccatagagcagctactttgttggatgaagacatctgggaggagatccagatgttcagaaaatcattggtaaagatgtttgaagataaaggattagactgcatttttttggaaactaatatgagcatgaagaaacagtatcacatggtttatgaatgtattcctcttcccaaggaagtgggtgacatggctcccatctattttaagaaagccataatggaatctgatgaagagtggtccatgaacaagaagttgatagatctctcttcaaaagatatcagaaagtctgtacccagagggttaccttacttctctgtggattttggccttcacggagggtttgcccatgtcattgaagatcagcacaaattccctcattactttggaaaggaaatcataggtgggatgctggatatagaaccaagactttggaggaaaggcatccgagaaagctttgaggatcagaggaaaaaagcactgcagtttgctcagtggtggaaaccatatgacttcaccaaaagtaaaaactattgaggtgtaccttccattttaaaatttttcttcagatcccgttcagttttatttccattgcatctaatgaagcaactgaccctcaggtcacaggcagagagaatcacagcagcagactgctctgggtcagtgacaactgtacatcaggagattgtgttgttttcttcttcacctgctcctatctatggacttcattttagtcaccatggagtaaaaacatatattcgatgatctgctcacattcctgctctctacctacttcttggtattccgaattgttcagttaatttagagaaggccttttctgaagggatatctagaaagcataggaaatccttggttcagagggaagtgggtctgcttcatggttgttaagtctactgtctggcttcttttgcatttttaaaaataagacgatttaattttaatttcataggattttatagaaaagctcttaattttctactagcagtatatagtatcacttctattctttttgttaaaggaaaaggaaatgtccccaaagtattaaagaattaaatgatactgaaaattt

SEQ ID NO: 2867 - protein, 740 aa, Homo sapiens
MTVDFMSVKTVSSSSLKAEKETMRKIEQEKNQALEQSKLMERELNPYWKDGGTGLPPEDCSVSSITKVSVVEDGGLSWLRKSYLRMKEQAEKQSRNFEDIVAERYGSMEIFQSKLEDAEKAASTKEDYRRERWRKPTYSDKAQNCQESRESDLVKYGNSSRDRYATTDTAKNSNNEKFIGDEKDKRPGSLETCRRESNPRQNQEFSFGNLRAKFLRPSDDEELSFHSKGRKFEPLSSSSALVAQGSLCSGFRKPTKNSEERLTSWSRSDGRGDKKHSNQKPSETSTDEHQHVPEDPREKSQDEVLRDDPPKKEHLRDTKSTFAGSPERESIHILSVDEKNKLGAKIIKAEMMGNMELAEQLKVQLEKANKFKETITQIPKKSGVENEDQQEVILVRTDQSGRVWPVNTPGKSLESQGGRRKRQMVSTHEERERVRYFHDDDNLSLNDLVKNEKMGTAENQNKLFMRMASKFMGKTDGDYYTLDDMFVSKAAERERLGEEEENQRKKAIAEHRSLAAQMEKCLYCFDSSQFPKHLIVAIGVKVYLCLPNVRSLTEGHCLIVPLQHHRAATLLDEDIWEEIQMFRKSLVKMFEDKGLDCIFLETNMSMKKQYHMVYECIPLPKEVGDMAPIYFKKAIMESDEEWSMNKKLIDLSSKDIRKSVPRGLPYFSVDFGLHGGFAHVIEDQHKFPHYFGKEIIGGMLDIEPRLWRKGIRESFEDQRKKALQFAQWWKPYDFTKSKNY

SEQ ID NO: 2868 - DNA, 1685 bp, Homo sapiens
ggcgtgcaagtatccgctgcggtgttctggtgctagagtggagaggctggcaaagaagaaggcacacgcatggtgagaatccggcctgagccgaagcggagtttgctatggacagcaaccatcaaagtaattacaaactcagtaaaactgagaagaagttcttaaggaaacagattaaagccaagcatactttgctgagacatgaaggcattgagacagtatcctatgccactcagagcctggttgttgccaatggtggtttgggtaatggtgtgagtcggaaccagctgctcccggttttagagaaatgtggactggtggatgctctcttaatgccacctaacaagccgtactcatttgcaagatacagaactacagaagaatctaagagagcctatgttaccctcaatggaaaagaagtagtggatgatttaggacaaaagatcactctgtatttgaattttgtggaaaaagtgcagtggaaggagttgaggcctcaagccttaccaccaggactcatggtagtagaagaaataatttcttctgaggaggagaaaatgcttttggaaagtgttgattggacagaagatacagacaatcaaaactctcaaaaatccttaaaacacagaagagtaaagcattttggttatgagttccactatgagaacaacaatgtagataaagataagccattatctgggggtcttcctgacatttgtgaaagctttttggagaaatggttgaggaaaggttacattaaacataaacctgatcaaatgaccataaatcagtatgaacctgggcaagattgtcatggattttaagcacccagatggcattgcagtgccagttatgttgcctcgtcggagtttgctggtgatgacaggagaatctagatacctttggacccatggaatcacgtgcagaaaatttgatactgttcaagcatctgagagtcttaaaagtggaattatcaccagtgatgttggagacttaactttaagcaagaggggactacgaacatcatttacatttaggaaagtgaggcaaacaccttgtaactgtagagcgtagagtggcagctctccaagaaattgttcgactcctgagaccaggtgggaaggcactcatttatgtctgggcaatggaacaagaatataataagcagaagtccaagtatcttagaggaaacagaaatagccaaggaaagaaagaggagatgaacagtgatacctcagtgcagaggtcacttgtggagcaaatgcgtgacatgggcagtcgagactcggcatcttctgtcccccgcattaatgactctcaggaaggaggatgtaattcaaggcaagtttctaattccaagctgcctgttcatgttaacaggacttctttttattctcaagatgtactggttccctggcaccttaagggaaatcctgataaaggcaaacctgttgagccatttggtcccataggatcccaggacccaagtcctgtgtttcatcgttactaccatgtgttccgtgagggagaactggaaggtgcctgcaggactgtgagtgatgtcagaattctgcaaagctactacgatcaaggaaactggtgtgtgattcttcaaaaggcctgattatttacctgaacacatcatatataaagaagaaatgctcacttaaaaaaaaaaaaaaaaa

SEQ ID NO: 2869 - protein, 238 aa, Homo sapiens
MDSNHQSNYKLSKTEKKFLRKQIKAKHTLLRHEGIETVSYATQSLVVANGGLGNGVSRNQLLPVLEKCGLVDALLMPPNKPYSFARYRTTEESKRAYVTLNGKEVVDDLGQKITLYLNFVEKVQWKELRPQALPPGLMVVEEIISSEEEKMLLESVDWTEDTDNQNSQKSLKHRRVKHFGYEFHYENNNVDKDKPLSGGLPDICESFLEKWLRKGYIKHKPDQMTINQYEPGQDCHGF

SEQ ID NO: 2870 - DNA, 2741 bp, Homo sapiens
ggggatgaagaccacgccgccgcgcgccgggagctgctgagcctaccgccgccagagtccagttgacacttactttgacaaaggcaaatttggaagcaattacttgaggacagttcatatagcatctggacagtcaacacgggcaccatgaagcacttcctgagaatgttgatccaggtatgcctgtatttttactgtaaatttctgtggcgctgcctgaaatttgtaatgaggaagctaactggaagatgtgaactacaacggatctgttataataccaagccgggagcttctagaaccatgaaaatcgaaacatcactgagggattctaaaagtaagctgttgcagacttctgtgagtgttcaccccgacgctattgaaaaaactatagaagatatcatggaactgaaaaaaattaatcctgacgtaaatccacagctgggaatctctcttcaggcttgccttctgcaaatcgttgggtacaggaaccttattgcagatgtggaaaaactgcgtagagaggcctatgattctgataatccccaacatgaagaaatgcttttgaagttatggaaattcttgaagcccaatactccactggaatctcggatttctaagcagtggtgtgaaattggtttccaaggtgatgatcctaaaacagactttcgaggaatgggacttctgggactgtacaatttgcagtatttcgcggaaagggatgccacagcagctcagcaggtcctgtctgactctcttcatccgaaatgcagggatatcactaaagaagaaataagcaaattcagcaaagcagaatgggagaagaaaaggatggataaggcaattgggtactcatttgcaattgtgggcatcaatataactgacctggcatataatctactggtcagcggagctctaaaaacccatttctacaatatcgccccagaagctccaacattgtctcactttcagcaaacattctgctatttgatgcatgaatttcataagttttggatcgaagaggaccccatggacataatggaatttaatcgtgtgagggagaaattccgcaagaggatcatcaaacagctgcagaacccagacatggcgctgtgcccacattttgctgcctcggaaggtttaatcaacatgtagttgcccacgccggttttaatggataccctggaacactgcctcattgtcttgttagatctctgcttaggtcgcagctcacgcattgaatgcacacagtgattgtatgcatgccttttggtacagtgttttcatctcttggtcataattccgagatccccagagaccactgtttctggagtatctgtcatccagtgactgctcatattgtggcattatgcagtgttacatcttgccttgatacccaggtatggagagagttttctatttttttagactttttttcctctccctcgtaattcagcattaaagaattgtatttctctagctgtattttgtatgtaagaggtttagctgaatctcattctgtgaaagccttttaatttattgaaatgtttcatgactactgctgctagctcttcaagccaggttcatgcttggacctcattctgataaagtataagactttaaaataatacaaaacagggccgggcgcagtggctcacacctgtaatcccagcactttggggagctgaggcgggcggatcacgaggtcaagagatcgagaccatcctggccaacatggtgaaaccccgtctctactaaaaataacaaaaattagctgggcgtggtggtgggtgcctgtaatcccagctactcgggaggctgaggcaggagaatcgcttgaacccgggaggtggaggttgcagtgagccgagatcataccactgcactccagcctggcgacagagcaagactccatctcaaaaataattaaataaataaataaataaataaataaataaataaataaaatagtacagacagacacatgataagccaaactgttcctgcaaacatagctatgcttcatgaggcttacaagaagtaactttaggtaggagctgtttttgtttgaagtactgcagaattatattgtaacttcccctcaccccagttgcaattgtgtcatagtcatctgtatatcaaactattttattcccataacttcattggcttggatgcctaagtgtatgatgcttgaagcctcagaaaagaaataagcatatttcaaaagctgcaaaaggtttttcactgcctgcctcttgcggaactgggttacaccctggcactgttctgatccaagcatatttgcttggggaactaagtgctgactagtttgttttctatgtcaaggggcaatattaaaaaacaatttgcaagaaaatgtgtttcaagagagcaacctaagctaagtcactctgcgatatttcttgaaaataacgaccttgtcttgtatcagtggaagaagtaagttgcttagaaagggaaaagtcaaattgttccagaactgctaaaaatcattttaaaaaccatgatttagtttggaattatgattgtagtctgttgaatagtatttaccatggcatttcatacccatggtattttataccttctgactatcaattttagtattattagatgtttgtgtaaccacttgcttatttaaatgaattttgagtactgcctaattgtcagttatatgaataaattacatgtcattctactgtaacgtaaaaaaaaaaaaaaaa

SEQ ID NO: 2871 - protein, 283 aa, Homo sapiens [sequence omitted]

SEQ ID NO: 2872 - DNA, 716 bp, Homo sapiens
agacagcctgggagggagaaggagttggagctcaagttggagacagcgaggagaaacctgccatagccagggtgtgtctttgatcctcttcaggaggtgaggacaagccagaggtccttggtgtgccctcagaaatctgcctgcagttctcaccaagccgctgtgaaaatggggataaacacccgggagctgtttctcaacttcactattgtcttgattacggttattcttatgtggctccttgtgaggtcctatcagtactgagaggccatgccatggtcctgggattgactgagatgctccggagctgcctgctctatgccctgagaccccactgctgtcattgtcacaggatgccattctccatccgagggcacctgtgacctgcactcacaatatctgctatgctgtagtgctaggattgattatgtgttctccaaagatgctgctcccaagggctgccaagtgtttgccagggaacggtagatttattccccaactcttaactgaaaatgtgttagacaagccacaaagttaaaattaaactggattcatgatgatgtaggattgttacaagcccctgatctgtctcaccacacatcccttcaacccacacggtctgcaaccaaactctaattcaacctgccagaaggaatgttagaggaagtctttgtcagcccttatagctatcatgtgaataaagttaagtcaacttc

SEQ ID NO: 2873 - protein, 31 aa, Homo sapiens
MGINTRELFLNFTIVLITVILMWLLVRSYQY

SEQ ID NO: 2874 - DNA, 2960 bp, Homo sapiens
gaattcgaggatccgggtaccatggcgcgtgaacgcagctcggctgccgctggcaggaaacaattctgcaaaaataatcatactcagcctggcaattgtctgcccctaggtctgtcgctcagccgccgtccacactcgctgcaggggggggggcacagaatttaccgcggcaagaacatccctcccagccagcagattacaatgctgcaaactaaggatctcatctggactttgtttttcctgggaactgcagtttctctgcaggtggatattgttcccagccagggggagatcagcgttggagagtccaaattcttcttatgccaagtggcaggagatgccaaagataaagacatctcctggttctcccccaatggagaaaagctcaccccaaaccagcagcggatctcagtggtgtggaatgatgattcctcctccaccctcaccatctataacgccaacatcgacgacgccggcatttacaagtgtgtggttacaggcgaggatggcagtgagtcagaggccaccgtcaacgtgaagatctttcagaagctcatgttcaagaatgcgccaaccccacaggagttccgggagggggaagatgccgtgattgtgtgtgatgtggtcagctccctcccaccaaccatcatctggaaacacaaaggccgagatgtcatcctgaaaaaagatgtccgattcatagtcctgtccaacaactacctgcagatccggggcatcaagaaaacagatgagggcacttatcgctgtgagggcagaatcctggcacggggggagatcaacttcaaggacattcaggtcattgtgaatgtgccacctaccatccaggccaggcagaatattgtgaatgccaccgccaacctcggccagtccgtcaccctggtgtgcgatgccgaaggcttcccagagcccaccatgagctggacaaaggatggggaacagatagagcaagaggaagacgatgagaagtacatcttcagcgacgatagttcccagctgaccatcaaaaaggtggataagaacgacgaggctgagtacatctgcattgctgagaacaaggctggcgagcaggatgcgaccatccacctcaaagtctttgcaaaacccaaaatcacatatgtagagaaccagactgccatggaattagaggagcaggtcactcttacctgtgaagcctccggagaccccattccctccatcacctggaggacttctacccggaacatcagcagcgaagaaaagactctggatgggcacatggtggtgcgtagccatgcccgtgtgtcgtcgctgaccctgaagagcatccagtacactgatgccggagagtacatctgcaccgccagcaacaccatcggccaggactcccagtccatgtaccttgaagtgcaatatgccccaaagctacagggccctgtggctgtgtacacttgggaggggaaccaggtgaacatcacctgcgaggtatttgcctatcccagtgccacgatctcatggtttcgggatggccagctgctgccaagctccaattacagcaatatcaagatctacaacaccccctctgccagctatctggaggtgaccccagactctgagaatgattttgggaactacaactgtactgcagtgaaccgcattgggcaggagtccttggaattcatccttgttcaagcagacaccccctcttcaccatccatcgaccaggtggagccatactccagcacagcccaggtgcagtttgatgaaccagaggccacaggtggggtgcccatcctcaaatacaaagctgagtggagagcagttggtgaagaagtatggcattccaagtggtatgatgccaaggaagccagcatggagggcatcgtcaccatcgtgggcctgaagcccgaaacaacgtacgccgtaaggctggcggcgctcaatggcaaagggctgggtgagatcagcgcggcctccgagttcaagacgcagccagtccaaggggaacccagtgcacctaagctcgaagggcagatgggagaggatggaaactctattaaagtgaacctgatcaagcaggatgacggcggctcccccatcagacactatctggtcaggtaccgagcgctctcctccgagtggaaaccagagatcaggctcccgtctggcagtgaccacgtcatgctgaagtccctggactggaatgctgagtatgaggtctacgtggtggctgagaaccagcaaggaaaatccaaggcggctcattttgtgttcaggacctcggcccagcccacagccatcccagccaacggcagccccacctcaggcctgagcaccggggccatcgtgggcatcctcatcgtcatcttcgtcctgctcctggtggttgtggacatcacctgctacttcctgaacaagtgtggcctgttcatgtgcattgcggtcaacctgtgtggaaaagccgggcccggggccaagggcaaggacatggaggagggcaaggccgccttctcgaaagatgagtccaaggagcccatcgtggaggttcgaacggaggaggagaggaccccaaaccatgatggagggaaacacacagagcccaacgagaccacgccactgacggagcccgagaagggccccgtagaagcaaagccagagtgccaggagacagaaacgaagccagcgccagccgaagtcaagacggtccccaatgacgccacacagacaaaggagaacgagagcaaagcatgatgggtgaagagaaccgagcaaagatcaaaataaaaagtgacacagcagcttcaccagagcatttccaacaccacagacacacacacgcacacacacacacaattctaggctagtttctggtcttatcattgagttacagcttagtgatgattttaagacaaaacaaacaaacaaaaaaaaaaaaaaaccatggtacccggatcctcgaattc

SEQ ID NO: 2875 - protein, 848 aa, Homo sapiens
MLQTKDLIWTLFFLGTAVSLQVDIVPSQGEISVGESKFFLCQVAGDAKDKDISWFSPNGEKLTPNQQRISVVWNDDSSSTLTIYNANIDDAGIYKCVVTGEDGSESEATVNVKIFQKLMFKNAPTPQEFREGEDAVIVCDVVSSLPPTIIWKHKGRDVILKKDVRFIVLSNNYLQIRGIKKTDEGTYRCEGRILARGEINFKDIQVIVNVPPTIQARQNIVNATANLGQSVTLVCDAEGFPEPTMSWTKDGEQIEQEEDDEKYIFSDDSSQLTIKKVDKNDEAEYICIAENKAGEQDATIHLKVFAKPKITYVENQTAMELEEQVTLTCEASGDPIPSITWRTSTRNISSEEKTLDGHMVVRSHARVSSLTLKSIQYTDAGEYICTASNTIGQDSQSMYLEVQYAPKLQGPVAVYTWEGNQVNITCEVFAYPSATISWFRDGQLLPSSNYSNIKIYNTPSASYLEVTPDSENDFGNYNCTAVNRIGQESLEFILVQADTPSSPSIDQVEPYSSTAQVQFDEPEATGGVPILKYKAEWRAVGEEVWHSKWYDAKEASMEGIVTIVGLKPETTYAVRLAALNGKGLGEISAASEFKTQPVQGEPSAPKLEGQMGEDGNSIKVNLIKQDDGGSPIRHYLVRYRALSSEWKPEIRLPSGSDHVMLKSLDWNAEYEVYVVAENQQGKSKAAHFVFRTSAQPTAIPANGSPTSGLSTGAIVGILIVIFVLLLVVVDITCYFLNKCGLFMCIAVNLCGKAGPGAKGKDMEEGKAAFSKDESKEPIVEVRTEEERTPNHDGGKHTEPNETTPLTEPEKGPVEAKPECQETETKPAPAEVKTVPNDATQTKENESKA

SEQ ID NO: 2876 - DNA, 4050 bp, Homo sapiens
gcgcgtgaacgcagctcggctgccgctggcaggaaacaattctgcaaaaataatcatactcagcctggcaattgtctgcccctaggtctgtcgctcagccgccgtccacactcgctgcagggggggggggcacagaatttaccgcggcaagaacatccctcccagccagcagattacaatgctgcaaactaaggatctcatctggactttgtttttcctgggaactgcagtttctctgcaggtggatattgttcccagccagggggagatcagcgttggagagtccaaattcttcttatgccaagtggcaggagatgccaaagataaagacatctcctggttctcccccaatggagaaaagctcaccccaaaccagcagcggatctcagtggtgtggaatgatgattcctcctccaccctcaccatctataacgccaacatcgacgacgccggcatttacaagtgtgtggttacaggcgaggatggcagtgagtcagaggccaccgtcaacgtgaagatctttcagaagctcatgttcaagaatgcgccaaccccacaggagttccgggagggggaagatgccgtgattgtgtgtgatgtggtcagctccctcccaccaaccatcatctggaaacacaaaggccgagatgtcatcctgaaaaaagatgtccgattcatagtcctgtccaacaactacctgcagatccggggcatcaagaaaacagatgagggcacttatcgctgtgagggcagaatcctggcacggggggagatcaacttcaaggacattcaggtcattgtgaatgtgccacctaccatccaggccaggcagaatattgtgaatgccaccgccaacctcggccagtccgtcaccctggtgtgcgatgccgaaggcttcccagagcccaccatgagctggacaaaggatggggaacagatagagcaagaggaagacgatgagaagtacatcttcagcgacgatagttcccagctgaccatcaaaaaggtggataagaacgacgaggctgagtacatctgcattgctgagaacaaggctggcgagcaggatgcgaccatccacctcaaagtctttgcaaaacccaaaatcacatatgtagagaaccagactgccatggaattagaggagcaggtcactcttacctgtgaagcctccggagaccccattccctccatcacctggaggacttctacccggaacatcagcagcgaagaaaaggcttcgtggactcgaccagagaagcaagagactctggatgggcacatggtggtgcgtagccatgcccgtgtgtcgtcgctgaccctgaagagcatccagtacactgatgccggagagtacatctgcaccgccagcaacaccatcggccaggactcccagtccatgtaccttgaagtgcaatatgccccaaagctacagggccctgtggctgtgtacacttgggaggggaaccaggtgaacatcacctgcgaggtatttgcctatcccagtgccacgatctcatggtttcgggatggccagctgctgccaagctccaattacagcaatatcaagatctacaacaccccctctgccagctatctggaggtgaccccagactctgagaatgattttgggaactacaactgtactgcagtgaaccgcattgggcaggagtccttggaattcatccttgttcaagcagacaccccctcttcaccatccatcgaccaggtggagccatactccagcacagcccaggtgcagtttgatgaaccagaggccacaggtggggtgcccatcctcaaatacaaagctgagtggagagcagtgggtgaagaagtatggcattccaagtggtatgatgccaaggaagccagcatggagggcatcgtcaccatcgtgggcctgaagcccgaaacaacgtacgccgtaaggctggcggcgctcaatggcaaagggctgggtgagatcagcgcggcctccgagttcaagacgcagccagtccaaggggaacccagtgcacctaagctcgaagggcagatgggagaggatggaaactctattaaagtgaacctgatcaagcaggatgacggcggctcccccatcagacactatctggtcaggtaccgagcgctctcctccgagtggaaaccagagatcaggctcccgtctggcagtgaccacgtcatgctgaagtccctggactggaatgctgagtatgaggtctacgtggtggctgagaaccagcaaggaaaatccaaggcggctcattttgtgttcaggacctcggcccagcccacagccatcccagccaacggcagccccacctcaggcctgagcaccggggccatcgtgggcatcctcatcgtcatcttcgtcctgctcctggtggttgtggacatcacctgctacttcctgaacaagtgtggcctgttcatgtgcattgcggtcaacctgtgtggaaaagccgggcccggggccaagggcaaggacatggaggagggcaaggccgccttctcgaaagatgagtccaaggagcccatcgtggaggttcgaacggaggaggagaggaccccaaaccatgatggagggaaacacacagagcccaacgagaccacgccactgacggagcccgagaagggccccgtagaagcaaagccagagtgccaggagacagaaacgaagccagcgccagccgaagtcaagacggtccccaatgacgccacacagacaaaggagaacgagaacaaagcatgatgggtgaagagaaccgagcaaagatcaaaataaaaagtgacacagcagcttcaccagagcatttccaacaccacagacacacacacgcacgcacacacacaaacacacatgcacacacacacatctcatttctctagtgtcttttgcctttaaaaaaaactaaacagataaaacatgggaatctcctttttgtaggtttatagaaagggtccctttgttgcacactcacttgtaagaaaatgagacaaaaaggttaaacccacagccaaactaggacactccgttccctgaaaccgttaaaaaatcaaacaaaaggaccccaaattaagaatctaggaagctcagaaacgaaatctaggttcaggaagaccacacttggtgttacccgattggcacagaccagtttcagagaaatactttcaggcactaagactaatcgaatgaacaaagtccacagtttatttttatactttcagtcaagtttgaactctgtaaaacctcataaataagttataatttctgttcactttgtatttgttcagtatgcaaagtgtgtcaccctttctagctgaattcaattcccacgtagactcttattttataggacgaatgccaaattgcagcttctgggggtagatctcaatttgcagtattcagacttctttttctttcttttacattcttttttctttctttctttctgccaactttgttttccagtgtttacaaggtgacaaatgtttgactttggttgtgtttaaatgtccgtgtaaaatagctgccttttattttttaaggtaacaaataccacctagaggtaggtaggatcatcccacgcttgctttagcacaggacaactttacaaaacatgattgtttacagctgctcttcccctcttttctgatctgcagtttttgcctgggtcccactcaggtgaaaatccatctcattctggaatggttttgcttttgaatttttggttatttttgtgtttctttgggggttagaccactttctgattagccgccacctgcctgcatctgtgaaaagggatctgctcccaggcgttctcacccttcttttgaaggactccttaggctttgttgaatgaagcagagaagattgtatagttggggctggtcttggtgaacacacattattaccccacacatcccctttgtgtagaaagccaaataaaatctatacataccaaaaaaaaaaaaaaaaaaaaaaaaaaaaaaaaaaaaaaaaaaaaaaaaaaaaaaaaaaaaaaaaaaaaaaaaaaaaaaaaaaaa

SEQ ID NO: 2877 - protein, 858 aa, Homo sapiens
MLQTKDLIWTLFFLGTAVSLQVDIVPSQGEISVGESKFFLCQVAGDAKDKDISWFSPNGEKLTPNQQRISVVWNDDSSSTLTIYNANIDDAGIYKCVVTGEDGSESEATVNVKIFQKLMFKNAPTPQEFREGEDAVIVCDVVSSLPPTIIWKHKGRDVILKKDVRFIVLSNNYLQIRGIKKTDEGTYRCEGRILARGEINFKDIQVIVNVPPTIQARQNIVNATANLGQSVTLVCDAEGFPEPTMSWTKDGEQIEQEEDDEKYIFSDDSSQLTIKKVDKNDEAEYICIAENKAGEQDATIHLKVFAKPKITYVENQTAMELEEQVTLTCEASGDPIPSITWRTSTRNISSEEKASWTRPEKQETLDGHMVVRSHARVSSLTLKSIQYTDAGEYICTASNTIGQDSQSMYLEVQYAPKLQGPVAVYTWEGNQVNITCEVFAYPSATISWFRDGQLLPSSNYSNIKIYNTPSASYLEVTPDSENDFGNYNCTAVNRIGQESLEFILVQADTPSSPSIDQVEPYSSTAQVQFDEPEATGGVPILKYKAEWRAVGEEVWHSKWYDAKEASMEGIVTIVGLKPETTYAVRLAALNGKGLGEISAASEFKTQPVQGEPSAPKLEGQMGEDGNSIKVNLIKQDDGGSPIRHYLVRYRALSSEWKPEIRLPSGSDHVMLKSLDWNAEYEVYVVAENQQGKSKAAHFVFRTSAQPTAIPANGSPTSGLSTGAIVGILIVIFVLLLVVVDITCYFLNKCGLFMCIAVNLCGKAGPGAKGKDMEEGKAAFSKDESKEPIVEVRTEEERTPNHDGGKHTEPNETTPLTEPEKGPVEAKPECQETETKPAPAEVKTVPNDATQTKENENKA

SEQ ID NO: 2878 - DNA, 2330 bp, Homo sapiens
cttggtcccgccccgggcccctggctcctggccccgccccagcccaggcaggtcactgcgccatttcctgtccaaagctgggcgaatcagggattccggttcacaatggatgctgataaagagaaagatttgcagaaatttcttaaaaatgtggatgaaatctccaatttaattcaggagatgaattctgatgacccagttgtgcaacagaaagctgtcctggagacagaaaagagactactgcttatggaggaagaccaggaggaggatgaatgcaggaccaccttgaacaagactatgatcagtcctccacaaactgctatgaagagtgcagaagaaataaactcagaggccttcttggcatctgtggagaaggatgcaaaggaacgagccaagagaagaagggaaaacaaagtcttggcggatgccctaaaagaaaaagggaatgaagcatttgctgaaggcaattatgaaacagctatcctgcgctacagtgagggtttggagaagctgaaggacatgaaagtgctgtacaccaaccgagcccaggcttatatgaaacttgaggactatgagaaggcactggtggattgtgagtgggctctcaagtgtgatgaaaaatgcacaaaagcatattttcacatgggaaaagccaacctggccctgaagaactacagtgtgtctagagagtgttataagaagatcttagaaataaaccccaagctgcaaacccaggtgaaaggttacctgaatcaagtagatcttcaggaaaaagcagaccttcaagaaaaggaagcccacgaactgctggattcaggaaagaacacagccgtgaccaccaagaacctcctggagaccctttccaagcctgaccagatccccttgttctatgctggggggattgagatcctgactgaaatgataaatgagtgcacagaacaaactttattcagaatgcacaatggatttagtatcatcagtgacaacgaggtcataagaaggtgtttttccacagcaggaaatgatgcagttgaagaaatggtctgtgtgtctgttctcaagctctggcaagcagtgtgcagcaggaacgaggaaaaccagcgtgtgctagtgatacaccatgacagggccaggctgttggccgccctcttgtcctccaaggtcctggccatccggcagcagagctttgccctgctgctgcatctcgcccagactgagagcggacggagcctgatcatcaaccaccttgacctgaccagattattggaagcgctggtgtcatttcttgatttctcggataaggaggccaacactgctatgggactgttcacagacttggctctggaagaaagattccaagtctggttccaggccaaccttccaggtgttctccctgcactcacaggcgttctgaagacagatcccaaggtaagcagctcctcggctctgtgccagtgcattgccatcatgggaaacctcagtgctgagcccactacccgaagacacatggcggcctgtgaggaatttggggatggctgcttgagcctcctggccaggtgtgaggaggatgtggacctgttcagagaggttatctacacactcctgggactcatgatgaacctgtgtcttcaggctccctttgtctctgaggtttgggctgtggaggtgagcagaaggtgcctgtctttactaaacagccaggatggaggaatcctgacaagagctgctggtgttctgagccggaccctttcttcctctctgaaaattgttgaggaggccttgcgagcaggagtggtaaagaaaatgatgaaattcctgaagacaggaggtgagactgcatcacgttatgctataaagatactagctatctgcacgaatagttatcatgaagctcgggaagaagtaataagactggataaaaagttgagcgttatgatgaagctgctcagctcggaggatgaggttctggtgggcaacgctgccctctgccttggtaactgcatggaggtgcccaacgttgcgtcttccctgctaaagacggaccttttgcaggtcttgttaaagcttgcaggcagtgacacacagaagacggccgtgcaggtgaacgcaggcattgctctggggaagctgtgcacagctgagcccagatttgctgctcaactgagaaagcttcatggcctagaaattctcaactctacgatgaaatacatcagtgattcttgagagagacagggtttgtgtgcatttggggaacacacagatgcacaccgtgtgttgttcctatgctaataaagacctttgatgtatccacttcaaaaaaaaaaaaaaaa

SEQ ID NO: 2879 - protein, 705 aa, Homo sapiens
MDADKEKDLQKFLKNVDEISNLIQEMNSDDPVVQQKAVLETEKRLLLMEEDQEEDECRTTLNKTMISPPQTAMKSAEEINSEAFLASVEKDAKERAKRRRENKVLADALKEKGNEAFAEGNYETAILRYSEGLEKLKDMKVLYTNRAQAYMKLEDYEKALVDCEWALKCDEKCTKAYFHMGKANLALKNYSVSRECYKKILEINPKLQTQVKGYLNQVDLQEKADLQEKEAHELLDSGKNTAVTTKNLLETLSKPDQIPLFYAGGIEILTEMINECTEQTLFRMHNGFSIISDNEVIRRCFSTAGNDAVEEMVCVSVLKLWQAVCSRNEENQRVLVIHHDRARLLAALLSSKVLAIRQQSFALLLHLAQTESGRSLIINHLDLTRLLEALVSFLDFSDKEANTAMGLFTDLALEERFQVWFQANLPGVLPALTGVLKTDPKVSSSSALCQCIAIMGNLSAEPTTRRHMAACEEFGDGCLSLLARCEEDVDLFREVIYTLLGLMMNLCLQAPFVSEVWAVEVSRRCLSLLNSQDGGILTRAAGVLSRTLSSSLKIVEEALRAGVVKKMMKFLKTGGETASRYAIKILAICTNSYHEAREEVIRLDKKLSVMMKLLSSEDEVLVGNAALCLGNCMEVPNVASSLLKTDLLQVLLKLAGSDTQKTAVQVNAGIALGKLCTAEPRFAAQLRKLHGLEILNSTMKYISDS

SEQ ID NO: 2880 - DNA, 2543 bp, Homo sapiens
cggacccgaggagcaggaagcggcggctccttcggccacccaggcagcagccacagcggggagtgcgcggcgcggggacaggaagagaggggcaatggctgccgaccccaccgagctgcggctgggcagcctccccgtcttcacccgcgacgacttcgagggcgactggcgcctagtggccagcggcggcttcagccaggtgttccaggcgcggcacaggcgctggcggacggagtacgccatcaagtgcgccccctgccttccacccgacgccgccagctctgatgtgaattacctcattgaagaagctgccaaaatgaagaagatcaagtttcagcacatcgtgtctatctacggggtgtgcaagcagcccctgggtattgtgatggagtttatggccaacggctccctggagaaggtgctgtccacccacagcctctgctggaagctcaggttccgcatcatccatgagaccagcttggccatgaacttcctgcacagcattaagccgcctctgctccacctggacctcaagccgggcaacatactcctggacagcaacatgcatgtcaaaatttcagacttcggcctgtccaagtggatggaacagtccacccggatgcagtacatcgagaggtcggctctgcggggcatgctcagctacatcccccctgagatgttcctggagagtaacaaggccccaggacctaaatatgatgtgtacagctttgcaattgtcatctgggagctactcactcagaagaaaccatactcagggttcaacatgatgatgattattatccgagtggcggcaggcatgcggccctccctacagcctgtctctgaccaatggccaagcgaggcccagcagatggtggacctgatgaaacgctgctgggaccaggaccccaagaagaggccatgctttctagacattaccatcgagacagacatactgctgtcactgctgcagagtcgtgtggcagtcccagagagcaaggccctggccaggaaggtgtcctgcaagctgtcgctgcgccagcccggggaggttaatgaggacatcagccaggaactgatggacagtgactcaggaaactacctgaagcgggcccttcagctctccgaccgtaagaatttggtcccgagagatgaggaactgtgtatctatgagaacaaggtcacccccctccacttcctggtggcccagggcagtgtggagcaggtgaggttgctgctggcccacgaggtagacgtggactgccagacggcctctggatacacgcccctcctgatcgccgcccaggaccagcaacccgacctctgtgccctgcttttggcacatggtgctgatgccaaccgagtggatgaggatggctgggccccactgcactttgcagcccagaatggggatgacggcactgcgcgcctgctcctggaccacggggcctgtgtggatgcccaggaacgtgaagggtggacccctcttcacctggctgcacagaataactttgagaatgtggcacggcttctggtctcccgtcaggctgaccccaacctgcatgaggctgagggcaagacccccctccatgtggccgcctactttggccatgttagcctggtcaagctgctgaccagccagggggctgagttggatgctcagcagagaaacctgagaacaccactgcacctggcagtagagcggggcaaagtgagggccatccaacacctgctgaagagtggagcggtccctgatgcccttgaccagagcggctacggcccactgcacactgcagctgccaggggcaaatacctgatctgcaagatgctgctcaggtacggagccagccttgagctgcccacccaccagggctggacacccctgcatctagcagcctacaagggccacctggagatcatccatctgctggcagagagccacgcaaacatgggtgctcttggagctgtgaactggactcccctgcacctagctgcacgccacggggaggaggcggtggtgtcagcactgctgcagtgtggggctgaccccaatgctgcagagcagtcaggctggacacccctccacctggcggtccagaggagcaccttcctgagtgtcatcaacctcctagaacatcacgcaaatgtccacgcccgcaacaaggtgggctggacacccgcccacctggccgccctcaagggcaacacagccatcctcaaagtgctggtcgaggcaggcgcccagctggacgtccaggatggagtgagctgcacacccctgcaactggccctccgcagccgaaagcagggcatcatgtccttcctagagggcaaggagccgtcagtggccactctgggtggttctaagccaggagccgagatggaaatttagacaacttggccagccgtggtggctcacgtctgtaatcccagcactttgggaggctgaggcaggcagatcacctgatatcaagagtttgaggccagcctggccaacatggcaaaaccctgtctctgctaaaaatacaaaatttagctgggta

SEQ ID NO: 2881 - protein, 765 aa, Homo sapiens
MAADPTELRLGSLPVFTRDDFEGDWRLVASGGFSQVFQARHRRWRTEYAIKCAPCLPPDAASSDVNYLIEEAAKMKKIKFQHIVSIYGVCKQPLGIVMEFMANGSLEKVLSTHSLCWKLRFRIIHETSLAMNFLHSIKPPLLHLDLKPGNILLDSNMHVKISDFGLSKWMEQSTRMQYIERSALRGMLSYIPPEMFLESNKAPGPKYDVYSFAIVIWELLTQKKPYSGFNMMMIIIRVAAGMRPSLQPVSDQWPSEAQQMVDLMKRCWDQDPKKRPCFLDITIETDILLSLLQSRVAVPESKALARKVSCKLSLRQPGEVNEDISQELMDSDSGNYLKRALQLSDRKNLVPRDEELCIYENKVTPLHFLVAQGSVEQVRLLLAHEVDVDCQTASGYTPLLIAAQDQQPDLCALLLAHGADANRVDEDGWAPLHFAAQNGDDGTARLLLDHGACVDAQEREGWTPLHLAAQNNFENVARLLVSRQADPNLHEAEGKTPLHVAAYFGHVSLVKLLTSQGAELDAQQRNLRTPLHLAVERGKVRAIQHLLKSGAVPDALDQSGYGPLHTAAARGKYLICKMLLRYGASLELPTHQGWTPLHLAAYKGHLEIIHLLAESHANMGALGAVNWTPLHLAARHGEEAVVSALLQCGADPNAAEQSGWTPLHLAVQRSTFLSVINLLEHHANVHARNKVGWTPAHLAALKGNTAILKVLVEAGAQLDVQDGVSCTPLQLALRSRKQGIMSFLEGKEPSVATLGGSKPGAEMEI

SEQ ID NO: 2882 - DNA, 2643 bp, Homo sapiens
ggcagccgtccggggccgccactctcctcggccggtccctggctcccggaggcggccgcgcgtggatgcggcgggagctggaagcctcaagcagccggcgccgtctctgccccggggcgccctatggcttgaagagcctggccacccagtggctccaccgccctgatggatccactgaatctgtcctggtatgatgatgatctggagaggcagaactggagccggcccttcaacgggtcagacgggaaggcggacagaccccactacaactactatgccacactgctcaccctgctcatcgctgtcatcgtcttcggcaacgtgctggtgtgcatggctgtgtcccgcgagaaggcgctgcagaccaccaccaactacctgatcgtcagcctcgcagtggccgacctcctcgtcgccacactggtcatgccctgggttgtctacctggaggtggtaggtgagtggaaattcagcaggattcactgtgacatcttcgtcactctggacgtcatgatgtgcacggcgagcatcctgaacttgtgtgccatcagcatcgacaggtacacagctgtggccatgcccatgctgtacaatacgcgctacagctccaagcgccgggtcaccgtcatgatctccatcgtctgggtcctgtccttcaccatctcctgcccactcctcttcggactcaataacgcagaccagaacgagtgcatcattgccaacccggccttcgtggtctactcctccatcgtctccttctacgtgcccttcattgtcaccctgctggtctacatcaagatctacattgtcctccgcagacgccgcaagcgagtcaacaccaaacgcagcagccgagctttcagggcccacctgagggctccactaaagggcaactgtactcaccccgaggacatgaaactctgcaccgttatcatgaagtctaatgggagtttcccagtgaacaggcggagagtggaggctgcccggcgagcccaggagctggagatggagatgctctccagcaccagcccacccgagaggacccggtacagccccatcccacccagccaccaccagctgactctccccgacccgtcccaccatggtctccacagcactcccgacagccccgccaaaccagagaagaatgggcatgccaaagaccaccccaagattgccaagatctttgagatccagaccatgcccaatggcaaaacccggacctccctcaagaccatgagccgtaggaagctctcccagcagaaggagaagaaagccactcagatgctcgccattgttctcggcgtgttcatcatctgctggctgcccttcttcatcacacacatcctgaacatacactgtgactgcaacatcccgcctgtcctgtacagcgccttcacgtggctgggctatgtcaacagcgccgtgaaccccatcatctacaccaccttcaacattgagttccgcaaggccttcctgaagatcctccactgctgactctgctgcctgcccgcacagcagcctgcttcccacctccctgcccaggccggccagcctcacccttgcgaaccgtgagcaggaaggcctgggtggatcggcctcctcttcaccccggcaggccctgcagtgttcgcttggctccatgctcctcactgcccgcacaccctcactctgccagggcagtgctagtgagctgggcatggtaccagccctggggctgggccccccagctcaggggcagctcatagagtcccccctcccacctccagtccccctatccttggcaccaaagatgcagccgccttccttgaccttcctctggggctctagggttgctggagcctgagtcagggcccagaggctgagttttctctttgtggggcttggcgtggagcaggcggtggggagagatggacagttcacaccctgcaaggcccacaggaggcaagcaagctctcttgccgaggagccaggcaacttcagtcctgggagacccatgtaaataccagactgcaggttggaccccagagattcccaagccaaaaaccttagctccctcccgcaccccgatgtggacctctactttccaggctagtccggacccacctcaccccgttacagctccccaagtggtttccacatgctctgagaagaggagccctcatcttgaagggcccaggagggtctatggggagaggaactccttggcctagcccaccctgctgccttctgacggccctgcaatgtatcccttctcacagcacatgctggccagcctggggcctggcagggaggtcaggccctggaactctatctgggcctgggctaggggacatcagaggttctttgagggactgcctctgccacactctgacgcaaaaccactttccttttctattccttctggcctttcctctctcctgtttcccttcccttccactgcctctgccttagaggagcccacggctaagaggctgctgaaaaccatctggcctggcctggccctgccctgaggaaggaggggaagctgcagcttgggagagcccctggggcctagactctgtaacatcactatccatgcaccaaactaataaaactttgacgagtcaccttccaggacccctgggtaaaaaaaaaaaaaaa

SEQ ID NO: 2883 - protein, 443 aa, Homo sapiens
MDPLNLSWYDDDLERQNWSRPFNGSDGKADRPHYNYYATLLTLLIAVIVFGNVLVCMAVSREKALQTTTNYLIVSLAVADLLVATLVMPWVVYLEVVGEWKFSRIHCDIFVTLDVMMCTASILNLCAISIDRYTAVAMPMLYNTRYSSKRRVTVMISIVWVLSFTISCPLLFGLNNADQNECIIANPAFVVYSSIVSFYVPFIVTLLVYIKIYIVLRRRRKRVNTKRSSRAFRAHLRAPLKGNCTHPEDMKLCTVIMKSNGSFPVNRRRVEAARRAQELEMEMLSSTSPPERTRYSPIPPSHHQLTLPDPSHHGLHSTPDSPAKPEKNGHAKDHPKIAKIFEIQTMPNGKTRTSLKTMSRRKLSQQKEKKATQMLAIVLGVFIICWLPFFITHILNIHCDCNIPPVLYSAFTWLGYVNSAVNPIIYTTFNIEFRKAFLKILHC

SEQ ID NO: 2884 - DNA, 2556 bp, Homo sapiens
ggcagccgtccggggccgccactctcctcggccggtccctggctcccggaggcggccgcgcgtggatgcggcgggagctggaagcctcaagcagccggcgccgtctctgccccggggcgccctatggcttgaagagcctggccacccagtggctccaccgccctgatggatccactgaatctgtcctggtatgatgatgatctggagaggcagaactggagccggcccttcaacgggtcagacgggaaggcggacagaccccactacaactactatgccacactgctcaccctgctcatcgctgtcatcgtcttcggcaacgtgctggtgtgcatggctgtgtcccgcgagaaggcgctgcagaccaccaccaactacctgatcgtcagcctcgcagtggccgacctcctcgtcgccacactggtcatgccctgggttgtctacctggaggtggtaggtgagtggaaattcagcaggattcactgtgacatcttcgtcactctggacgtcatgatgtgcacggcgagcatcctgaacttgtgtgccatcagcatcgacaggtacacagctgtggccatgcccatgctgtacaatacgcgctacagctccaagcgccgggtcaccgtcatgatctccatcgtctgggtcctgtccttcaccatctcctgcccactcctcttcggactcaataacgcagaccagaacgagtgcatcattgccaacccggccttcgtggtctactcctccatcgtctccttctacgtgcccttcattgtcaccctgctggtctacatcaagatctacattgtcctccgcagacgccgcaagcgagtcaacaccaaacgcagcagccgagctttcagggcccacctgagggctccactaaaggaggctgcccggcgagcccaggagctggagatggagatgctctccagcaccagcccacccgagaggacccggtacagccccatcccacccagccaccaccagctgactctccccgacccgtcccaccatggtctccacagcactcccgacagccccgccaaaccagagaagaatgggcatgccaaagaccaccccaagattgccaagatctttgagatccagaccatgcccaatggcaaaacccggacctccctcaagaccatgagccgtaggaagctctcccagcagaaggagaagaaagccactcagatgctcgccattgttctcggcgtgttcatcatctgctggctgcccttcttcatcacacacatcctgaacatacactgtgactgcaacatcccgcctgtcctgtacagcgccttcacgtggctgggctatgtcaacagcgccgtgaaccccatcatctacaccaccttcaacattgagttccgcaaggccttcctgaagatcctccactgctgactctgctgcctgcccgcacagcagcctgcttcccacctccctgcccaggccggccagcctcacccttgcgaaccgtgagcaggaaggcctgggtggatcggcctcctcttcaccccggcaggccctgcagtgttcgcttggctccatgctcctcactgcccgcacaccctcactctgccagggcagtgctagtgagctgggcatggtaccagccctggggctgggccccccagctcaggggcagctcatagagtcccccctcccacctccagtccccctatccttggcaccaaagatgcagccgccttccttgaccttcctctggggctctagggttgctggagcctgagtcagggcccagaggctgagttttctctttgtggggcttggcgtggagcaggcggtggggagagatggacagttcacaccctgcaaggcccacaggaggcaagcaagctctcttgccgaggagccaggcaacttcagtcctgggagacccatgtaaataccagactgcaggttggaccccagagattcccaagccaaaaaccttagctccctcccgcaccccgatgtggacctctactttccaggctagtccggacccacctcaccccgttacagctccccaagtggtttccacatgctctgagaagaggagccctcatcttgaagggcccaggagggtctatggggagaggaactccttggcctagcccaccctgctgccttctgacggccctgcaatgtatcccttctcacagcacatgctggccagcctggggcctggcagggaggtcaggccctggaactctatctgggcctgggctaggggacatcagaggttctttgagggactgcctctgccacactctgacgcaaaaccactttccttttctattccttctggcctttcctctctcctgtttcccttcccttccactgcctctgccttagaggagcccacggctaagaggctgctgaaaaccatctggcctggcctggccctgccctgaggaaggaggggaagctgcagcttgggagagcccctggggcctagactctgtaacatcactatccatgcaccaaactaataaaactttgacgagtcaccttccaggacccctgggtaaaaaaaaaaaaaaa

SEQ ID NO: 2885 - protein, 414 aa, Homo sapiens
MDPLNLSWYDDDLERQNWSRPFNGSDGKADRPHYNYYATLLTLLIAVIVFGNVLVCMAVSREKALQTTTNYLIVSLAVADLLVATLVMPWVVYLEVVGEWKFSRIHCDIFVTLDVMMCTASILNLCAISIDRYTAVAMPMLYNTRYSSKRRVTVMISIVWVLSFTISCPLLFGLNNADQNECIIANPAFVVYSSIVSFYVPFIVTLLVYIKIYIVLRRRRKRVNTKRSSRAFRAHLRAPLKEAARRAQELEMEMLSSTSPPERTRYSPIPPSHHQLTLPDPSHHGLHSTPDSPAKPEKNGHAKDHPKIAKIFEIQTMPNGKTRTSLKTMSRRKLSQQKEKKATQMLAIVLGVFIICWLPFFITHILNIHCDCNIPPVLYSAFTWLGYVNSAVNPIIYTTFNIEFRKAFLKILHC

SEQ ID NO: 2886 - DNA, 2265 bp, Homo sapiens
acgcgggatacagggaggggccatgtgcgaaccagggagacctcatcttccaaccaagcttgctgggcttgcatttaatcaatgcatggccagagaacaggagcggaacattgcctagtagaccctgaggctttacaacagtgctactgacccctatgagcctgatgctggatgaccaaccccctatggaggcccagtatgcagaggagggcccaggacctgggatcttcagagcagagcctggagaccagcagcatcccatttctcaggcggtgtgctggcgttccatgcgacgtggctgtgcagtgctgggagccctggggctgctggccggtgcaggtgttggctcatggctcctagtgctgtatctgtgtcctgctgcctctcagcccatttccgggaccttgcaggatgaggagataactttgagctgctcagaggccagcgctgaggaagctctgctccctgcactccccaaaacagtatctttcagaataaacagcgaagacttcttgctggaagcgcaagtgagggatcagccacgctggctcctggtctgccatgagggctggagccccgccctggggctgcagatctgctggagccttgggcatctcagactcactcaccacaagggagtaaacctcactgacatcaaactcaacagttcccaggagtttgctcagctctctcctagactgggaggcttcctggaggaggcgtggcagcccaggaacaactgcacttctggtcaagttgtttccctcagatgctctgagtgtggagcgaggcccctggcttcccggatagttggtgggcagtctgtggctcctgggcgctggccgtggcaggccagcgtggccctgggcttccggcacacgtgtgggggctctgtgctagcgccacgctgggtggtgactgctgcacattgtatgcacagtttcaggctggcccgcctgtccagctggcgggttcatgcggggctggtcagccacagtgccgtcaggccccaccaaggggctctggtggagaggattatcccacaccccctctacagtgcccagaatcatgactacgacgtcgccctcctgaggctccagaccgctctcaacttctcagacactgtgggcgctgtgtgcctgccggccaaggaacagcattttccgaagggctcgcggtgctgggtgtctggctggggccacacccaccctagccatacttacagctcggatatgctccaggacacggtggtgcccttgttcagcactcagctctgcaacagctcttgcgtgtacagcggagccctcaccccccgcatgctttgcgctggctacctggacggaagggctgatgcatgccagggagatagcgggggccccctagtgtgcccagatggggacacatggcgcctagtgggggtggtcagctgggggcgtgcgtgcgcagagcccaatcacccaggtgtctacgccaaggtagctgagtttctggactggatccatgacactgctcaggactccctcctctgagtcctgctgtttcctccagtctcactgcacaccactgcctcatgcttcctggggcctccagcagctccactaatggaggagaggcagtagcctccgacacagaacgcatggacctcctactactgtgtgtgaggaacagtcactacccactggccagccacccagccaacaggtctctcctcttgggccctgatttcagagtcctctttctcactagagactcaatgacagaagagaggctgggacttggttgggcatgctgtggttgctgagggatgagggggaggagagaggtaggagctggagatgaagagactgctagaagcagcaggaagcctgcccttctgccctctcccctccctgcccctgtgtgagtcttttagggagggtgactgggaggtgccccccgtcccacctttttcctgtgctctaggtgggctaagtgcctccctagaggactccatggctgagaggctcctgggcagatggggtcaaggctgggccagtcccagatgaagcctatgggagtcaggaccctctccactctccctctccactccccttcctgttctcacctggctgtggctggccctgtgtggggtgggtacactggaaaacaagaaggttggagttggtctaggacattggttttaaatgacagttctgtgaactggtccaaggaggttctgttattaaagtgatatatggtcttgaaaaaaaaaaaaaaaaaaaaaaa

SEQ ID NO: 2887 - protein, 457 aa, Homo sapiens
MSLMLDDQPPMEAQYAEEGPGPGIFRAEPGDQQHPISQAVCWRSMRRGCAVLGALGLLAGAGVGSWLLVLYLCPAASQPISGTLQDEEITLSCSEASAEEALLPALPKTVSFRINSEDFLLEAQVRDQPRWLLVCHEGWSPALGLQICWSLGHLRLTHHKGVNLTDIKLNSSQEFAQLSPRLGGFLEEAWQPRNNCTSGQVVSLRCSECGARPLASRIVGGQSVAPGRWPWQASVALGFRHTCGGSVLAPRWVVTAAHCMHSFRLARLSSWRVHAGLVSHSAVRPHQGALVERIIPHPLYSAQNHDYDVALLRLQTALNFSDTVGAVCLPAKEQHFPKGSRCWVSGWGHTHPSHTYSSDMLQDTVVPLFSTQLCNSSCVYSGALTPRMLCAGYLDGRADACQGDSGGPLVCPDGDTWRLVGVVSWGRACAEPNHPGVYAKVAEFLDWIHDTAQDSLL

SEQ ID NO: 2888 - DNA, 2900 bp, Homo sapiens
gagagtgacccagtcagcgttggttcccgtcttggccatggcctcgttcgtgacagaagttttggcacactccgggaggctggaaaaggaggatctggggacccggatcagccgcctgacccggcgggtggaggagatcaagggtgaggtgtgcaatatgattagcaagaagtacagtgaattcctgcctagcatgcagagcgcgcagggcctgattacccaggtggataagctatctgaagacattgacctgctgaaatccaggatagagagtgaggtccgccgggatcttcacgtatcaaccggtgaatttacagacttaaagcagcagttggaaagagactcagttgtcctaagtttgcttaaacagttgcaggagttttccactgctattgaagaatataattgtgcattaacagagaagaagtatgtcactggtgctcagcgtctggaagaggcacagaaatgcttgaagttattaaaatccagaaaatgctttgatttaaaaatattgaaatctctcagcatggagctcacaatacagaaacagaacatactttatcaccttggagaagagtggcagaagctgattgtatggaagttcccaccatcaaaagataccagcagtttggaatcttacctacaaactgaacttcatttatacactgaacaatcgcacaaagaggagaagacccctatgccacccatcagttctgtcctcttggcattttctgttcttggagaactacacagcaagcttaaatcatttggtcagatgctgctgaagtatatccttaggccgctggcatcttgcccatcccttcatgctgtgatagaaagccagcctaacatagttattattcgttttgaatctataatgactaacttggaatatccatcaccatctgaagtttttacaaagatcagactggtactagaagtgctccagaaacagcttctagatttgccacttgacactgacctggaaaatgaaaaaacatctactgtcccattggctgagatgcttggagacatgatctgggaggacttgtctgagtgcctcatcaaaaactgtttggtttattcgattccaacaaatagcagcaaattacagcaatatgaagagatcatacagtccactgaagaatttgaaaatgccctaaaggaaatgagatttttaaaaggagatactacagatttgctgaaatacgctcgtaacatcaattctcattttgcaaacaaaaagtgccaggatgtgattgtggcagccagaaatctaatgacctcagaaattcataacactgtgaagattattcctgattctaagataaatgtgccagagttacccactcctgatgaggataacaaactggaagtacagaaagtatccaatactcagtaccacgaagtgatgaatttagagcctgaaaatacattggaccaacattccttttccttgcccacatgccgtatcagtgagtctgtgaagaaattaatggaactcgcctatcagactttactagaggcaacaaccagtagtgatcaatgtgctgttcaacttttctactcagtgaggaatatcttccatttgttccatgatgttgtaccaacatatcacaaggagaaccttcaaaaacttccccagttggctgctattcatcacaacaactgtatgtacattgctcaccacttgctgaccctcgggcatcagttcagattgcgtcttgcccccattctttgtgatggcactgctacttttgtggatcttgtacctggcttcaggagacttgggacagaatgctttttggcccaaatgcgggcacagaaaggtgaacttctggaaagattatcaagtgctaggaacttttcaaatatggacgatgaagagaattattctgcagcaagtaaagcagtccggcaggtactgcaccaactaaagagacttggaattgtgtggcaggatgtcctgccagtgaatatatattgcaaggctatggggactttactcaatacagcaatttctgaggtcattggcaaaattactgccctagaggacatatctactgaagatggtgataggttatattccttatgcaaaacagtgatggatgaaggaccccaagtatttgcacctttatctgaagaaagcaagaacaagaaatatcaagaagaggttccagtctatgtgccaaaatggatgccattcaaggaattgatgatgatgctacaagccagcttgcaagaaattggggatcggtgggcagatggaaaaggacccctggcagctgcgttctcttccagtgaagtaaaagctttaattcgtgccttgtttcagaacacagaaagaagagcagctgcccttgctaaaattaaatagctccatcttcttaagaaagctatgtcttgaatatgtggattcttcccttggcataattactcccttaaagacttctttgaatcgcccattggttttggtgaaccagtacatcttggaagtttgactttacagaagaacgtcttacctcctggcctgtacgaggctttgtttaagaactgtttattaagataaattgtcaagtaaagcacctcaattcattgactttctagccatcttcctttgattagctaacaaactgtcaggcagcattatttcatgctgcttccagagccctctgggagctatatacattgtaaatgcaggccctagctttggaacgaggaattgggagattccaggagtcagggtagagaatttctgagcaaatcggagatattttaggggtgtggaggaggggaagggaggaatgggccaccatatttggccttacaggaattaaggagacttcctgtaatatttctttccaataaatattgctttttacaaaaaaaaaaaaaaaaaa

SEQ ID NO: 2889 - protein, 779 aa, Homo sapiens
MASFVTEVLAHSGRLEKEDLGTRISRLTRRVEEIKGEVCNMISKKYSEFLPSMQSAQGLITQVDKLSEDIDLLKSRIESEVRRDLHVSTGEFTDLKQQLERDSVVLSLLKQLQEFSTAIEEYNCALTEKKYVTGAQRLEEAQKCLKLLKSRKCFDLKILKSLSMELTIQKQNILYHLGEEWQKLIVWKFPPSKDTSSLESYLQTELHLYTEQSHKEEKTPMPPISSVLLAFSVLGELHSKLKSFGQMLLKYILRPLASCPSLHAVIESQPNIVIIRFESIMTNLEYPSPSEVFTKIRLVLEVLQKQLLDLPLDTDLENEKTSTVPLAEMLGDMIWEDLSECLIKNCLVYSIPTNSSKLQQYEEIIQSTEEFENALKEMRFLKGDTTDLLKYARNINSHFANKKCQDVIVAARNLMTSEIHNTVKIIPDSKINVPELPTPDEDNKLEVQKVSNTQYHEVMNLEPENTLDQHSFSLPTCRISESVKKLMELAYQTLLEATTSSDQCAVQLFYSVRNIFHLFHDVVPTYHKENLQKLPQLAAIHHNNCMYIAHHLLTLGHQFRLRLAPILCDGTATFVDLVPGFRRLGTECFLAQMRAQKGELLERLSSARNFSNMDDEENYSAASKAVRQVLHQLKRLGIVWQDVLPVNIYCKAMGTLLNTAISEVIGKITALEDISTEDGDRLYSLCKTVMDEGPQVFAPLSEESKNKKYQEEVPVYVPKWMPFKELMMMLQASLQEIGDRWADGKGPLAAAFSSSEVKALIRALFQNTERRAAALAKIK

SEQ ID NO: 2890 - DNA, 4642 bp, Homo sapiens
gagaccggtgacccgcggctgggcgcctcggccatgactgcggagctgcagcaggacgacgcggccggcgcggcagacggccacggctcgagctgccaaatgctgttaaatcaactgagagaaatcacaggcattcaggacccttcctttctccatgaagctctgaaggccagtaatggtgacattactcaggcagtcagccttctcactgatgagagagttaaggagcccagtcaagacactgttgctacagaaccatctgaagtagaggggagtgctgccaacaaggaagtattagcaaaagttatagaccttactcatgataacaaagatgatcttcaggctgccattgctttgagtctactggagtctcccaaaattcaagctgatggaagagatcttaacaggatgcatgaagcaacctctgcagaaactaaacgctcaaagagaaaacgctgtgaagtctggggagaaaaccccaatcccaatgactggaggagagttgatggttggccagttgggctgaaaaatgttggcaatacatgttggtttagtgctgttattcagtctctctttcaattgcctgaatttcgaagacttgttctcagttatagtctgccacaaaatgtacttgaaaattgtcgaagtcatacagaaaagagaaatatcatgtttatgcaagagcttcagtatttgtttgctctaatgatgggatcaaatagaaaatttgtagacccgtctgcagccctggatctattaaagggagcattccgatcatctgaggaacagcagcaagatgtgagtgaattcacacacaagctcctggattggctagaggacgcattccagctagctgttaatgttaacagtcccaggaacaaatctgaaaatccaatggtgcagctgttctatggtactttcctgactgaaggggttcgtgaaggaaaacccttttgtaacaatgagaccttcggccagtatcctcttcaggtaaacggttatcgcaacttagacgagtgtttggaaggggccatggtggagggtgatgttgagcttcttccctccgatcactcggtgaagtatggacaagagcgttggtttacaaagctacctccagtgttgacctttgaactctcaagatttgagtttaatcagtcccttgggcagccagagaaaattcacaataagctggaatttcctcagattatttatatggacaggtacatgtacaggagcaaggagcttattcgaaataagagagagtgtattcgaaagttgaaggaggaaataaaaattctgcagcaaaaattggaaaggtatgtgaaatatggctcaggcccagctcggttcccgctcccggacatgctgaaatatgttattgaatttgctagtacaaaacctgcctcagaaagctgtccacctgaaagtgacacacatatgacattaccactttcttcagtgcactgctcggtttctgaccagacatccaaggaaagtacaagtacagaaagctcttctcaggatgttgaaagtaccttttcttctcctgaagattctttacccaagtctaaaccactgacatcttctcggtcttccatggaaatgccttcacagccagctccacgaacagtcacagatgaggagataaattttgttaagacctgtcttcagagatggaggagtgagattgaacaagatatacaagatttaaagacttgtattgcaagtactactcagactattgaacagatgtactgcgatcctctccttcgtcaggtgccttatcgcttgcatgcagttcttgttcatgaaggacaagcaaatgctggacactattgggcctatatctataatcaaccccgacagagctggctcaagtacaatgacatctctgttactgaatcttcctgggaagaagttgaaagagattcctatggaggcctgagaaatgttagtgcttactgtctgatgtacattaatgacaaactaccctacttcaatgcagaggcagccccaactgaatcagatcaaatgtcagaagtggaagccctatctgtggaactcaagcattacattcaggaggataactggcggtttgagcaggaagtagaggagtgggaagaagagcagtcttgcaaaatccctcaaatggagtcctccaccaactcctcatcacaggactactctacatcacaagagccttcagtagcctcttctcatggggttcgctgcttgtcgtctgagcatgctgtgattgtaaaggagcaaactgcccaggctattgcaaacacagcccgtgcctatgagaagagcggtgtagaagcggcactgagtgaggtgatgctgagccctgccatgcaaggggtcatcctggccatagctaaagcccgtcagacctttgaccgagatgggtctgaagcagggctgattaaggcattccatgaagaatactccaggctctatcagcttgccaaagagacccccacctctcacagtgatcctcgacttcagcatgtccttgtctactttttccaaaatgaagcacccaaaagggtagtagaacgaacccttctggaacagtttgcagataaaaatcttagctatgatgaaagatcaatcagcattatgaaggtggctcaagcgaaactgaaggaaattggtccagatgacatgaatatggaagagtacaagaagtggcatgaagattatagtttgttccgaaaagtgtctgtgtatctcctaacaggcctagaactctatcaaaaaggaaagtaccaagaggcactttcctacctggtatatgcctaccagagcaatgctgccctgctgatgaaggggccccgccggggggtcaaagaatccgtgattgctttataccgaagaaaatgccttctggagctgaatgccaaagcagcttctctttttgaaacaaatgatgatcactccgtaactgagggcattaatgtgatgaatgaactgatcatcccctgcattcaccttatcattaataatgacatttccaaggatgatctggatgccattgaggtcatgagaaaccattggtgctcttaccttgggcaagatattgcagaaaatctgcagctgtgcctaggggagtttctacccagacttctagatccttctgcagaaatcatcgtcttgaaagagcctccaactattcgacccaattctccctatgacctatgtagccgatttgcagctgtcatggagtcaattcagggagtttcaactgtgacagtgaaataagctcccacatgttcaaggcccattctggttcctggctgcctgcctcttgcacagaagttcgttgtcatagtgctcaccttgggaaaaggattaggtgggcacataagattccgatcagaccccaaccatgctgcatgtgtaaagaaggattgaaaataaaattgcactttttaggtacaaaatcataaaagctgtttcactagaaaaggcagaaagcagtgtattaaggtgttgaattacgccagaagacctgaaatgccttgtacctacaacaatgcttaggcttttctaagcctcttgccacttttaaaattatccttcaggcataaatatttttgacagcagaatagaagaatgattcatgagaacctgaaccagatgaacagctactagttattttatcaaatacagatgacatttaaaaattcttaactacaagagattagaaatataaaccttgcctggctcttgccaggagataacaaaatgggttgctgatgaactgcacccttttacatgtgggtagaatataagctcacatggcagtgagatgttgaaaagtcaaaagagacctgtctctctcctttcttttctatctttaaaccagaaaacctcatactcagtcctcagtgaaagaaagtaaagtattaaggactttagacagaagagcattgtgtaacttgactgaagatcatccattaatagttattaggcatttaggtaaaattttctaatacctaaaaattgtcaaaaacagtcaatagggctactgctggcccaaagaccatttaggtccacctcctcttttttgctctttttttttttctgtgacagtttcactgtgtcgcccaggctggcgttcagtggtgcaatctcagctcactgcaaactctgtctcctgggctcaagtgattctcgtgcctcagcctcccgaatagctggaattacgggcatgcaccaccacacctggctaatttttgtatttttaatagagatggggtttcaccatattggccaggctgatctctaactcctggcctcaagtgatctatctgcctccctcagcctcccaaagtctgggattgcagacaagtcatcgtacccggccttcttttttgcccttaaaagtaagggatgtgggtttgtacaaaaaaaaaaaaaaaaaaaaaaaaaccagcatacatatgcaaaactatatatatatgtatatgtagagaaaaatacttcccattgatcatttttaaaaggcttctgattggatattgtgttttaaccaaattttaaagattaatggaatcatgaaagggaaaaaaattgatacaactatgcagattttataaatgtgcaataaaagtatttgttttaaaaaaaaaaa

SEQ ID NO: 2891 - protein, 1077 aa, Homo sapiens
MTAELQQDDAAGAADGHGSSCQMLLNQLREITGIQDPSFLHEALKASNGDITQAVSLLTDERVKEPSQDTVATEPSEVEGSAANKEVLAKVIDLTHDNKDDLQAAIALSLLESPKIQADGRDLNRMHEATSAETKRSKRKRCEVWGENPNPNDWRRVDGWPVGLKNVGNTCWFSAVIQSLFQLPEFRRLVLSYSLPQNVLENCRSHTEKRNIMFMQELQYLFALMMGSNRKFVDPSAALDLLKGAFRSSEEQQQDVSEFTHKLLDWLEDAFQLAVNVNSPRNKSENPMVQLFYGTFLTEGVREGKPFCNNETFGQYPLQVNGYRNLDECLEGAMVEGDVELLPSDHSVKYGQERWFTKLPPVLTFELSRFEFNQSLGQPEKIHNKLEFPQIIYMDRYMYRSKELIRNKRECIRKLKEEIKILQQKLERYVKYGSGPARFPLPDMLKYVIEFASTKPASESCPPESDTHMTLPLSSVHCSVSDQTSKESTSTESSSQDVESTFSSPEDSLPKSKPLTSSRSSMEMPSQPAPRTVTDEEINFVKTCLQRWRSEIEQDIQDLKTCIASTTQTIEQMYCDPLLRQVPYRLHAVLVHEGQANAGHYWAYIYNQPRQSWLKYNDISVTESSWEEVERDSYGGLRNVSAYCLMYINDKLPYFNAEAAPTESDQMSEVEALSVELKHYIQEDNWRFEQEVEEWEEEQSCKIPQMESSTNSSSQDYSTSQEPSVASSHGVRCLSSEHAVIVKEQTAQAIANTARAYEKSGVEAALSEVMLSPAMQGVILAIAKARQTFDRDGSEAGLIKAFHEEYSRLYQLAKETPTSHSDPRLQHVLVYFFQNEAPKRVVERTLLEQFADKNLSYDERSISIMKVAQAKLKEIGPDDMNMEEYKKWHEDYSLFRKVSVYLLTGLELYQKGKYQEALSYLVYAYQSNAALLMKGPRRGVKESVIALYRRKCLLELNAKAASLFETNDDHSVTEGINVMNELIIPCIHLIINNDISKDDLDAIEVMRNHWCSYLGQDIAENLQLCLGEFLPRLLDPSAEIIVLKEPPTIRPNSPYDLCSRFAAVMESIQGVSTVTVK

SEQ ID NO: 2892 - DNA, 1847 bp, Homo sapiens
gagaaattgagcggcattccatctggtaggcaagtttgcatttctcctttttgggatctgcccaggaatgttgtcaagtgtaatggctcccctgtgggcctgcatcctggtggctgcaggaattctagccacagatacacatcatccccaggattctgctctgtatcatctcagcaagcagctattacagaaatatcataaagaagtgagacctgtttacaactggaccaaggccaccacagtctacctggacctgttcgtccatgctatattggatgtggatgcagagaatcaaatattaaagacaagtgtatggtaccaagaggtctggaatgatgaatttttatcctggaactccagcatgtttgatgagattagagagatctccctacctctaagtgccatctgggcccccgatatcatcatcaatgagtttgtggacattgaaagataccctgaccttccctatgtttatgtgaactcatctgggaccattgagaactataagcccatccaggtggtctctgcgtgcagtttagagacatatgcttttccatttgatgtccagaattgcagcctgaccttcaagagcattctgcatacagtggaagacgtagacctggcctttctgaggagcccagaagacattcagcatgacaaaaaggcgtttttgaatgacagtgagtgggaacttctatctgtgtcctccacatacagcatcctgcagagcagcgctggaggatttgcacagattcagtttaatgtggtgatgcgcaggcaccccctggtctatgtcgtgagtctgctgattcctagcatctttctcatgctggtggacctggggagcttctacctgccacccaactgccgagccaggattgtgttcaagaccagtgtgctggtgggctacaccgtcttcagggtcaacatgtccaaccaggtgccacggagtgtagggagcacccctctgattgggcacttcttcaccatctgcatggccttcttggttctcagcttagctaagtccatcgtgttggtcaaattcctccatgatgagcagcgtggtggacaggagcagcccttcttgtgccttcgaggggacaccgatgctgacaggcctagagtggaacccagggcccaacgtgctgtggtaacagagtcctcgctgtatggagagcacctggcccagccaggaaccctgaaggaagtctggtcgcagcttcaatctatcagcaactacctccaaactcaggaccagacagaccaacaggaggcagagtggctggtcctcctgtcccgctttgaccgactgctcttccaaagctaccttttcatgctggggatctacaccatcactctgtgctccctctgggcactgtggggcggcgtgtgaagactgaagtgttcttcagtaattgtgctggcacttaggagagagaggagggggaataatagtgggttaaaaagctttctgggtcgggtgtggtggttcttgcctatagtcccagtgctttgggaggccatagcaggaggattgcttgagcccaggagttcgagaccagccagagcaacatagtgagaccacatctctaccagtaaataaataaataaataaataaataaataaataaataaatagctgggcatagtggctcatgcctgtactctcagctacttgggaggttgaggtgggaggattgcttgagcccaggatttcaaggctgcagtgagccatgattgcaccactgcaccccagcctgggtgacagagcaagaccctgtctcaaaaaaaataaaataaaaggctttctgccttcaaaaaaaaaaaaaaaaaaaaaaaaaaaaaaa

SEQ ID NO: 2893 - protein, 441 aa, Homo sapiens
MLSSVMAPLWACILVAAGILATDTHHPQDSALYHLSKQLLQKYHKEVRPVYNWTKATTVYLDLFVHAILDVDAENQILKTSVWYQEVWNDEFLSWNSSMFDEIREISLPLSAIWAPDIIINEFVDIERYPDLPYVYVNSSGTIENYKPIQVVSACSLETYAFPFDVQNCSLTFKSILHTVEDVDLAFLRSPEDIQHDKKAFLNDSEWELLSVSSTYSILQSSAGGFAQIQFNVVMRRHPLVYVVSLLIPSIFLMLVDLGSFYLPPNCRARIVFKTSVLVGYTVFRVNMSNQVPRSVGSTPLIGHFFTICMAFLVLSLAKSIVLVKFLHDEQRGGQEQPFLCLRGDTDADRPRVEPRAQRAVVTESSLYGEHLAQPGTLKEVWSQLQSISNYLQTQDQTDQQEAEWLVLLSRFDRLLFQSYLFMLGIYTITLCSLWALWGGV

SEQ ID NO: 2894 - DNA, 2147 bp, Homo sapiens
gcagcctcagaaggtgtgagcagtggccacgagaggcaggctggctgggacatgaggttggcagagggcaggcaagctggcccttggtgggcctcgtcctgagcactcggaggcactcctatgcttggaaagctcgctatgctgctgtgggtccagcaggcgctgctcgccttgctcctccccacactcctggcacagggagaagccaggaggagccgaaacaccaccaggcccgctctgctgaggctgtcggattaccttttgaccaactacaggaagggtgtgcgccccgtgagggactggaggaagccaaccaccgtatccattgacgtcattgtctatgccatcctcaacgtggatgagaagaatcaggtgctgaccacctacatctggtaccggcagtactggactgatgagtttctccagtggaaccctgaggactttgacaacatcaccaagttgtccatccccacggacagcatctgggtcccggacattctcatcaatgagttcgtggatgtggggaagtctccaaatatcccgtacgtgtatattcggcatcaaggcgaagttcagaactacaagccccttcaggtggtgactgcctgtagcctcgacatctacaacttccccttcgatgtccagaactgctcgctgaccttcaccagttggctgcacaccatccaggacatcaacatctctttgtggcgcttgccagaaaaggtgaaatccgacaggagtgtcttcatgaaccagggagagtgggagttgctgggggtgctgccctactttcgggagttcagcatggaaagcagtaactactatgcagaaatgaagttctatgtggtcatccgccggcggcccctcttctatgtggtcagcctgctactgcccagcatcttcctcatggtcatggacatcgtgggcttctacctgccccccaacagtggcgagagggtctctttcaagattacactcctcctgggctactcggtcttcctgatcatcgtttctgacacgctgccggccactgccatcggcactcctctcattggtgtctactttgtggtgtgcatggctctgctggtgataagtttggccgagaccatcttcattgtgcggctggtgcacaagcaagacctgcagcagcccgtgcctgcttggctgcgtcacctggttctggagagaatcgcctggctactttgcctgagggagcagtcaacttcccagaggcccccagccacctcccaagccaccaagactgatgactgctcagccatgggaaaccactgcagccacatgggaggaccccaggacttcgagaagagcccgagggacagatgtagccctcccccaccacctcgggaggcctcgctggcggtgtgtgggctgctgcaggagctgtcctccatccggcaattcctggaaaagcgggatgagatccgagaggtggcccgagactggctgcgcgtgggctccgtgctggacaagctgctattccacatttacctgctagcggtgctggcctacagcatcaccctggttatgctctggtccatctggcagtacgcttgagtgggtacagcccagtggaggagggggtacagtcctggttaggtggggacagaggatttctgcttaggcccctcaggacccagggaatgccagggacattttcaagacacagacaaagtcccgtgccctgtttccaatgccaattcatctcagcaatcacaagccaaggtctgaacccttccaccaaaaactgggtgttcaaggcccttacacccttgtcccacccccagcagctcaccatggctttaaaacatgctctcttagatcaggagaaactcgggcactccctaagtccactctagttgtggacttttccccattgaccctcacctgaataagggactttggaattctgcttctctttcacaactttgcttttaggttgaaggcaaaaccaactctctactacacaggcctgataactctgtacgaggcttctctaacccctagtgtcttttttttcttcacctcacttgtggcagcttccctgaacactcatcccccatcagatgatgggagtgggaagaataaaatgcagtgaaaccctaaaaaaaaaaaaaaaaaaaaaaaaa

SEQ ID NO: 2895 - protein, 478 aa, Homo sapiens
MLLWVQQALLALLLPTLLAQGEARRSRNTTRPALLRLSDYLLTNYRKGVRPVRDWRKPTTVSIDVIVYAILNVDEKNQVLTTYIWYRQYWTDEFLQWNPEDFDNITKLSIPTDSIWVPDILINEFVDVGKSPNIPYVYIRHQGEVQNYKPLQVVTACSLDIYNFPFDVQNCSLTFTSWLHTIQDINISLWRLPEKVKSDRSVFMNQGEWELLGVLPYFREFSMESSNYYAEMKFYVVIRRRPLFYVVSLLLPSIFLMVMDIVGFYLPPNSGERVSFKITLLLGYSVFLIIVSDTLPATAIGTPLIGVYFVVCMALLVISLAETIFIVRLVHKQDLQQPVPAWLRHLVLERIAWLLCLREQSTSQRPPATSQATKTDDCSAMGNHCSHMGGPQDFEKSPRDRCSPPPPPREASLAVCGLLQELSSIRQFLEKRDEIREVARDWLRVGSVLDKLLFHIYLLAVLAYSITLVMLWSIWQYA

SEQ ID NO: 2896 - DNA, 2243 bp, Homo sapiens
gcagcctcagaaggtgtgagcagtggccacgagaggcaggctggctgggacatgaggttggcagagggcaggcaagctggcccttggtgggcctcgtcctgagcactcggaggcactcctatgcttggaaagctcgctatgctgctgtgggtccagcaggcgctgctcgccttgctcctccccacactcctggcacagggagaagccaggaggagccgaaacaccaccaggcccgctctgctgaggctgtcggattaccttttgaccaactacaggaagggtgtgcgccccgtgagggactggaggaagccaaccaccgtatccattgacgtcattgtctatgccatcctcaacgtggatgagaagaatcaggtgctgaccacctacatctggtaccggcagtactggactgatgagtttctccagtggaaccctgaggactttgacaacatcaccaagttgtccatccccacggacagcatctgggtcccggacattctcatcaatgagttcgtggatgtggggaagtctccaaatatcccgtacgtgtatattcggcatcaaggcgaagttcagaactacaagccccttcaggtggtgactgcctgtagcctcgacatctacaacttccccttcgatgtccagaactgctcgctgaccttcaccagttggctgcacaccatccaggacatcaacatctctttgtggcgcttgccagaaaaggtgaaatccgacaggagtgtcttcatgaaccagggagagtgggagttgctgggggtgctgccctactttcgggagttcagcatggaaagcagtaactactatgcagaaatgaagttctatgtggtcatccgccggcggcccctcttctatgtggtcagcctgctactgcccagcatcttcctcatggtcatggacatcgtgggcttctacctgccccccaacagtggcgagagggtctctttcaagattacactcctcctgggctactcggtcttcctgatcatcgtttctgacacgctgccggccactgccatcggcactcctctcattggtaaggcccctcctggcagcagagctcagtctggtgagaaacccgccccctcccacctcctgcatgtgtctcttgcctctgccctgggctgcacaggtgtctactttgtggtgtgcatggctctgctggtgataagtttggccgagaccatcttcattgtgcggctggtgcacaagcaagacctgcagcagcccgtgcctgcttggctgcgtcacctggttctggagagaatcgcctggctactttgcctgagggagcagtcaacttcccagaggcccccagccacctcccaagccaccaagactgatgactgctcagccatgggaaaccactgcagccacatgggaggaccccaggacttcgagaagagcccgagggacagatgtagccctcccccaccacctcgggaggcctcgctggcggtgtgtgggctgctgcaggagctgtcctccatccggcaattcctggaaaagcgggatgagatccgagaggtggcccgagactggctgcgcgtgggctccgtgctggacaagctgctattccacatttacctgctagcggtgctggcctacagcatcaccctggttatgctctggtccatctggcagtacgcttgagtgggtacagcccagtggaggagggggtacagtcctggttaggtggggacagaggatttctgcttaggcccctcaggacccagggaatgccagggacattttcaagacacagacaaagtcccgtgccctgtttccaatgccaattcatctcagcaatcacaagccaaggtctgaacccttccaccaaaaactgggtgttcaaggcccttacacccttgtcccacccccagcagctcaccatggctttaaaacatgctctcttagatcaggagaaactcgggcactccctaagtccactctagttgtggacttttccccattgaccctcacctgaataagggactttggaattctgcttctctttcacaactttgcttttaggttgaaggcaaaaccaactctctactacacaggcctgataactctgtacgaggcttctctaacccctagtgtcttttttttcttcacctcacttgtggcagcttccctgaacactcatcccccatcagatgatgggagtgggaagaataaaatgcagtgaaaccctaaaaaaaaaaaaaaaaaaaaaaaaa

SEQ ID NO: 2897 - protein, 510 aa, Homo sapiens
MLLWVQQALLALLLPTLLAQGEARRSRNTTRPALLRLSDYLLTNYRKGVRPVRDWRKPTTVSIDVIVYAILNVDEKNQVLTTYIWYRQYWTDEFLQWNPEDFDNITKLSIPTDSIWVPDILINEFVDVGKSPNIPYVYIRHQGEVQNYKPLQVVTACSLDIYNFPFDVQNCSLTFTSWLHTIQDINISLWRLPEKVKSDRSVFMNQGEWELLGVLPYFREFSMESSNYYAEMKFYVVIRRRPLFYVVSLLLPSIFLMVMDIVGFYLPPNSGERVSFKITLLLGYSVFLIIVSDTLPATAIGTPLIGKAPPGSRAQSGEKPAPSHLLHVSLASALGCTGVYFVVCMALLVISLAETIFIVRLVHKQDLQQPVPAWLRHLVLERIAWLLCLREQSTSQRPPATSQATKTDDCSAMGNHCSHMGGPQDFEKSPRDRCSPPPPPREASLAVCGLLQELSSIRQFLEKRDEIREVARDWLRVGSVLDKLLFHIYLLAVLAYSITLVMLWSIWQYA

SEQ ID NO: 2898 - DNA, 2645 bp, Homo sapiens
aggcaaccatgtggttccagctgaattttttttttccctctctctttcttcactcctttttctttccaaacagggaaaagtgttccacgaagcggtagcgcctttccgcctcgcgttttcctccctgaccctggtcccggctcccgtccgggcgccagctggtggggcgagcgccgggagcccatctgcccccaggggcacggggcgcggggccggctcccgcccggcacatggctgcagccacctcgcgcgcaccccgaggcgccgcgcccagctcgcccgaggtccgtcggaggcgcccggccgccccggagccaagcagcagctgagcggggaagcgcccgcgtccggggatcgggatgtccctcctccttctcctcttgctagtttcctactatgttggaaccttggggactcacactgagatcaagagagtggcagaggaaaaggtcactttgccctgccaccatcaactggggcttccagaaaaagacactctggatattgaatggctgctcaccgataatgaagggaaccaaaaagtggtgatcacttactccagtcgtcatgtctacaataacttgactgaggaacagaagggccgagtggcctttgcttccaatttcctggcaggagatgcctccttgcagattgaacctctgaagcccagtgatgagggccggtacacctgtaaggttaagaattcagggcgctacgtgtggagccatgtcatcttaaaagtcttagtgagaccatccaagcccaagtgtgagttggaaggagagctgacagaaggaagtgacctgactttgcagtgtgagtcatcctctggcacagagcccattgtgtattactggcagcgaatccgagagaaagagggagaggatgaacgtctgcctcccaaatctaggattgactacaaccaccctggacgagttctgctgcagaatcttaccatgtcctactctggactgtaccagtgcacagcaggcaacgaagctgggaaggaaagctgtgtggtgcgagtaactgtacagtatgtacaaagcatcggcatggttgcaggagcagtgacaggcatagtggctggagccctgctgattttcctcttggtgtggctgctaatccgaaggaaagacaaagaaagatatgaggaagaagagagacctaatgaaattcgagaagatgctgaagctccaaaagcccgtcttgtgaaacccagctcctcttcctcaggctctcggagctcacgctctggttcttcctccactcgctccacagcaaatagtgcctcacgcagccagcggacactgtcaactgacgcagcaccccagccagggctggccacccaggcatacagcctagtggggccagaggtgagaggttctgaaccaaagaaagtccaccatgctaatctgaccaaagcagaaaccacacccagcatgatccccagccagagcagagccttccaaacggtctgaattacaatggacttgactcccacgctttcctaggagtcagggtctttggactcttctcgtcattggagctcaagtcaccagccacacaaccagatgagaggtcatctaagtagcagtgagcattgcacggaacagattcagatgagcattttccttatacaataccaaacaagcaaaaggatgtaagctgattcatctgtaaaaaggcatcttattgtgcctttagaccagagtaagggaaagcaggagtccaaatctatttgttgaccaggacctgtggtgagaaggttggggaaaggtgaggtgaatatacctaaaacttttaatgtgggatattttgtatcagtgctttgattcacaattttcaagaggaaatgggatgctgtttgtaaattttctatgcatttctgcaaacttattggattattagttattcagacagtcaagcagaacccacagccttattacacctgtctacaccatgtactgagctaaccacttctaagaaactccaaaaaaggaaacatgtgtcttctattctgacttaacttcatttgtcataaggtttggatattaatttcaaggggagttgaaatagtgggagatggagaagagtgaatgagtttctcccactctatactaatctcactatttgtattgagcccaaaataactatgaaaggagacaaaaatttgtgacaaaggattgtgaagagctttccatcttcatgatgttatgaggattgttgacaaacattagaaatatataatggagcaattgtggatttcccctcaaatcagatgcctctaaggactttcctgctagatatttctggaaggagaaaatacaacatgtcatttatcaacgtccttagaaagaattcttctagagaaaaagggatctaggaatgctgaaagattacccaacataccattatagtctcttctttctgagaaaatgtgaaaccagaattgcaagactgggtggactagaaagggagattagatcagttttctcttaatatgtcaaggaaggtagccgggcatggtgccaggcacctgtaggaaaatccagcaggtggaggttgcagtgagccaagattatgccattgcactccagcctgggtgacaaagcaagactccatctcaaaaaaaaaaaaaaaaa

SEQ ID NO: 2899 - protein, 373 aa, Homo sapiens
MSLLLLLLLVSYYVGTLGTHTEIKRVAEEKVTLPCHHQLGLPEKDTLDIEWLLTDNEGNQKVVITYSSRHVYNNLTEEQKGRVAFASNFLAGDASLQIEPLKPSDEGRYTCKVKNSGRYVWSHVILKVLVRPSKPKCELEGELTEGSDLTLQCESSSGTEPIVYYWQRIREKEGEDERLPPKSRIDYNHPGRVLLQNLTMSYSGLYQCTAGNEAGKESCVVRVTVQYVQSIGMVAGAVTGIVAGALLIFLLVWLLIRRKDKERYEEEERPNEIREDAEAPKARLVKPSSSSSGSRSSRSGSSSTRSTANSASRSQRTLSTDAAPQPGLATQAYSLVGPEVRGSEPKKVHHANLTKAETTPSMIPSQSRAFQTV

SEQ ID NO: 2900 - DNA, 5228 bp, Homo sapiens
cgggcgagggccgggcaggaggagcgggcgcggcgcgggcgaggctgggacccgagcgcgctcacttcgccgcaaagtgccaacttcccctggagtgccgggcgcgcaccgtccgggcgcgggggaaagaaaggcagcgggaatttgagatttttgggaagaaagtcggatttcccccgtccccttccccctgttactaatcctcattaaaaagaaaaacaacagtaactgcaaacttgctaccatcccgtacgtcccccactcctggcaccatgaaggcggccgtcgatctcaagccgactctcaccatcatcaagacggaaaaagtcgatctggagcttttcccctccccggatatggaatgtgcagatgtcccactattaactccaagcagcaaagaaatgatgtctcaagcattaaaagctactttcagtggtttcactaaagaacagcaacgactggggatcccaaaagacccccggcagtggacagaaacccatgttcgggactgggtgatgtgggctgtgaatgaattcagcctgaaaggtgtagacttccagaagttctgtatgaatggagcagccctctgcgccctgggtaaagactgctttctcgagctggccccagactttgttggggacatcttatgggaacatctagagatcctgcagaaagaggatgtgaaaccatatcaagttaatggagtcaacccagcctatccagaatcccgctatacctcggattacttcattagctatggtattgagcatgcccagtgtgttccaccatcggagttctcagagcccagcttcatcacagagtcctatcagacgctccatcccatcagctcggaagagctcctctccctcaagtatgagaatgactacccctcggtcattctccgagaccctctccagacagacaccttgcagaatgactactttgctatcaaacaagaagtcgtcaccccagacaacatgtgcatggggaggaccagtcgtggtaaactcgggggccaggactcttttgaaagcatagagagctacgatagttgtgatcgcctcacccagtcctggagcagccagtcatctttcaacagcctgcagcgtgttccctcctatgacagcttcgactcagaggactatccggctgccctgcccaaccacaagcccaagggcaccttcaaggactatgtgcgggaccgtgctgacctcaataaggacaagcctgtcattcctgctgctgccctagctggctacacaggcagtggaccaatccagctatggcagtttcttctggaattactcactgataaatcctgtcagtcttttatcagctggacaggagatggctgggaattcaaactttctgacccagatgaggtggccaggagatggggaaagaggaaaaacaaacctaagatgaattatgagaaactgagccgtggcctacgctactattacgacaaaaacatcatccacaagacagcggggaaacgctacgtgtaccgctttgtgtgtgacctgcagagcctgctggggtacacccctgaggagctgcacgccatgctggacgtcaagccagatgccgacgagtgatggcactgaaggggctggggaaaccctgctgagaccttccaaggacagccgtgttggttggactctgaattttgaattgttattctattttttattttccagaactcattttttaccttcaggggtgggagctaagtcagttgcagctgtaatcaattgtgcgcagttgggaaaggaaagccaggacttgtggggtgggtgggaccagaaattcttgagcaaattttcaggagagggagaagggccttctcagaagcttgaaggctctggcttaacagagaaagagactaatgtgtccaatcatttttaaaaatcatccatgaaaaagtgtcttgagttgtggacccattagcaagtgacattgtcacatcagaactcatgaaactgatgtaaggcaattaatttgcttctgtttttaggtctgggagggcaaaaaagaggtgggtgggatgaaacatgttttggggggggatgcactgaaaatctgagaactatttacctatcactctagttttgaagcaaagatggacttcagtggggaggggccaaaaccgttgttgtgttaaaatttattttattaaattttgtgccagtattttttttcttaaaaatcgtcttaagctctaaggtggtctcagtattgcaatatcatgtaagtttgtttttatttgccggctgaggattctgtcacaatgaaagaaaactgtttatatagaccccattggaaaagcaaaacgctctcactgagatcagggatcccaaattcatgggacttatataagaaggacaattaatgctgatttgggtacaggggaattatgtgtgtgaatgtcatctacaattaaaaaaaattagcacatccctttacttacttgttatcagtggattctcggggtttggacttaatgttgagctaagaagcattaagtctttgaactgaatgtattttgcatccctggttttggacgacagtaaacgtaggagcactgttgaagtcctggaagggagatcgaaggaggaagattgacttggttctttcttagtcctatatctgtagcatagatgacttggaataaaagctgtatgcatgggcattacccctcaggtcctaagaaataagtcctgaatgcatgtcgttccaaactaacactctgtaatttttcttttatgtcttattttccaagagtcctccattttttgcaccccctcaccgccaactctgttattcagtagagagaagtgtacggctttctgattggtgagtgaaaaagtaacttgagacacgacctaagttgaagagtttagacttgctgagttttagaagtgatggaaattaagagagcatttcaataaaatgtgacttggctgtctttggaagagaagtgcaaggctttcctttgaagaatttaaattagtccggtaggatgtcaggtgagactgtgtatgcaaaatgaatggcacaggtgatgccagggcctcttgcttgggtctgatgtcttggcacagggtaagtgaaggttaattccagaagagaggaatgacttgaaggcaaaggaaactaaggaaggaggttcagtgaggaaaataaggttgtccatgagatttgaatagatttttagttcccccaaggtttaaatacaaacatagtcaagcaaggtagtcatctttctgctggttgtgagggggaatctgaaaatggagttttagaggaaaagtcaacatctaactagtgaggaaaagtgcctaatacaattagaatctccctcactctatagttgcccagttgaaaggataaggaggaggggtggcttttatggacttccatgagagaaggaaagaaatatttcaggtaagcttctcagggctggccctttttgggatttggatgagaaattggaagtactaactactttctagcatatctttaagaaaattgattgttatttactcccagatcctcttgcagacccagaattatcaggaacatagctctgtgattcatgagtgtccccatactgatgaattggagcatccatatggaaagcaaaggcagaattatcccagctgtattattttgatcttttggatgcaggtgccttaatgaagctctcaaaatattttaggagctgctcagggagtgttgggtggaactgtttggactacattgttttctcttagattatgtgatttttgttgggcactggcaaaaggtgtgtgtgtgaatgtgtgcatgtgtgtgaatgttgtgtgtgtgtgtgtgtgtgtgtgtgtgtgtgtgtgtgtttgcagacatgcaaaactgcagctgaaataataccttagatttctaggtaagtctttccacatttcaataatgggtaagagtagaaccagggccgggtatcaattattgcttgctgtttgcaaccaggcataaaatcactttctcaaatcatccaccgttcctattaaatttatgccggaaactctccttctgtgagtataactcctgcagttcctatagcagataagatataagaaagtgcctcctagtgctcctccgcccgcttgtttgctaaaattccctttctctctaagtccaccattttcaagatttgtagatagtgtattagttaagacagctttgtcgatctggccagatgttttttctcctttgtccaaaggccagagaccatcccaggaagagtggtgggtggtttatacactggaaatgttgcgtttatgctttttaaaaacacacgttaacttcagaggaaggatgggcaaatctggtctagctgggtgaaacccttattttcccagagatgccttaacctttgttggttttggctttagggttcagagtcacttttgttcccttctccattctggagagggacttcccctacatagagccctgatttttgtggctgtggggattggaggtagcattcaaagatcagatgtgcttttcctcactttggagatgaacactctgggttttacagcattaacctgcctaaccttcatggtgagaaatacaccatctctcttctagtcatgctgtgcatgccgcttactctgttggggtctatataaatttgttgaactcttacctacattccaaagaagtttcaaggaaccataaatatatgtatacatatacatatataaaatatatatattaaaataaaattatcaggaatactgcctcagttattgaacttttttttttaagaatactttttttttaagctgagaagtatagggatgaaaaagatgttatattgtgtttgactattttccaacttgtattttcatataatttatattttttaaaagctgaaaatttagaagcaagatgaaaaaaaggaaaagcaggtgctttttaaaaatcagaactgaggtagcttagagatgtagcgatgtaagtgtcgatgtttttttaaaaaaaaatgcaaaaaaattcttatggcggagttttttgtttgtttattttagtagctgatgctggcacatcattttgctggagagttttttatatactgtagcctgatttcatattgtattttaaactgtgtgaaattaaaaacaaagaatttcattcataaaaaaaaaaaaaaaaaaaaaaaaaaaaaaaaaaaaaaaaaa

SEQ ID NO: 2901 - protein, 441 aa, Homo sapiens
MKAAVDLKPTLTIIKTEKVDLELFPSPDMECADVPLLTPSSKEMMSQALKATFSGFTKEQQRLGIPKDPRQWTETHVRDWVMWAVNEFSLKGVDFQKFCMNGAALCALGKDCFLELAPDFVGDILWEHLEILQKEDVKPYQVNGVNPAYPESRYTSDYFISYGIEHAQCVPPSEFSEPSFITESYQTLHPISSEELLSLKYENDYPSVILRDPLQTDTLQNDYFAIKQEVVTPDNMCMGRTSRGKLGGQDSFESIESYDSCDRLTQSWSSQSSFNSLQRVPSYDSFDSEDYPAALPNHKPKGTFKDYVRDRADLNKDKPVIPAAALAGYTGSGPIQLWQFLLELLTDKSCQSFISWTGDGWEFKLSDPDEVARRWGKRKNKPKMNYEKLSRGLRYYYDKNIIHKTAGKRYVYRFVCDLQSLLGYTPEELHAMLDVKPDADE

SEQ ID NO: 2902 - DNA, 3748 bp, Homo sapiens
cgtctgtaaacacccagagactgtcatggagggggaggaggaggcggcggcggcgaagggaggcgtttggggccgcctccagggtccgctctgccattcctgaactggtccctcgtccccgtgactctggcatcagggaagcgaactgttaggcgagaggaggaggcagccagaaccatatccccttcttcctcggggcgggggccgggccaggccggctgagccgggggagggctccgggagggagtgcctggccaggccggcctgtctgccgcgatggatgacagtaaggtggttggaggcaaagtaaagaagcccggtaaacgtggtcggaagccagccaaaattgacttgaaagcaaaacttgagaggagccggcagagtgcaagagaatgccgagcccgaaaaaagctgagatatcagtatttggaagagttggtatccagtcgagaaagagctatatgtgccctcagagaggaactggaaatgtacaagcagtggtgcatggcaatggaccaaggaaaaatcccttctgaaataaaggccctactcactggagaagagcagaacaaatctcagcagaactcaagcaggcataccaaggctgggaagacagatgctaatagcaattcctggtgaagattatataaagatgagtcagtgattgaagccaatattctgattcccatggaagatggatgggcaagagtgtacttcttggctccatttactacctactgctcagtagtcatctctgtaaatctgcaatttctaccaaaatgtgtgatcgtagatctcaaaggatcttgctttaactttcaacacttagaaaatctacaaacattcagacctgtctgggttggtattgccacccatgacatttaacatgttgtgatgcttgaaaacacaggagtagagaaaatcgatgaagattgtatttttgcaccttaactccacattgctttattggttaatttatattctttccatgtaattcatgtaattgtatgtctgtgtgtgttttatgtgtcaccacctttcatgtttttgattgccctacaaagagaaaccaaatgagctgattactgactataagttctcagcctttatggacctaatcttatttttatttacttgagtaatgtttattctctgcatgaaccatgatttctcctgtgagccattccagcataagctgtgaatatgtattaacaaatatatacatttctatttttataatccataaggatatgcctgttttaaataacatacatattaacaatatctatcaggaaaaccctcaagacagcttctagttaaaacctttgttgctgtcctctcaaactatatttataaaaatttgctagggccaaatccatacttgcagaataattcatcaaattttatttttaagtgaaaagtaacctttcaggcatttcagcagcatacattgacaatctagggtatatatgtatgtatgtttcttattgtatgtctatatatgtatgtggggaggacaggagtgaatgttcacacacttttcttgcgtactcaactaaattggagaatgtttctgaagaaaattggatgaaattagctgctgagattgagtttctgccttaaaatctgaaacaaaaaaagggacaaattgctggtagatctactgactgtagccatcaccagaacacttagtttcttcccagacatgaatttcctgacaggctctgagccagaaacacactgtgggcgtgcatctggttcagccctggatatgcctccactgtggagggaagcattggaactggagttgtgcacagcaccgcagctagtgggcctggctgggggtgcagaagggcagggtagttctttccatttccccttgcagctacacttactttctccctgactaccaaatggagtgacggttgaagaatcaagctcataatatgatacacccagacagacccagaaatcttttgatttccccagcgagatacttaccactctctcttctctttcccatggttaaaacaggagttgtgttctctgtcgctgctaaattattcttcacttgagtgaagcaaatatttagcttccaaataaagtatattttgttctgaactggcagtttaagaggagataccgtagtctagattgtctttgaggtagaatatatgatggaccacatagtttaagattacaaggtactttccctcttctctcaggccatgcatttgaataaagtgcctcccttagcctgagctcctaaagacctcttgtacttggttgcaaactcagatctctagtctagtctagtctagtctagtctagtcatgtgtgactgtgtactgagataccactagcccagtttgctgggtctctatgttttggaagttgggggtttaataatatttaatgtctttttaggatcataaacataaataggtttgttgatattcaggccttcagaatttaagggttttaaatatagcattcagattgtaattggtatgtttttgccatctggtccactcaattgtatatttttattttgcaaaacaacccaaaacttactttatgttgctttgttcagtaccttttgaattcccccagaagagttgttttcaaaacaaacattccagaatgaatgtcgctcttcaatggaacgtctttattgtgcttgaagtatttcttctctggttgtaattctaaattacagagtcatttgagctttctcccctcccgctagtatctttacaggagcagggaagagcagtagaggatgtataattttgggcgaagttaaattacaatttatttgaggttattcctaaacctatttatttggtgttttggaggagatcacacactaagagaacgttgattgcctcggctattgtgctggctggacactttggtcacttttgaagcatgttaataaatgtcactgattaaaacagctggagcatttccttccctttccagtgaaggagcagcatagtgaaatcctggcacccctcacctttttgtgatgacaagatggctgacagtcacggagtccaggagaaggtgctgctctccttgctttctgagtaaacagagtaatgttttttttcttattttcccaaagaaagaaaagggggaaaatatatttgtatgtttagaccagccaaattctgtcattattttagtatcaacctgctgtatattagagcaactgaatataatatggaataagtttgaccaggtcaagttttaggatatagttgaatttctttaaaaagttttctattttatctaaaatctttctattatatctaaattagaatgatcatcctgcgcaaattcagattactgtttgctggctaattgacagtatttctcagcatcactatgtagcattctgttttagcatctttgaattatgatcatttgatttggctaattacaaaaagtacaggtttaaactggacttaccttgagttaaaggcaaagaaaatctaaaaacataaatgttatatttcacaagaaatcagttgcatattatccattacatatttagttttaaaaggaggagtcaccttgaattattttctgagtcaccttgagttatttgatctctcagcctgctttctcatctgtaaaaaaggggggaggataactttcacagggtaattggtaggctaaataggagttacagaaaactgttaaatagggaagaactacattaaatttaaatattcacatt

SEQ ID NO: 2903 - protein, 120 aa, Homo sapiens
MDDSKVVGGKVKKPGKRGRKPAKIDLKAKLERSRQSARECRARKKLRYQYLEELVSSRERAICALREELEMYKQWCMAMDQGKIPSEIKALLTGEEQNKSQQNSSRHTKAGKTDANSNSW

SEQ ID NO: 2904 - DNA, 1409 bp, Homo sapiens
aattaagagaaaaaaagtgaatatggtttttgctcacagaatggataacagcaagccacatttgattattcctacacttctggtgcccctccaaaaccgcagctgcactgaaacagccacacctctgccaagccaatacctgatggaattaagtgaggagcacagttggatgagcaaccaaacagaccttcactatgtgctgaaacccggggaagtggccacagccagcatcttctttgggattctgtggttgttttctatcttcggcaattccctggtttgtttggtcatccataggagtaggaggactcagtctaccaccaactactttgtggtctccatggcatgtgctgaccttctcatcagcgttgccagcacgcctttcgtcctgctccagttcaccactggaaggtggacgctgggtagtgcaacgtgcaaggttgtgcgatattttcaatatctcactccaggtgtccagatctacgttctcctctccatctgcatagaccggttctacaccatcgtctatcctctgagcttcaaggtgtccagagaaaaagccaagaaaatgattgcggcatcgtggatctttgatgcaggctttgtgacccctgtgctctttttctatggctccaactgggacagtcattgtaactatttcctcccctcctcttgggaaggcactgcctacactgtcatccacttcttggtgggctttgtgattccatctgtcctcataattttattttaccaaaaggtcataaaatatatttggagaataggcacagatggccgaacggtgaggaggacaatgaacattgtccctcggacaaaagtgaaaactatcaagatgttcctcattttaaatctgttgtttttgctctcctggctgccttttcatgtagctcagctatggcacccccatgaacaagactataagaaaagttcccttgttttcacagctatcacatggatatcctttagttcttcagcctctaaacctactctgtattcaatttataatgccaattttcggagagggatgaaagagactttttgcatgtcctctatgaaatgttaccgaagcaatgcctatactatcacaacaagttcaaggatggccaaaaaaaactacgttggcatttcagaaatcccttccatggccaaaactattaccaaagactcgatctatgactcatttgacagagaagccaaggaaaaaaagcttgcttggcccattaactcaaatccaccaaatacttttgtctaagttctcattctttcaattgttatgcaccagagattaaaaagctttaactataaaaacagaagctatttacatatttgttttcactcaactttccaagggaaatgttttattttgtaaaatgcattcatttgtttactgt

SEQ ID NO: 2905 - protein, 415 aa, Homo sapiens
MVFAHRMDNSKPHLIIPTLLVPLQNRSCTETATPLPSQYLMELSEEHSWMSNQTDLHYVLKPGEVATASIFFGILWLFSIFGNSLVCLVIHRSRRTQSTTNYFVVSMACADLLISVASTPFVLLQFTTGRWTLGSATCKVVRYFQYLTPGVQIYVLLSICIDRFYTIVYPLSFKVSREKAKKMIAASWIFDAGFVTPVLFFYGSNWDSHCNYFLPSSWEGTAYTVIHFLVGFVIPSVLIILFYQKVIKYIWRIGTDGRTVRRTMNIVPRTKVKTIKMFLILNLLFLLSWLPFHVAQLWHPHEQDYKKSSLVFTAITWISFSSSASKPTLYSIYNANFRRGMKETFCMSSMKCYRSNAYTITTSSRMAKKNYVGISEIPSMAKTITKDSIYDSFDREAKEKKLAWPINSNPPNTFV

SEQ ID NO: 2906 - DNA, 2422 bp, Homo sapiens
gtcagcctcccttccaccgccatattgggccactaaaaaaagggggctcgtcttttcggggtgtttttctccccctcccctgtccccgcttgctcacggctctgcgactccgacgccggcaaggtttggagagcggctgggttcgcgggacccgcgggcttgcacccgcccagactcggacgggctttgccaccctctccgcttgcctggtcccctctcctctccgccctcccgctcgccagtccatttgatcagcggagactcggcggccgggccggggcttccccgcagcccctgcgcgctcctagagctcgggccgtggctcgtcggggtctgtgtcttttggctccgagggcagtcgctgggcttccgagaggggttcgggccgcgtaggggcgctttgttttgttcggttttgtttttttgagagtgcgagagaggcggtcgtgcagacccgggagaaagatgtcaaacgtgcgagtgtctaacgggagccctagcctggagcggatggacgccaggcaggcggagcaccccaagccctcggcctgcaggaacctcttcggcccggtggaccacgaagagttaacccgggacttggagaagcactgcagagacatggaagaggcgagccagcgcaagtggaatttcgattttcagaatcacaaacccctagagggcaagtacgagtggcaagaggtggagaagggcagcttgcccgagttctactacagacccccgcggccccccaaaggtgcctgcaaggtgccggcgcaggagagccaggatgtcagcgggagccgcccggcggcgcctttaattggggctccggctaactctgaggacacgcatttggtggacccaaagactgatccgtcggacagccagacggggttagcggagcaatgcgcaggaataaggaagcgacctgcaaccgacgattcttctactcaaaacaaaagagccaacagaacagaagaaaatgtttcagacggttccccaaatgccggttctgtggagcagacgcccaagaagcctggcctcagaagacgtcaaacgtaaacagctcgaattaagaatatgtttccttgtttatcagatacatcactgcttgatgaagcaaggaagatatacatgaaaattttaaaaatacatatcgctgacttcatggaatggacatcctgtataagcactgaaaaacaacaacacaataacactaaaattttaggcactcttaaatgatctgcctctaaaagcgttggatgtagcattatgcaattaggtttttccttatttgcttcattgtactacctgtgtatatagtttttaccttttatgtagcacataaactttggggaagggagggcagggtggggctgaggaactgacgtggagcggggtatgaagagcttgctttgatttacagcaagtagataaatatttgacttgcatgaagagaagcaattttggggaagggtttgaattgttttctttaaagatgtaatgtccctttcagagacagctgatacttcatttaaaaaaatcacaaaaatttgaacactggctaaagataattgctatttatttttacaagaagtttattctcatttgggagatctggtgatctcccaagctatctaaagtttgttagatagctgcatgtggcttttttaaaaaagcaacagaaacctatcctcactgccctccccagtctctcttaaagttggaatttaccagttaattactcagcagaatggtgatcactccaggtagtttggggcaaaaatccgaggtgcttgggagttttgaatgttaagaattgaccatctgcttttattaaatttgttgacaaaattttctcattttcttttcacttcgggctgtgtaaacacagtcaaaataattctaaatccctcgatatttttaaagatctgtaagtaacttcacattaaaaaatgaaatattttttaatttaaagcttactctgtccatttatccacaggaaagtgttatttttaaaggaaggttcatgtagagaaaagcacacttgtaggataagtgaaatggatactacatctttaaacagtatttcattgcctgtgtatggaaaaaccatttgaagtgtacctgtgtacataactctgtaaaaacactgaaaaattatactaacttatttatgttaaaagattttttttaatctagacaatatacaagccaaagtggcatgttttgtgcatttgtaaatgctgtgttgggtagaataggttttcccctcttttgttaaataatatggctatgcttaaaaggttgcatactgagccaagtataattttttgtaatgtgtgaaaaagatgccaattattgttacacattaagtaatcaataaagaaaacttccatagctaaaaaaaaaaaaaaaaaaa

SEQ ID NO: 2907 - protein, 198 aa, Homo sapiens
MSNVRVSNGSPSLERMDARQAEHPKPSACRNLFGPVDHEELTRDLEKHCRDMEEASQRKWNFDFQNHKPLEGKYEWQEVEKGSLPEFYYRPPRPPKGACKVPAQESQDVSGSRPAAPLIGAPANSEDTHLVDPKTDPSDSQTGLAEQCAGIRKRPATDDSSTQNKRANRTEENVSDGSPNAGSVEQTPKKPGLRRRQT

SEQ ID NO: 2908 - DNA, 4608 bp, Homo sapiens
gacagaagtgaatgggaatggagaggccggcggcccgggagccgcatgggcccgacgcgctgcggcgcttccagggactgctgctggaccgccgaggccggctgcaccgccaggtgctgcgcctgcgcgaggtggcccggcgcctggagcgcctgcgcaggcgctccctcgtagccaacgtggccggcagctcgctgagcgcaacgggcgccctcgccgccatcgtggggctctcgctcagcccggtcaccctggggacctcgctgctggtgtcggccgtggggctgggggtggccacagccggaggggccgtcaccatcacgtccgatctctcgctgatcttctgcaactcccgggagctgcggagggtgcaggagatcgcggccacctgccaggaccagatgcgagagatcctgagctgcctcgagtttttctgccgctggcagggctgcggggaccgccagctgctgcagtgcgggaggaacgcctccatcgccctgtacaattctgtctacttcatcgtcttctttggctcacgtggcttcctcatccccaggcgggcggagggggacaccaaggttagccaggccgtgctgaaggccaagattcagaaactggccgagagcctggagtcctgcaccggggctctggacgaactcagcgagcagctggagtctcgggttcagctctgcaccaagtccagtcgtggccacgacctcaagatctctgctgaccagcgtgcagggctgtttttctgagaacatcctttccccctaatgaccgaggccagcaaatcatcctcatgggatgctccagaatttgtagctcccttaggaaaacaccaagctgggttaggagccgaaggcaaaggatgagaaaaactgtttttgaagtgggcaggtccccaaagcccttcttttcccatcactgtgacatctgcctgggcttgagtgctacggacttttcagtcttcctagtggaaaaatgtgacccaaaaactccttttcctttatcaaaaactttctgtctaaacacagctgggcaggcactcctgttttaaagttatttcggggtccctgaccctgccctggtggcttggcctgagactggagagagtgccatcctctgggtcctctccaagtcctactagtctttgaagtcctcaaaatgtgcgtgaggaaggcatttgcctctattccagaatttctgatacaaagaactccagaatccagagcaaatcagcccttctctgaacgttgtaggatggttcagaacccagagaggaccctggtgctgatatctcctcctcttccctttcccctcagcttacttactcccagatgcggcctgggtatgaagtaggcctttcctgagtggctcccaatccagtcctccaagtactcagaggggaagcccgtgaagccgtcatctaagtcctgctccctcacatgaagctgagggccagatagatggagcgactgccaacttcatttcccgacatcattgtgttcagaagagagtgatgggttttgagttagacagtcctgggcttgagacaggctttgtcactactgtgtgagtgtagccacctaatctctctgagactgtgtaaaacaaagatgataaaatctcaccctgttgtgagatattaaatgagccaaagtgcctagcatgatggtgctggctcatatagtgtagtccctggaatggcaaattaacatcacccaggaacttgttagaaaggcaaattcttggacacaaccctcctgatttatggaatcagaaactctggctgtggggcccagcaacctgagtttaaacaatttctctgggtggttctgcggcacactaaggtttgaaaatcactacaacaaatgctaacttctaatccccttgatgagctttcacgaagtctcacggcttctctagggactccatggtcttcagagtcgttcacagatgaccaaggacagactgtgtcccagaagccaaaatgagagagagagagagagcacgcgtacgtgcaccctggggcagtgtctcaccgtatgaataagggatgtaacactaaaagcccattagggggcagtgtttcccgcctgttgtagaaactggtacagaaaggatcctatatgaagttcctgaaactgacctttgtctattattaccttctctgaaaagtgccagtccatgtattttttatttattttaagtttgtaatttaatttttaattattgtttagtgtttgcatttaattttatttaatcaccacatttagaaaataataagagcaagtttctaaatgggagactgctgaggctctttgcaagagatgagattaagtttgagtttctaaggcagggcatgagctggaaatagcattgctttccttgattgtctctctccttcagggagattctttttctctagtgttttaagtgatcctttgaagtaagtgtggagagtcttgaatggcaagaccaggagctgagtttaagcttgtaatggaagcttgcattgtgggatatataactgaggaagcatatttatcctgaaggtattttgccagaaggtatcacttgacctggaaaaggaatctatttagttcaggaaagataaaaagtttagaggtatgtgaaggaagcacttagaacttgcaagcctgatgtcctatcaagttatgtcttctgggtgacagacaaaatagcttgtcttatggtggtgatgtgttgcattttcactttggggtctgtaagaaactgtcagtgaaaatatgtacaattccttcaatttccattcttaacaactgtaatgttgaaaaataagttgaaaagtctttgggaccatacatgcaaaaacggtgcctctgttacttaattatttaatattctataaatgtacccaatctgtccgcacccttcccagtgatggggcagtatgtctgaggaagtataatttcagtactggggtcggggagaggaggtgatgtttctacatttttattttttctataaattgcaattggtctgtatgctggtttattttgaaatttatattggtttcttttcaagctggtgtcatctcctagactgtttcacccagatgctagcattttttttttttttgagacagagtctcactctgtcacctaggctggagttgcagtggtttgatctcggctcactgcaacctccgactcctgggttcaagcaattcttctgcctcagcctcctgagtagctgggattacagatgtgcaccagcacacccggctaattttttgtatttttagtagagacagggtttcgccatgttggccaggctggtcttgaactcctggccttatgtgatccgcccaccttggcttcccaaagtgctgggattacaggcatgagccacctcgcctggccagatgctagcattttagatcaaacaattcattttagatgaattgttttgtttcacaatcattttaaatcattttagaatgtacttcacattattagttgtgttatggcataaaggtacaaccattccctaactccatcttttattaatgcttaagtttaaattatattcttccaatgcctaagctattccctagaattaaactgggcacttttggaagcagcaacagtaacagcagcagcaaacttttcctctcatattttgggtgtatcaaaagttctagacttttgaagttatgatttcagtggcccactttatttctaaggaagagtgtctactttggaacgatactttgcacatagtaggaactcaagaaatacatttgaataattataattaactgtttagctatcttaatgagaatttgttgacaacaaaagatcatccatcgccttatgtgtgagtaagattggagcctctatcaagatttagtcaagttcagttagattgattctagaaacaaatatttatttctttcttttacggggatgtgaataaggcttttccttaaggccttcattctttaaacaaacaggttgaaatggtatgttgtaaaagagaagacgggagagaggtatttagatgataagtgtacttcacaaaaatgccaaagtttgaaaaataggtatgtttgttctaaatgtttaagtgcttctctgttaggttctggggcttgcaatcatttgaattgttctgtttcacaataaaggagattcactgggttctgcattttcaggattcaatagaactgctccattaaaaaaataatccttagcaagcattcgaatcctaactgctttgatgcacttgccctcgggcacctgtcatttccaatatggtaggtgtcaaagtcaaaagtatttactgggagaaaaaagagaggagtggttgtagaagtctccctaaatcagacatgtcaagcaatcagccaacgtggtgtatttctcattcaatattttagtgtgaattgagacactgagataaagacatcgtgcagagataaatggggatacagttaaatgtagcaactcttgagttcattttttcccactgtagcaaaattaatgctttctctttattgaaataaattgctcattcctccaaaaaaaaaaaaaaaaaaaaaaaaaaaaaaaaaaaagg

SEQ ID NO: 2909 - protein, 248 aa, Homo sapiens
MGMERPAAREPHGPDALRRFQGLLLDRRGRLHRQVLRLREVARRLERLRRRSLVANVAGSSLSATGALAAIVGLSLSPVTLGTSLLVSAVGLGVATAGGAVTITSDLSLIFCNSRELRRVQEIAATCQDQMREILSCLEFFCRWQGCGDRQLLQCGRNASIALYNSVYFIVFFGSRGFLIPRRAEGDTKVSQAVLKAKIQKLAESLESCTGALDELSEQLESRVQLCTKSSRGHDLKISADQRAGLFF

SEQ ID NO: 2910 - DNA, 1836 bp, Homo sapiens
acttccggagacctcacacaagatggcggcacccgaggaacacgattctccgaccgaagcgtcccagccgattgtggaagaggaggaaactaaaacatttaaagacctgggtgtgacagatgtgttgtgtgaagcttgtgaccagttgggatggacaaaacccaccaagatccagattgaagctattcctttggccttacaaggtcgtgatatcattgggcttgcagaaactggctctggaaagacaggcgcctttgctttgcccattctaaacgcactgctggagaccccgcagcgtttgtttgccctagttcttaccccgactcgggagctggcctttcagatctcagagcagtttgaagccctggggtcctctattggagtgcagagtgctgtgattgtaggtggaattgattcaatgtctcaatctttggcccttgcaaaaaaaccacatataataatagcaactcctggtcgactgattgaccacttggaaaatacgaaaggtttcaacttgagagctctcaaatacttggtcatggatgaagccgaccgaatactgaatatggattttgagacagaggttgacaagatcctcaaagtgattcctcgagatcggaaaacattcctcttctctgccaccatgaccaagaaggttcaaaaacttcagcgagcagctctgaagaatcctgtgaaatgtgccgtttcctctaaataccagacagttgaaaaattacagcaatattatatttttattccctctaaattcaaggatacctacctggtttatattctaaatgaattggctggaaactcctttatgatattctgcagcacctgtaataatacccagagaacagctttgctactgcgaaatcttggcttcactgccatccccctccatggacaaatgagtcagagtaagcgcctaggatcccttaataagtttaaggccaaggcccgttccattcttctagcaactgacgttgccagccgaggtttggacatacctcatgtagatgtggttgtcaactttgacattcctacccattccaaggattacatccatcgagtaggtcgaacagctagagctgggcgctccggaaaggctattacttttgtcacacagtatgatgtggaactcttccagcgcatagaacacttaattgggaagaaactaccaggttttccaacacaggatgatgaggttatgatgctgacagaacgcgtcgctgaagcccaaaggtttgcccgaatggagttaagggagcatggagaaaagaagaaacgctcgcgagaggatgctggagataatgatgacacagagggtgctattggtgtcaggaacaaggtggctggaggaaaaatgaagaagcggaaaggccgttaatcacttttatgaaggctcgagttctgctgttctgtaaaagagaattggagaatgaaacctgctccaacagagatcatgagactgaaattggtcagaattgtgtccagaatgtgctcagctaattcagtattcttccccattctgggttggagtttactgcagagtaattcttacagtgctgatgtcaagactgttactgttcttcgactttgattccttgctcatgacatgagtagggtgtgctcttctgtcacttcacacagaccttttgccttttttagctgcaagtcaaggactaggttgatgatgcccatgacctgtaattgtaaagaagcttggacatctgcaaatgatatttaaaccatcttggcttgtgctttattcaaactaatgtgaaacaataaatttaaatattatttttaaaagaaaaaaaaaaaaaaaaaaaa

SEQ ID NO: 2911 - protein, 455 aa, Homo sapiens
MAAPEEHDSPTEASQPIVEEEETKTFKDLGVTDVLCEACDQLGWTKPTKIQIEAIPLALQGRDIIGLAETGSGKTGAFALPILNALLETPQRLFALVLTPTRELAFQISEQFEALGSSIGVQSAVIVGGIDSMSQSLALAKKPHIIIATPGRLIDHLENTKGFNLRALKYLVMDEADRILNMDFETEVDKILKVIPRDRKTFLFSATMTKKVQKLQRAALKNPVKCAVSSKYQTVEKLQQYYIFIPSKFKDTYLVYILNELAGNSFMIFCSTCNNTQRTALLLRNLGFTAIPLHGQMSQSKRLGSLNKFKAKARSILLATDVASRGLDIPHVDVVVNFDIPTHSKDYIHRVGRTARAGRSGKAITFVTQYDVELFQRIEHLIGKKLPGFPTQDDEVMMLTERVAEAQRFARMELREHGEKKKRSREDAGDNDDTEGAIGVRNKVAGGKMKKRKGR

SEQ ID NO: 2912 - DNA, 1689 bp, Homo sapiens
acttccggagacctcacacaagatggcggcacccgaggaacacgattctccgaccgaagcgtcccagccgattgtggaagaggaggaaactaaaacatttaaagacctgggtgtgacagatgtgttgtgtgaagcttgtgaccagttgggatggacaaaacccaccaagatccagattgaagctattcctttggccttacaaggtcgtgatatcattgggcttgcagaaactggctctggaaagacaggcgcctttgctttgcccattctaaacgcactgctggagaccccgcagcgtttgtttgccctagttcttaccccgactcgggagctggcctttcagatctcagagcagtttgaagccctggggtcctctattggagtgcagagtgctgtgattgtaggtggaattgattcaatgtctcaatctttggcccttgcaaaaaaaccacatataataatagcaactcctggtcgactgattgaccacttggaaaatacgaaaggtttcaacttgagagctctcaaatacttggtcatggatgaagccgaccgaatactgaatatggattttgagacagaggttgacaagatcctcaaagtgattcctcgagatcggaaaacattcctcttctctgccaccatgaccaagaaggttcaaaaacttcagcgagcagctctgaagaatcctgtgaaatgtgccgtttcctctaaataccagacagttgaaaaattacagcaatattatatttttattccctctaaattcaagagtaagcgcctaggatcccttaataagtttaaggccaaggcccgttccattcttctagcaactgacgttgccagccgaggtttggacatacctcatgtagatgtggttgtcaactttgacattcctacccattccaaggattacatccatcgagtaggtcgaacagctagagctgggcgctccggaaaggctattacttttgtcacacagtatgatgtggaactcttccagcgcatagaacacttaattgggaagaaactaccaggttttccaacacaggatgatgaggttatgatgctgacagaacgcgtcgctgaagcccaaaggtttgcccgaatggagttaagggagcatggagaaaagaagaaacgctcgcgagaggatgctggagataatgatgacacagagggtgctattggtgtcaggaacaaggtggctggaggaaaaatgaagaagcggaaaggccgttaatcacttttatgaaggctcgagttctgctgttctgtaaaagagaattggagaatgaaacctgctccaacagagatcatgagactgaaattggtcagaattgtgtccagaatgtgctcagctaattcagtattcttccccattctgggttggagtttactgcagagtaattcttacagtgctgatgtcaagactgttactgttcttcgactttgattccttgctcatgacatgagtagggtgtgctcttctgtcacttcacacagaccttttgccttttttagctgcaagtcaaggactaggttgatgatgcccatgacctgtaattgtaaagaagcttggacatctgcaaatgatatttaaaccatcttggcttgtgctttattcaaactaatgtgaaacaataaatttaaatattatttttaaaagaaaaaaaaaaaaaaaaaaaa

SEQ ID NO: 2913 - protein, 406 aa, Homo sapiens
MAAPEEHDSPTEASQPIVEEEETKTFKDLGVTDVLCEACDQLGWTKPTKIQIEAIPLALQGRDIIGLAETGSGKTGAFALPILNALLETPQRLFALVLTPTRELAFQISEQFEALGSSIGVQSAVIVGGIDSMSQSLALAKKPHIIIATPGRLIDHLENTKGFNLRALKYLVMDEADRILNMDFETEVDKILKVIPRDRKTFLFSATMTKKVQKLQRAALKNPVKCAVSSKYQTVEKLQQYYIFIPSKFKSKRLGSLNKFKAKARSILLATDVASRGLDIPHVDVVVNFDIPTHSKDYIHRVGRTARAGRSGKAITFVTQYDVELFQRIEHLIGKKLPGFPTQDDEVMMLTERVAEAQRFARMELREHGEKKKRSREDAGDNDDTEGAIGVRNKVAGGKMKKRKGR

SEQ ID NO: 2914 - DNA, 1899 bp, Homo sapiens
ttccattactaatgcctgcaattgctgataatagacgtgccccaggaatcgctgcaagggaaatggagcaagtcagggtctccttctgtggcccagtctggaatgttagtggtgcaatctcgactcactgcaacctccgcctcccggattcaagtgattctcctgcctcagcctcccaagtagctgggattacacgtacgcaccaccatgcccggcaaatttttgtatttttagtagagatagggtttcaacatattggccaggctggtctcaaactcgtgacctcaagtgatctgcccgcctcagcctcccaaaatgctgggattataggcgtgaaccatcacaccgggccattccaatcactcttcatttcctgcatctcaaagcaacgctgtcaaacagttggagttgattttctaggcctttctgttttccccctcctgcttgccattgcagggcctcctctggtcactcgtaccagtgagagatcaggctcctttaggaagtactcacagcggaaaatcagcttgaaactgcctttggaaaagtatgactgagacagtgaaggagatcaaacttaactgactccctcttgctcctaacctccagactgtccttattcattcctgggtgtaggccgaactaactttgggagaaacttagtttatagtttaaacaaagacggtaacaaccctttcttaaagcagacctccttcttgcctggggactagattgcctttgtaggatgaacattaaccacaagattagaaattatggtttaggagtcatgcagctggagctacaagattccaaccctcccctaaactgctcctaagatcagtgcttctttcccaagcggctgccgaagatggcggaggtacaggtcctggtgcttgatggtcgaggccatctcctgggccacctggcggccatcgtggctaaacaggtactgctgggccggaaggtggtggttgtatgctgtgaaggcatcaacatttctggcaatttctacagaaacaagttgaagtacctggctttcctccgcaagcggatgaacagcaacccttcccgaggcccctaccccctccaggcccccagccgcatcttctggcagaccatgcgaggtatgccgccccacaagaccaagccaggccaggccgctctggactgcctcaaggtgtttgacggcatcccaccgccctacgacaagaaaaagcggatggtggttcctgctgccctcaaggttgtgcgtctgaagcctgcaagaaagtttgcctatctggggcgcctggctcacgaggttggctggaagtaccaggcagtgacagccaccctggaggagaagaggaaagagaaagccaagatccactaccggaagaagaaacagttcatgaggctatggaaacaggccgagaagaacgtggagaagaaaattgacaaatacacagaagtcctcaagacccacggactcctggtctgagcccaataaagactgttaattcctcaaaaaaaaaaaaaaaaaaaaaagatcagtggttgagatattctgcagaccctgcacttgatggatcagctggcaccacccagatcaataaactggctcatctgatcttgtggcccccacccagaactgactctgaaagaagacggctccgacttcctacgatttcatctctaaccaatcagcactcctggctcactggcttcccctcatctgccaaattatccttaaaaattctgctccccaaatgctcagggaggctgatttgagtaagaataaaactccagtctcctgcacagctggctctgtgtgatttactctttctctattgcaatttccctgtcttgatgaattggtctgtctatgtagcgggcaaggtgaaccccttgagtggttac

SEQ ID NO: 2915 - protein, 203 aa, Homo sapiens
MAEVQVLVLDGRGHLLGHLAAIVAKQVLLGRKVVVVCCEGINISGNFYRNKLKYLAFLRKRMNSNPSRGPYPLQAPSRIFWQTMRGMPPHKTKPGQAALDCLKVFDGIPPPYDKKKRMVVPAALKVVRLKPARKFAYLGRLAHEVGWKYQAVTATLEEKRKEKAKIHYRKKKQFMRLWKQAEKNVEKKIDKYTEVLKTHGLLV

SEQ ID NO: 2916 - DNA, 694 bp, Homo sapiens
ttcagaaaaagcggatggtggttcctgctgccctcaaggttgtgcgtctgaagcctgcaagaaagtttgcctatctggggcgcctggctcacgaggttggctggaagtaccaggcagtgacagccaccctggaggagaagaggaaagagaaagccaagatccactaccggaagaagaaacagttcatgaggctatggaaacaggccgagaagaacgtggagaagaaaattgacaaatacacagaagtcctcaagacccacggactcctggtctgagcccaataaagactgttaattcctcaaaaaaaaaaaaaaaaaaaaaagatcagtggttgagatattctgcagaccctgcacttgatggatcagctggcaccacccagatcaataaactggctcatctgatcttgtggcccccacccagaactgactctgaaagaagacggctccgacttcctacgatttcatctctaaccaatcagcactcctggctcactggcttcccctcatctgccaaattatccttaaaaattctgctccccaaatgctcagggaggctgatttgagtaagaataaaactccagtctcctgcacagctggctctgtgtgatttactctttctctattgcaatttccctgtcttgatgaattggtctgtctatgtagcgggcaaggtgaaccccttgagtggttac

SEQ ID NO: 2917 - protein, 86 aa, Homo sapiens
MVVPAALKVVRLKPARKFAYLGRLAHEVGWKYQAVTATLEEKRKEKAKIHYRKKKQFMRLWKQAEKNVEKKIDKYTEVLKTHGLLV

SEQ ID NO: 2918 - DNA, 1833 bp, Homo sapiens
ttccattactaatgcctgcaattgctgataatagacgtgccccaggaatcgctgcaagggaaatggagcaagtcagggtctccttctgtggcccagtctggaatgttagtggtgcaatctcgactcactgcaacctccgcctcccggattcaagtgattctcctgcctcagcctcccaagtagctgggattacacgtacgcaccaccatgcccggcaaatttttgtatttttagtagagatagggtttcaacatattggccaggctggtctcaaactcgtgacctcaagtgatctgcccgcctcagcctcccaaaatgctgggattataggcgtgaaccatcacaccgggccattccaatcactcttcatttcctgcatctcaaagcaacgctgtcaaacagttggagttgattttctaggcctttctgttttccccctcctgcttgccattgcagggcctcctctggtcactcgtaccagtgagagatcaggctcctttaggaagtactcacagcggaaaatcagcttgaaactgcctttggaaaagtatgactgagacagtgaaggagatcaaacttaactgactccctcttgctcctaacctccagactgtccttattcattcctgggtgtaggccgaactaactttgggagaaacttagtttatagtttaaacaaagacggtaacaaccctttcttaaagcagacctccttcttgcctggggactagattgcctttgtaggatgaacattaaccacaagattagaaattatggtttaggagtcatgcagctggagctacaagattccaaccctcccctaaactgctcctaagatcagtgcttctttcccaagcggctgccgaagatggcggaggtacaggtcctggtgcttgatggtcgaggccatctcctgggccacctggcggccatcgtggctaaacaggtactgctgggccggaaggtggtggttgtatgctgtgaaggcatcaacatttctggcaatttctacagaaacaagttgaagtacctggctttcctccgcaagcggatgaacagcaacccttcccgaggcccctaccccctccaggcccccagccgcatcttctggcagaccatgcgaggtatgccgccccacaagaccaagccaggccaggccgctctggactgcctcaaggttgtgcgtctgaagcctgcaagaaagtttgcctatctggggcgcctggctcacgaggttggctggaagtaccaggcagtgacagccaccctggaggagaagaggaaagagaaagccaagatccactaccggaagaagaaacagttcatgaggctatggaaacaggccgagaagaacgtggagaagaaaattgacaaatacacagaagtcctcaagacccacggactcctggtctgagcccaataaagactgttaattcctcaaaaaaaaaaaaaaaaaaaaaagatcagtggttgagatattctgcagaccctgcacttgatggatcagctggcaccacccagatcaataaactggctcatctgatcttgtggcccccacccagaactgactctgaaagaagacggctccgacttcctacgatttcatctctaaccaatcagcactcctggctcactggcttcccctcatctgccaaattatccttaaaaattctgctccccaaatgctcagggaggctgatttgagtaagaataaaactccagtctcctgcacagctggctctgtgtgatttactctttctctattgcaatttccctgtcttgatgaattggtctgtctatgtagcgggcaaggtgaaccccttgagtggttac

SEQ ID NO: 2919 - protein, 181 aa, Homo sapiens
MAEVQVLVLDGRGHLLGHLAAIVAKQVLLGRKVVVVCCEGINISGNFYRNKLKYLAFLRKRMNSNPSRGPYPLQAPSRIFWQTMRGMPPHKTKPGQAALDCLKVVRLKPARKFAYLGRLAHEVGWKYQAVTATLEEKRKEKAKIHYRKKKQFMRLWKQAEKNVEKKIDKYTEVLKTHGLLV

SEQ ID NO: 2920 - DNA, 1831 bp, Homo sapiens
ttccattactaatgcctgcaattgctgataatagacgtgccccaggaatcgctgcaagggaaatggagcaagtcagggtctccttctgtggcccagtctggaatgttagtggtgcaatctcgactcactgcaacctccgcctcccggattcaagtgattctcctgcctcagcctcccaagtagctgggattacacgtacgcaccaccatgcccggcaaatttttgtatttttagtagagatagggtttcaacatattggccaggctggtctcaaactcgtgacctcaagtgatctgcccgcctcagcctcccaaaatgctgggattataggcgtgaaccatcacaccgggccattccaatcactcttcatttcctgcatctcaaagcaacgctgtcaaacagttggagttgattttctaggcctttctgttttccccctcctgcttgccattgcagggcctcctctggtcactcgtaccagtgagagatcaggctcctttaggaagtactcacagcggaaaatcagcttgaaactgcctttggaaaagtatgactgagacagtgaaggagatcaaacttaactgactccctcttgctcctaacctccagactgtccttattcattcctgggtgtaggccgaactaactttgggagaaacttagtttatagtttaaacaaagacggtaacaaccctttcttaaagcagacctccttcttgcctggggactagattgcctttgtaggatgaacattaaccacaagattagaaattatggtttaggagtcatgcagctggagctacaagattccaaccctcccctaaactgctcctaagatcagtgcttctttcccaagcggctgccgaagatggcggaggtacaggtcctggtgcttgatggtcgaggccatctcctgggccacctggcggccatcgtggctaaacagaaacaagttgaagtacctggctttcctccgcaagcggatgaacagcaacccttcccgaggcccctaccccctccaggcccccagccgcatcttctggcagaccatgcgaggtatgccgccccacaagaccaagccaggccaggccgctctggactgcctcaaggtgtttgacggcatcccaccgccctacgacaagaaaaagcggatggtggttcctgctgccctcaaggttgtgcgtctgaagcctgcaagaaagtttgcctatctggggcgcctggctcacgaggttggctggaagtaccaggcagtgacagccaccctggaggagaagaggaaagagaaagccaagatccactaccggaagaagaaacagttcatgaggctatggaaacaggccgagaagaacgtggagaagaaaattgacaaatacacagaagtcctcaagacccacggactcctggtctgagcccaataaagactgttaattcctcaaaaaaaaaaaaaaaaaaaaaagatcagtggttgagatattctgcagaccctgcacttgatggatcagctggcaccacccagatcaataaactggctcatctgatcttgtggcccccacccagaactgactctgaaagaagacggctccgacttcctacgatttcatctctaaccaatcagcactcctggctcactggcttcccctcatctgccaaattatccttaaaaattctgctccccaaatgctcagggaggctgatttgagtaagaataaaactccagtctcctgcacagctggctctgtgtgatttactctttctctattgcaatttccctgtcttgatgaattggtctgtctatgtagcgggcaaggtgaaccccttgagtggttac

SEQ ID NO: 2921 - protein, 171 aa, Homo sapiens
MVEAISWATWRPSWLNRNKLKYLAFLRKRMNSNPSRGPYPLQAPSRIFWQTMRGMPPHKTKPGQAALDCLKVFDGIPPPYDKKKRMVVPAALKVVRLKPARKFAYLGRLAHEVGWKYQAVTATLEEKRKEKAKIHYRKKKQFMRLWKQAEKNVEKKIDKYTEVLKTHGLLV

SEQ ID NO: 2922 - DNA, 1054 bp, Homo sapiens
gaaaccttctcagaggaggagatatggcggaggtacaggtcctggtgcttgatggtcgaggccatctcctgggccacctggcggccatcgtggctaaacaggtactgctgggccggaaggtggtggttgtatgctgtgaaggcatcaacatttctggcaatttctacagaaacaagttgaagtacctggctttcctccgcaagcggatgaacagcaacccttcccgaggcccctaccccctccaggcccccagccgcatcttctggcagaccatgcgaggtatgccgccccacaagaccaagccaggccaggccgctctggactgcctcaaggtgtttgacggcatcccaccgccctacgacaagaaaaagcggatggtggttcctgctgccctcaaggttgtgcgtctgaagcctgcaagaaagtttgcctatctggggcgcctggctcacgaggttggctggaagtaccaggcagtgacagccaccctggaggagaagaggaaagagaaagccaagatccactaccggaagaagaaacagttcatgaggctatggaaacaggccgagaagaacgtggagaagaaaattgacaaatacacagaagtcctcaagacccacggactcctggtctgagcccaataaagactgttaattcctcaaaaaaaaaaaaaaaaaaaaaagatcagtggttgagatattctgcagaccctgcacttgatggatcagctggcaccacccagatcaataaactggctcatctgatcttgtggcccccacccagaactgactctgaaagaagacggctccgacttcctacgatttcatctctaaccaatcagcactcctggctcactggcttcccctcatctgccaaattatccttaaaaattctgctccccaaatgctcagggaggctgatttgagtaagaataaaactccagtctcctgcacagctggctctgtgtgatttactctttctctattgcaatttccctgtcttgatgaattggtctgtctatgtagcgggcaaggtgaaccccttgagtggttac

SEQ ID NO: 2923 - protein, 203 aa, Homo sapiens; identical to SEQ ID NO: 2915

SEQ ID NO: 2924 - DNA, 1053 bp, Homo sapiens
ttttttccagcggctgccgaagatggcggaggtacaggtcctggtgcttgatggtcgaggccatctcctgggccacctggcggccatcgtggctaaacaggtactgctgggccggaaggtggtggttgtatgctgtgaaggcatcaacatttctggcaatttctacagaaacaagttgaagtacctggctttcctccgcaagcggatgaacagcaacccttcccgaggcccctaccccctccaggcccccagccgcatcttctggcagaccatgcgaggtatgccgccccacaagaccaagccaggccaggccgctctggactgcctcaaggtgtttgacggcatcccaccgccctacgacaagaaaaagcggatggtggttcctgctgccctcaaggttgtgcgtctgaagcctgcaagaaagtttgcctatctggggcgcctggctcacgaggttggctggaagtaccaggcagtgacagccaccctggaggagaagaggaaagagaaagccaagatccactaccggaagaagaaacagttcatgaggctatggaaacaggccgagaagaacgtggagaagaaaattgacaaatacacagaagtcctcaagacccacggactcctggtctgagcccaataaagactgttaattcctcaaaaaaaaaaaaaaaaaaaaaagatcagtggttgagatattctgcagaccctgcacttgatggatcagctggcaccacccagatcaataaactggctcatctgatcttgtggcccccacccagaactgactctgaaagaagacggctccgacttcctacgatttcatctctaaccaatcagcactcctggctcactggcttcccctcatctgccaaattatccttaaaaattctgctccccaaatgctcagggaggctgatttgagtaagaataaaactccagtctcctgcacagctggctctgtgtgatttactctttctctattgcaatttccctgtcttgatgaattggtctgtctatgtagcgggcaaggtgaaccccttgagtggttac

SEQ ID NO: 2925 - protein, 203 aa, Homo sapiens; identical to SEQ ID NO: 2915

SEQ ID NO: 2926 - DNA, 1047 bp, Homo sapiens
ggcacggctgccgaagatggcggaggtacaggtcctggtgcttgatggtcgaggccatctcctgggccacctggcggccatcgtggctaaacaggtactgctgggccggaaggtggtggttgtatgctgtgaaggcatcaacatttctggcaatttctacagaaacaagttgaagtacctggctttcctccgcaagcggatgaacagcaacccttcccgaggcccctaccccctccaggcccccagccgcatcttctggcagaccatgcgaggtatgccgccccacaagaccaagccaggccaggccgctctggactgcctcaaggtgtttgacggcatcccaccgccctacgacaagaaaaagcggatggtggttcctgctgccctcaaggttgtgcgtctgaagcctgcaagaaagtttgcctatctggggcgcctggctcacgaggttggctggaagtaccaggcagtgacagccaccctggaggagaagaggaaagagaaagccaagatccactaccggaagaagaaacagttcatgaggctatggaaacaggccgagaagaacgtggagaagaaaattgacaaatacacagaagtcctcaagacccacggactcctggtctgagcccaataaagactgttaattcctcaaaaaaaaaaaaaaaaaaaaaagatcagtggttgagatattctgcagaccctgcacttgatggatcagctggcaccacccagatcaataaactggctcatctgatcttgtggcccccacccagaactgactctgaaagaagacggctccgacttcctacgatttcatctctaaccaatcagcactcctggctcactggcttcccctcatctgccaaattatccttaaaaattctgctccccaaatgctcagggaggctgatttgagtaagaataaaactccagtctcctgcacagctggctctgtgtgatttactctttctctattgcaatttccctgtcttgatgaattggtctgtctatgtagcgggcaaggtgaaccccttgagtggttac

SEQ ID NO: 2927 - protein, 203 aa, Homo sapiens; identical to SEQ ID NO: 2915

SEQ ID NO: 2928 - DNA, 2856 bp, Homo sapiens
gcttcccatacggcagtggctgggggagagtgatggagagaaaggctaagctaaggtcaaagaaagtggaggaaggctggcttgtcccgctggacttgacggcggagctgctgcaatctcgcgggctgggcccttgccccgggtggacccgagtgcctgcggggaggcgggtgtggctcccccgggaggtgacagctggcggggcccgtaaggagctggtctgctccggctcccctctcgtagccggcgccctgggaccagcgcgtgagcacgtctcggaggagtccgatgcgctgggcagggccgggtggtcacccccgcccagcttccaggggtgactgtgcctctgacgtcagacggtttttgggtcattccctggcacggggactttattttcataacagcatgaagtgccgtggaactggaataggcgtgtcctctccctcgaccctccccctccttgtccctctgctcacccctcgctcgttccctccctccggcgagggccgcctttataacaactgctcagagtgcgagggcgggatagctgtccaaggtctcccccagcactgaggagctcgcctgctgccctcttgcgcgcgggaagcagcaccaagttcacggccaacgccttggcactagggtccagaatggctacaacagtccctgatggttgccgcaatggcctgaaatccaagtactacagactttgtgataaggctgaagcttggggcatcgtcctagaaacggtggccacagccggggttgtgacctcggtggccttcatgctcactctcccgatcctcgtctgcaaggtgcaggactccaacaggcgaaaaatgctgcctactcagtttctcttcctcctgggtgtgttgggcatctttggcctcaccttcgccttcatcatcggactggacgggagcacagggcccacacgcttcttcctctttgggatcctcttttccatctgcttctcctgcctgctggctcatgctgtcagtctgaccaagctcgtccgggggaggaagcccctttccctgttggtgattctgggtctggccgtgggcttcagcctagtccaggatgttatcgctattgaatatattgtcctgaccatgaataggaccaacgtcaatgtcttttctgagctttccgctcctcgtcgcaatgaagactttgtcctcctgctcacctacgtcctcttcttgatggcgctgaccttcctcatgtcctccttcaccttctgtggttccttcacgggctggaagagacatggggcccacatctacctcacgatgctcctctccattgccatctgggtggcctggatcaccctgctcatgcttcctgactttgaccgcaggtgggatgacaccatcctcagctccgccttggctgccaatggctgggtgttcctgttggcttatgttagtcccgagttttggctgctcacaaagcaacgaaaccccatggattatcctgttgaggatgctttctgtaaacctcaactcgtgaagaagagctatggtgtggagaacagagcctactctcaagaggaaatcactcaaggttttgaagagacaggggacacgctctatgccccctattccacacattttcagctgcagaaccagcctccccaaaaggaattctccatcccacgggcccacgcttggccgagcccttacaaagactatgaagtaaagaaagagggcagctaactctgtcctgaagagtgggacaaatgcagccgggcggcagatctagcgggagctcaaagggatgtgggcgaaatcttgagtcttctgagaaaactgtacaagacactacgggaacagtttgcctccctcccagcctcaaccacaattcttccatgctggggctgatgtgggctagtaagactccagttcttagaggcgctgtagtatttttttttttttgtctcatcctttggatacttcttttaagtgggagtctcaggcaactcaagtttagacccttactctttttgtttgttttttgaaacaggatcttgctctgtcacccaggcttgagtgcagtggtgcgatcacagcccagtgcagcctcgaccacctgtgctcaagcaatcctcccatctccatctcccaaagtgctgggatgacaggcgtgagccacagctcccagcctaggcccttaatcttgctgttattttccatggactaaaggtctggtcatctgagctcacgctggctcacacagctctaggggcctgctcctctaactcacagtgggttttgtgaggctctgtggcccagagcagacctgcatatctgagcaaaaatagcaaaagcctctctcagcccactggcctgaatctacactggaagccaacttgctggcacccccgctccccaacccttcttgcctgggtaggagaggctaaagatcaccctaaatttactcatctctctagtgctgcctcacattgggcctcagcagctccccagcaccaattcacaggtcacccctctcttcttgcactgtccccaaacttgctgtcaattccgagatctaatctccccctacgctctgccaggaattctttcagacctcactagcacaagcccggttgctccttgtcaggagaatttgtagatcattctcacttcaaattcctggggctgatacttctctcatcttgcaccccaacctctgtaaatagatttaccgcatttacggctgcattctgtaagtgggcatggtctcctaatggaggagtgttcattgtataataagttattcacctgagtatgcaataaagatgtggtggccactctttcatggtggtggcagcagttaccagtaaaaaaa

SEQ ID NO: 2929 - protein, 357 aa, Homo sapiens
MATTVPDGCRNGLKSKYYRLCDKAEAWGIVLETVATAGVVTSVAFMLTLPILVCKVQDSNRRKMLPTQFLFLLGVLGIFGLTFAFIIGLDGSTGPTRFFLFGILFSICFSCLLAHAVSLTKLVRGRKPLSLLVILGLAVGFSLVQDVIAIEYIVLTMNRTNVNVFSELSAPRRNEDFVLLLTYVLFLMALTFLMSSFTFCGSFTGWKRHGAHIYLTMLLSIAIWVAWITLLMLPDFDRRWDDTILSSALAANGWVFLLAYVSPEFWLLTKQRNPMDYPVEDAFCKPQLVKKSYGVENRAYSQEEITQGFEETGDTLYAPYSTHFQLQNQPPQKEFSIPRAHAWPSPYKDYEVKKEGS

SEQ ID NO: 2930 - DNA, 1038 bp, Homo sapiens
atgtacaaggactgcatcgagtccactggagactattttcttctctgtgacgccgaggggccatggggcatcattctggagtccctggccatacttggcatcgtggtcacaattctgctactcttagcatttctcttcctcatgcgaaagatccaagactgcagccagtggaatgtcctccccacccagctcctcttcctcctgagtgtcctggggctcttcggactcgcttttgccttcatcatcgagctcaatcaacaaactgcccccgtacgctactttctctttggggttctctttgctctctgtttctcatgcctcttagctcatgcctccaatctagtgaagctggttcggggttgtgtctccttctcctggacgacaattctgtgcattgctattggttgcagtctgttgcaaatcattattgccactgagtatgtgactctcatcatgaccagaggtatgatgtttgtgaatatgacaccctgccagctcaatgtggactttgttgtactcctggtctatgtcctcttcctgatggccctcacattcttcgtctccaaagccaccttctgtggcccgtgtgagaactggaagcagcatggaaggctcatctttatcactgtgctcttctccatcatcatctgggtggtgtggatctccatgctcctgagaggcaacccgcagttccagcgacagccccagtgggacgacccggtcgtctgcattgctctggtcaccaacgcatgggttttcctgctgctgtacatcgtccctgagctctgcattctctacagatcgtgtagacaggagtgccctttacaaggcaatgcctgccccgtcacagcctaccaacacagcttccaagtggagaaccaggagctctccagagcccgagacagtgatggagctgaggaggatgtagcattaacttcatatggtactcccattcagccgcagactgttgatcccacacaagagtgtttcatcccacaggctaaactaagcccccagcaagatgcaggaggagtataa

SEQ ID NO: 2931 - protein, 345 aa, Homo sapiens
MYKDCIESTGDYFLLCDAEGPWGIILESLAILGIVVTILLLLAFLFLMRKIQDCSQWNVLPTQLLFLLSVLGLFGLAFAFIIELNQQTAPVRYFLFGVLFALCFSCLLAHASNLVKLVRGCVSFSWTTILCIAIGCSLLQIIIATEYVTLIMTRGMMFVNMTPCQLNVDFVVLLVYVLFLMALTFFVSKATFCGPCENWKQHGRLIFITVLFSIIIWVVWISMLLRGNPQFQRQPQWDDPVVCIALVTNAWVFLLLYIVPELCILYRSCRQECPLQGNACPVTAYQHSFQVENQELSRARDSDGAEEDVALTSYGTPIQPQTVDPTQECFIPQAKLSPQQDAGGV

SEQ ID NO: 2932 - DNA, 6240 bp, Homo sapiens
ttgaatttgcatctcttcaagacacaagattaaaacaaaatttacgctaaattggattttaaattatcttccgttcatttatccttcgtctttcttatgtggatatgcaagcgagaagaagggactggacattcccaacatgctcactcccttaatctgtccgtctagaggtttggcttctacaaaccaagggagtcgacgagttgaagatgaagcccagagcggagtgctgttctcccaagttctggttggtgttggccgtcctggccgtgtcaggcagcagagctcgttctcagaagagcccccccagcattggcattgctgtcatcctcgtgggcacttccgacgaggtggccatcaaggatgcccacgagaaagatgatttccaccatctctccgtggtaccccgggtggaactggtagccatgaatgagaccgacccaaagagcatcatcacccgcatctgtgatctcatgtctgaccggaagatccagggggtggtgtttgctgatgacacagaccaggaagccatcgcccagatcctcgatttcatttcagcacagactctcaccccgatcctgggcatccacgggggctcctctatgataatggcagataaggatgaatcctccatgttcttccagtttggcccatcaattgaacagcaagcttccgtaatgctcaacatcatggaagaatatgactggtacatcttttctatcgtcaccacctatttccctggctaccaggactttgtaaacaagatccgcagcaccattgagaatagctttgtgggctgggagctagaggaggtcctcctactggacatgtccctggacgatggagattctaagatccagaatcagctcaagaaacttcaaagccccatcattcttctttactgtaccaaggaagaagccacctacatctttgaagtggccaactcagtagggctgactggctatggctacacgtggatcgtgcccagtctggtggcaggggatacagacacagtgcctgcggagttccccactgggctcatctctgtatcatatgatgaatgggactatggcctccccgccagagtgagagatggaattgccataatcaccactgctgcttctgacatgctgtctgagcacagcttcatccctgagcccaaaagcagttgttacaacacccacgagaagagaatctaccagtccaatatgctaaataggtatctgatcaatgtcacttttgaggggaggaatttgtccttcagtgaagatggctaccagatgcacccgaaactggtgataattcttctgaacaaggagaggaagtgggaaagggtggggaagtggaaagacaagtccctgcagatgaagtactatgtgtggccccgaatgtgtccagagactgaagagcaggaggatgaccatctgagcattgtgaccctggaggaggcaccatttgtcattgtggaaagtgtggaccctctgagtggaacctgcatgaggaacacagtcccctgccaaaaacgcatagtcactgagaataaaacagacgaggagccgggttacatcaaaaaatgctgcaaggggttctgtattgacatccttaagaaaatttctaaatctgtgaagttcacctatgacctttacctggttaccaatggcaagcatgggaagaaaatcaatggaacctggaatggtatgattggagaggtggtcatgaagagggcctacatggcagtgggctcactcaccatcaatgaggaacgatcggaggtggtcgacttctctgtgcccttcatagagacaggcatcagtgtcatggtgtcacgcagcaatgggactgtctcaccttctgccttcttagagccattcagcgctgacgtatgggtgatgatgtttgtgatgctgctcatcgtctcagccgtggctgtctttgtctttgagtacttcagccctgtgggttataacaggtgcctcgctgatggcagagagcctggtggaccctctttcaccatcggcaaagctatttggttgctctggggtctggtgtttaacaactccgtacctgtgcagaacccaaaggggaccacctccaagatcatggtgtcagtgtgggccttctttgctgtcatcttcctggccagctacactgccaacttagctgccttcatgatccaagaggaatatgtggaccaggtttctggcctgagcgacaaaaagttccagagacctaatgacttctcaccccctttccgctttgggaccgtgcccaacggcagcacagagagaaatattcgcaataactatgcagaaatgcatgcctacatgggaaagttcaaccagaggggtgtagatgatgcattgctctccctgaaaacagggaaactggatgccttcatctatgatgcagcagtgctgaactatatggcaggcagagatgaaggctgcaagctggtgaccattggcagtgggaaggtctttgcttccactggctatggcattgccatccaaaaagattctgggtggaagcgccaggtggaccttgctatcctgcagctctttggagatggggagatggaagaactggaagctctctggctcactggcatttgtcacaatgagaagaatgaggtcatgagcagccagctggacattgacaacatggcaggggtcttctacatgttgggggcggccatggctctcagcctcatcaccttcatctgcgaacaccttttctattggcagttccgacattgctttatgggtgtctgttctggcaagcctggcatggtcttctccatcagcagaggtatctacagctgcatccatggggtggcgatcgaggagcgccagtctgtaatgaactcccccaccgcaaccatgaacaacacacactccaacatcctgcgcctgctgcgcacggccaagaacatggctaacctgtctggtgtgaatggctcaccgcagagcgccctggacttcatccgacgggagtcatccgtctatgacatctcagagcaccgccgcagcttcacgcattctgactgcaaatcctacaacaacccgccctgtgaggagaacctcttcagtgactacatcagtgaggtagagagaacgttcgggaacctgcagctgaaggacagcaacgtgtaccaagatcactaccaccatcaccaccggccccatagtattggcagtgccagctccatcgatgggctctacgactgtgacaacccacccttcaccacccagtccaggtccatcagcaagaagcccctggacatcggcctcccctcctccaagcacagccagctcagtgacctgtacggcaaattctccttcaagagcgaccgctacagtggccacgacgacttgatccgctccgatgtctctgacatctcaacccacaccgtcacctatgggaacatcgagggcaatgccgccaagaggcgtaagcagcaatataaggacagcctgaagaagcggcctgcctcggccaagtcccgcagggagtttgacgagatcgagctggcctaccgtcgccgaccgccccgctcccctgaccacaagcgctacttcagggacaaggaagggctacgggacttctacctggaccagttccgaacaaaggagaactcaccccactgggagcacgtagacctgaccgacatctacaaggagcggagtgatgactttaagcgcgactccatcagcggaggagggccctgtaccaacaggtctcacatcaagcacgggacgggcgacaaacacggcgtggtcagcggggtacctgcaccttgggagaagaacctgaccaacgtggagtgggaggaccggtccgggggcaacttctgccgcagctgtccctccaagctgcacaactactccacgacggtgacgggtcagaactcgggcaggcaggcgtgcatccggtgtgaggcttgcaagaaagcaggcaacctgtatgacatcagtgaggacaactccctgcaggaactggaccagccggctgccccagtggcggtgacgtcaaacgcctccaccactaagtaccctcagagcccgactaattccaaggcccagaagaagaaccggaacaaactgcgccggcagcactcctacgacaccttcgtggacctgcagaaggaagaagccgccctggccccgcgcagcgtaagcctgaaagacaagggccgattcatggatgggagcccctacgcccacatgtttgagatgtcagctggcgagagcacctttgccaacaacaagtcctcagtgcccactgccggacatcaccaccacaacaaccccggcggcgggtacatgctcagcaagtcgctctaccctgaccgggtcacgcaaaaccctttcatccccacttttggggacgaccagtgcttgctccatggcagcaaatcctacttcttcaggcagcccacggtggcgggggcgtcgaaagccaggccggacttccgggcccttgtcaccaacaagccggtggtctcggcccttcatggggccgtgccagcccgtttccagaaggacatctgtatagggaaccagtccaacccctgtgtgcctaacaacaaaaaccccagggctttcaatggctccagcaatgggcatgtttatgagaaactttctagtattgagtctgatgtctgagtgagggaacagagaggttaaggtgggtacgggagggtaaggctgtgggtcgcgtgatgcgcatgtcacggagggtgacgggggtgaacttggttcccatttgctcctttcttgttttaatttatttatgggatcctggagttctggttcctactgggggcaaccctggtgaccagcaccatctctcctccttttcacagttctctccttcttccccccgctgtcagccattcctgttcccatgagatgatgccatgggccctctcagcaggggagggtagagcggagaaaggaagggctgcatgcgggcttcctcctggtgtggaagagctccttgatatcctctttgagtgaagctgggagaaccaaaaagaggctatgtgagcacaaaggtagcttttcccaaactgatcttttcatttaggtgaggaagcaaaagcatctatgtgagaccatttagcacactgcttgtgaaaggaaagaggctctggctaaattcatgctgcttagatgacatctgtctaggaatcatgtgccaagcagaggttgggaggccatttgtgtttatatataagcccaaaaatgcttgcttcaaccccatgagactcgatagtggtggtgaacagaacccaaggtcattggtggcagagtggattcttgaacaaactggaaagtacgttatgatagtgtcccccggtgccttggggacaagagcaggtggattgtgcgtgcatgtgtgttcatgcacacttgcacccatgtgtagtcaggtgcctcaagagaaggcaaccttgactcttttattgtttctttcaatatccccaagcagtgtgattgtttggcttatatacagacagagatggccatgtattacctgaattttggctgtgtctcccttcatccttctggaataaggagaatgaaaattcttgataaagaagattctgtggtctaaacaaaaaaaggcggtgagcaatcctgcaagagcaaggtacataaacaagtcctcagtggttggcaactgtttcaacttgtttgaaccaagaaccttccaggaaggctaaagggaaaccgaatttcacagccatgattcttttgcccacacttgggacgaaaagattctacaaagctcttttgagcatttagactctcgactggccaaggtttggggaagaacgaacggacctttgaagaagtaaggagtcgtgtatggtagggtaagtgagagagggggatgtttcctatgctttgatcccttctcacttaacctgaagctagacgagcaggcttcttccccccaaaactgattacaactgctacagagcagacagttaagagaaatgagcttgacatttaagagaaatgagctgcactccatgagtgcagctctggaggtacgaaaagaggggaagagacttggaaatgggagacgggggcagagagggaccctccaccacctctttgggcctggctgggtgggaatgtgacttgagcccagagtgaacactcttggtagaagcccttctaccttcctgcaacacctgttccctctcagattgtaccattgagccggaac

SEQ ID NO: 2933 - protein, 1484 aa, Homo sapiens
MKPRAECCSPKFWLVLAVLAVSGSRARSQKSPPSIGIAVILVGTSDEVAIKDAHEKDDFHHLSVVPRVELVAMNETDPKSIITRICDLMSDRKIQGVVFADDTDQEAIAQILDFISAQTLTPILGIHGGSSMIMADKDESSMFFQFGPSIEQQASVMLNIMEEYDWYIFSIVTTYFPGYQDFVNKIRSTIENSFVGWELEEVLLLDMSLDDGDSKIQNQLKKLQSPIILLYCTKEEATYIFEVANSVGLTGYGYTWIVPSLVAGDTDTVPAEFPTGLISVSYDEWDYGLPARVRDGIAIITTAASDMLSEHSFIPEPKSSCYNTHEKRIYQSNMLNRYLINVTFEGRNLSFSEDGYQMHPKLVIILLNKERKWERVGKWKDKSLQMKYYVWPRMCPETEEQEDDHLSIVTLEEAPFVIVESVDPLSGTCMRNTVPCQKRIVTENKTDEEPGYIKKCCKGFCIDILKKISKSVKFTYDLYLVTNGKHGKKINGTWNGMIGEVVMKRAYMAVGSLTINEERSEVVDFSVPFIETGISVMVSRSNGTVSPSAFLEPFSADVWVMMFVMLLIVSAVAVFVFEYFSPVGYNRCLADGREPGGPSFTIGKAIWLLWGLVFNNSVPVQNPKGTTSKIMVSVWAFFAVIFLASYTANLAAFMIQEEYVDQVSGLSDKKFQRPNDFSPPFRFGTVPNGSTERNIRNNYAEMHAYMGKFNQRGVDDALLSLKTGKLDAFIYDAAVLNYMAGRDEGCKLVTIGSGKVFASTGYGIAIQKDSGWKRQVDLAILQLFGDGEMEELEALWLTGICHNEKNEVMSSQLDIDNMAGVFYMLGAAMALSLITFICEHLFYWQFRHCFMGVCSGKPGMVFSISRGIYSCIHGVAIEERQSVMNSPTATMNNTHSNILRLLRTAKNMANLSGVNGSPQSALDFIRRESSVYDISEHRRSFTHSDCKSYNNPPCEENLFSDYISEVERTFGNLQLKDSNVYQDHYHHHHRPHSIGSASSIDGLYDCDNPPFTTQSRSISKKPLDIGLPSSKHSQLSDLYGKFSFKSDRYSGHDDLIRSDVSDISTHTVTYGNIEGNAAKRRKQQYKDSLKKRPASAKSRREFDEIELAYRRRPPRSPDHKRYFRDKEGLRDFYLDQFRTKENSPHWEHVDLTDIYKERSDDFKRDSISGGGPCTNRSHIKHGTGDKHGVVSGVPAPWEKNLTNVEWEDRSGGNFCRSCPSKLHNYSTTVTGQNSGRQACIRCEACKKAGNLYDISEDNSLQELDQPAAPVAVTSNASTTKYPQSPTNSKAQKKNRNKLRRQHSYDTFVDLQKEEAALAPRSVSLKDKGRFMDGSPYAHMFEMSAGESTFANNKSSVPTAGHHHHNNPGGGYMLSKSLYPDRVTQNPFIPTFGDDQCLLHGSKSYFFRQPTVAGASKARPDFRALVTNKPVVSALHGAVPARFQKDICIGNQSNPCVPNNKNPRAFNGSSNGHVYEKLSSIESDV

SEQ ID NO: 2934 - DNA, 4661 bp, Homo sapiens
tttttgaatctgcggaggcggcggcggtggcagcggcggcgcggcgactgaagcgcgcgaaaagctgaggcggcaacgtcggggacggctgcgcgggacggctctgtaggaaggaacttggttccccctccctcagcttccgccccaaaagattcagaatggacagtttagaagaacctcagaaaaaagtctttaaggctcgaaaaacgatgagagtgagtgatcgtcagcaacttgaagcagtgtacaaggtcaaagaagaactgttgaaaactgatgtcaagctgttaaatggcaaccatgaaaatggagatttggacccaacctcacctttggaaaacatggattacattaaagacaaggaagaggtgaatggcattgaagagatttgttttgatcctgaaggaagtaaagcagaatggaaggaaacaccctgtatcctaagtgttaatgtaaaaaacaagcaggatgatgatttaaattgtgaacctttgtctccccataatataactccagaaccagtctctaaactgcctgctgaaccagtttctggtgatccagcccctggtgatctggatgccggagatccagcctccggagtactggcctctggtgattccacctctggtgatcccacctctagcgagccctcctctagtgatgctgcctctggtgatgcaacctctggtgatgccccttctggtgatgtgtcccctggtgatgccacctctggtgatgccactgctgatgatctctcctctggtgatcccacctctagtgatcccatcccaggtgaaccggtccctgttgaacccatttctggtgattgtgccgctgatgatatagcctctagtgaaataacttctgttgatctggcttctggagcaccagcttccactgatccagcctctgatgatctggcctctggtgatctatcctctagtgaactggcctctgatgatctggccactggtgaactggcctctgatgagctgacttctgaatcaacctttgatcgtacctttgaaccaaagtctgtaccagtttgtgaaccagttcctgaaattgacaatatagaaccaagtagcaataaagatgatgattttcttgaaaaaaatggagctgatgaaaaattagagcaaattcagagtaaagactcattggatgagaaaaataaagctgataataatattgatgctaatgaagaaactctagaaacagatgatacaactatttgttcagatcgacctcctgaaaatgaaaagaaggtagaggaagatattatcacagagcttgctcttggagaagatgctatatctagcagtatggaaattgaccaaggtgaaaagaatgaagatgaaacttctgcagatcttgtagaaacgattaatgaaaatgttattgaagataacaaaagtgagaatatcttagaaaatacagactctatggagacagatgaaatcattcctattttggaaaagcttgcaccttctgaggatgaacttacttgcttttctaaaacatctctccttccaatcgatgagacaaatccagatttggaagagaaaatggaaagttcttttggttcaccatctaaacaagaaagtagtgagagtttgccaaaagaagcctttctggtcctctctgatgaagaggatatttcgggtgaaaaagatgagtctgaagttatatcgcaaaatgaaacgtgctctccagcagaagtagaaagtaatgaaaaggacaacaaacctgaggaagaagagcaagtaatacatgaagatgatgaaagaccttctgagaaaaatgaattttctagacgaaaacgttctaaatcagaagacatggacaatgtacagtctaaacgtcgtcgatatatggaagaagaatatgaggcagaatttcaagtaaagattacagccaaaggagacattaaccagaaacttcaaaaggttatacagtggttgctggaagaaaaattgtgtgcgctgcagtgtgctgtatttgataagactttggcagaattgaaaacacgagtggaaaagattgaatgtaacaagaggcataaaacagttctcactgaactacaggccaagatagccaggttaaccaaacgctttgaagcagccaaagaagatcttaagaaaagacatgaacatccacccaacccaccagtatcaccaggaaaaactgtaaatgatgtcaacagcaataataacatgtcttacagaaatgcaggcacagtgagacagatgctggagtccaaaagaaatgtaagcgagagtgcaccaccatcctttcaaactcctgtgaatacagtatcttcaaccaatcttgtcactcctccagcagttgtcagtagtcaacctaaattgcagactccagtgacttcgggttccctcacagcaacgtcagttcttcctgcacccaatacagctactgtagttgctactactcaggtgcctagtggaaatccccagcctacaatctctttacagcctttgccagtgattttgcatgtacctgttgcagtatcctcccagcctcagcttctacagagccatccagggactttggtgactaatcaaccatctggcaatgttgaattcatttctgtgcaaagcccacctacagtgagtggtcttaccaaaaatccagtatccttgccatccttgccaaatcccactaaaccaaacaacgttccttctgtgcccagtcctagtattcaaaggaaccctactgccagtgctgcaccattgggaacaacacttgctgtgcaggctgttccaacagcacactctattgtacaagccacaaggacttctttacccacagtgggcccatcaggactctatagtccatcaactaatcgaggtcctatacagatgaaaattccaatttctgcatttagtacttcgtctgctgcagaacagaacagcaataccaccccaagaattgaaaaccagacaaacaaaacaatagatgcttctgtcagtaagaaagcagctgatagcacatcacagtgtggaaaagccactggcagtgattcaagtggtgtcattgatctcacaatggatgatgaagagagtggagcttcacaagaccccaaaaaactaaatcacactcctgtatcaaccatgagttcttctcagcctgtgtcacgaccattgcaacccatacaaccagcaccgcctcttcaaccatctggggtgccaacaagtggaccatctcagaccaccatacacttactacctacagctccaactaccgtgaatgtaacacatcgtccagtaactcaggtgaccacaagactccctgtaccaagagctcctgcaaaccaccaggtggtttatacaactcttcctgcaccaccagctcaggctcccttgcgaggaactgttatgcaggctcctgctgttcggcaggtcaatccccaaaatagtgttacagttcgagtgcctcaaacaaccacatatgttgtaaacaatggactaaccctgggatcaacaggacctcagctcacagtgcatcaccgaccaccacaagtgcatactgagcccccacgccccgtgcacccagcacccttaccagaagctccacaaccacagcgtctgcccccagaagctgccagcacatctctgcctcagaagccacacttgaagttagcacgcgttcagagtcaaaatggcatagtactgtcatggagtgtcctggaggtggatcgaagctgtgccactgttgatagctaccatctctatgcttaccatgaggaacccagtgccactgtgccctcacaatggaaaaagattggggaagtcaaggcacttcccttgcccatggcatgtactctcacccagtttgtatctggtagcaaatactactttgcagtacgagccaaggatatttatggacgttttgggcctttctgtgatcctcagtcaacagatgtgatctcttctacccagagcagttaaaccttggagcctttatattttcctcttttaaaatttccaccttttggtcttgtttttaatcttgtgcatgataccccatgtaaaatccaccttgtgcaagatttcttggacagatgtgtgtatacactacatttgtttataaccagaagcaaaataaactcagcccacaaagctagaatcttttcctggacagtttaggctttggggtttggaaatgtaaatgtgtaccttgctttagttttgaggctggggaatatgtgtgggtgtttatgtgtgtttttccttatgtaggtgttattgcattggagtctcccattttcattctcaaatttacctcttaaagtacgaagtaagtagatcaaaggatttgagatgtgtaactggcatgattctgcttttgaaggatctatagtatcattttagttaagtgggtcaaacagaatcaaaacaaaacccaaagaaataaataaaaaacaaaatggctaaatagtttaaaataggttaattcgaacacaggaaaggatctatttgttgtttcttttgtctggtctcctgagttgttaattaggtgaaaaaagatctgcaatggccccctccctttcctaatctggcttttacatttattttgtgccttaaagattaactacaaagataaacatggccaaaaataaataaataaatatggccata

SEQ ID NO: 2935 - protein, 1270 aa, Homo sapiens
MDSLEEPQKKVFKARKTMRVSDRQQLEAVYKVKEELLKTDVKLLNGNHENGDLDPTSPLENMDYIKDKEEVNGIEEICFDPEGSKAEWKETPCILSVNVKNKQDDDLNCEPLSPHNITPEPVSKLPAEPVSGDPAPGDLDAGDPASGVLASGDSTSGDPTSSEPSSSDAASGDATSGDAPSGDVSPGDATSGDATADDLSSGDPTSSDPIPGEPVPVEPISGDCAADDIASSEITSVDLASGAPASTDPASDDLASGDLSSSELASDDLATGELASDELTSESTFDRTFEPKSVPVCEPVPEIDNIEPSSNKDDDFLEKNGADEKLEQIQSKDSLDEKNKADNNIDANEETLETDDTTICSDRPPENEKKVEEDIITELALGEDAISSSMEIDQGEKNEDETSADLVETINENVIEDNKSENILENTDSMETDEIIPILEKLAPSEDELTCFSKTSLLPIDETNPDLEEKMESSFGSPSKQESSESLPKEAFLVLSDEEDISGEKDESEVISQNETCSPAEVESNEKDNKPEEEEQVIHEDDERPSEKNEFSRRKRSKSEDMDNVQSKRRRYMEEEYEAEFQVKITAKGDINQKLQKVIQWLLEEKLCALQCAVFDKTLAELKTRVEKIECNKRHKTVLTELQAKIARLTKRFEAAKEDLKKRHEHPPNPPVSPGKTVNDVNSNNNMSYRNAGTVRQMLESKRNVSESAPPSFQTPVNTVSSTNLVTPPAVVSSQPKLQTPVTSGSLTATSVLPAPNTATVVATTQVPSGNPQPTISLQPLPVILHVPVAVSSQPQLLQSHPGTLVTNQPSGNVEFISVQSPPTVSGLTKNPVSLPSLPNPTKPNNVPSVPSPSIQRNPTASAAPLGTTLAVQAVPTAHSIVQATRTSLPTVGPSGLYSPSTNRGPIQMKIPISAFSTSSAAEQNSNTTPRIENQTNKTIDASVSKKAADSTSQCGKATGSDSSGVIDLTMDDEESGASQDPKKLNHTPVSTMSSSQPVSRPLQPIQPAPPLQPSGVPTSGPSQTTIHLLPTAPTTVNVTHRPVTQVTTRLPVPRAPANHQVVYTTLPAPPAQAPLRGTVMQAPAVRQVNPQNSVTVRVPQTTTYVVNNGLTLGSTGPQLTVHHRPPQVHTEPPRPVHPAPLPEAPQPQRLPPEAASTSLPQKPHLKLARVQSQNGIVLSWSVLEVDRSCATVDSYHLYAYHEEPSATVPSQWKKIGEVKALPLPMACTLTQFVSGSKYYFAVRAKDIYGRFGPFCDPQSTDVISSTQSS

SEQ ID NO: 2936 - DNA, 3745 bp, Homo sapiens
cgcaaagcaagtgggcacaaggagtatggttctaacgtgattggggtcatgaagacgttgctgttggacttggctttgtggtcactgctcttccagcccgggtggctgtcctttagttcccaggtgagtcagaactgccacaatggcagctatgaaatcagcgtcctgatgatgggcaactcagcctttgcagagcccctgaaaaacttggaagatgcggtgaatgaggggctggaaatagtgagaggacgtctgcaaaatgctggcctaaatgtgactgtgaacgctactttcatgtattcggatggtctgattcataactcaggcgactgccggagtagcacctgtgaaggcctcgacctactcaggaaaatttcaaatgcacaacggatgggctgtgtcctcatagggccctcatgtacatactccaccttccagatgtaccttgacacagaattgagctaccccatgatctcagctggaagttttggattgtcatgtgactataaagaaaccttaaccaggctgatgtctccagctagaaagttgatgtacttcttggttaacttttggaaaaccaacgatctgcccttcaaaacttattcctggagcacttcgtatgtttacaagaatggtacagaaactgaggactgtttctggtaccttaatgctctggaggctagcgtttcctatttctcccacgaactcggctttaaggtggtgttaagacaagataaggagtttcaggatatcttaatggaccacaacaggaaaagcaatgtgattattatgtgtggtggtccagagttcctctacaagctgaagggtgaccgagcagtggctgaagacattgtcattattctagtggatcttttcaatgaccagtacttggaggacaatgtcacagcccctgactatatgaaaaatgtccttgttctgacgctgtctcctgggaattcccttctaaatagctctttctccaggaatctatcaccaacaaaacgagactttgctcttgcctatttgaatggaatcctgctctttggacatatgctgaagatatttcttgaaaatggagaaaatattaccacccccaaatttgctcatgctttcaggaatctcacttttgaagggtatgacggtccagtgaccttggatgactggggggatgttgacagtaccatggtgcttctgtatacctctgtggacaccaagaaatacaaggttcttttgacctatgatacccacgtaaataagacctatcctgtggatatgagccccacattcacttggaagaactctaaacttcctaatgatattacaggccggggccctcagatcctgatgattgcagtcttcaccctcactggagctgtggtgctgctcctgctcgtcgctctcctgatgctcagaaaatatagaaaagattatgaacttcgtcagaaaaaatggtcccacattcctcctgaaaatatctttcctctggagaccaatgagaccaatcatgttagcctcaagatcgatgatgacaaaagacgagatacaatccagagactacgacagtgcaaatacgacaaaaagcgagtgattctcaaagatctcaagcacaatgatggtaatttcactgaaaaacagaagatagaattgaacaagttgcttcagattgactattacaacctgaccaagttctacggcacagtgaaacttgataccatgatcttcggggtgatagaatactgtgagagaggatccctccgggaagttttaaatgacacaatttcctaccctgatggcacattcatggattgggagtttaagatctctgtcttgtatgacattgctaagggaatgtcatatctgcactccagtaagacagaagtccatggtcgtctgaaatctaccaactgcgtagtggacagtagaatggtggtgaagatcactgattttggctgcaattccattttacctccaaaaaaggacctgtggacagctccagagcacctccgccaagccaacatctctcagaaaggagatgtgtacagctatgggatcatcgcacaggagatcattctgcggaaagaaaccttctacactttgagctgtcgggaccggaatgagaagattttcagagtggaaaattccaatggaatgaaacccttccgcccagatttattcttggaaacagcagaggaaaaagagctagaagtgtacctacttgtaaaaaactgttgggaggaagatccagaaaagagaccagatttcaaaaaaattgagactacacttgccaagatatttggactttttcatgaccaaaaaaatgaaagctatatggataccttgatccgacgtctacagctatattctcgaaacctggaacatctggtagaggaaaggacacagctgtacaaggcagagagggacagggctgacagacttaactttatgttgcttccaaggctagtggtaaagtctctgaaggagaaaggctttgtggagccggaactatatgaggaagttacaatctacttcagtgacattgtaggtttcactactatctgcaaatacagcacccccatggaagtggtggacatgcttaatgacatctataagagttttgaccacattgttgatcatcatgatgtctacaaggtggaaaccatcggtgatgcgtacatggtggctagtggtttgcctaagagaaatggcaatcggcatgcaatagacattgccaagatggccttggaaatcctcagcttcatggggacctttgagctggagcatcttcctggcctcccaatatggattcgcattggagttcactctggtccctgtgctgctggagttgtgggaatcaagatgcctcgttattgtctatttggagatacggtcaacacagcctctaggatggaatccactggcctccctttgagaattcacgtgagtggctccaccatagccatcctgaagagaactgagtgccagttcctttatgaagtgagaggagaaacatacttaaagggaagaggaaatgagactacctactggctgactgggatgaaggaccagaaattcaacctgccaacccctcctactgtggagaatcaacagcgtttgcaagcagaattttcagacatgattgccaactctttacagaaaagacaggcagcagggataagaagccaaaaacccagacgggtagccagctataaaaaaggcactctggaatacttgcagctgaataccacagacaaggagagcacctatttttaaacctaaatgaggtataaggactcacacaaattaaaatacagctgcactgaggcagcgacctcaagtgtcctgaaagcttacattttcctgagacctcaatgaagcagaaatgtacttaggcttggctgccctgtctggaacatggactttcttgcatgaatcagatgtgtgttctcagtgaaataactaccttccactctggaaccttattccagcagttgttccagggagcttctacctggaaaagaaaagaaatgaatagactatctagaacttgagaagattttattcttatttcatttattttttgtttgtttatttttatcgtttttgtttactggctttccttctgtattcataagattttttaaattgtcataattatattttaaatacccatcttcattaaagtatatttaactcataatttttgcagaaaatatgctatatattaggcaagaataaaagctaaagg

SEQ ID NO: 2937 - protein, 1073 aa, Homo sapiens
MKTLLLDLALWSLLFQPGWLSFSSQVSQNCHNGSYEISVLMMGNSAFAEPLKNLEDAVNEGLEIVRGRLQNAGLNVTVNATFMYSDGLIHNSGDCRSSTCEGLDLLRKISNAQRMGCVLIGPSCTYSTFQMYLDTELSYPMISAGSFGLSCDYKETLTRLMSPARKLMYFLVNFWKTNDLPFKTYSWSTSYVYKNGTETEDCFWYLNALEASVSYFSHELGFKVVLRQDKEFQDILMDHNRKSNVIIMCGGPEFLYKLKGDRAVAEDIVIILVDLFNDQYLEDNVTAPDYMKNVLVLTLSPGNSLLNSSFSRNLSPTKRDFALAYLNGILLFGHMLKIFLENGENITTPKFAHAFRNLTFEGYDGPVTLDDWGDVDSTMVLLYTSVDTKKYKVLLTYDTHVNKTYPVDMSPTFTWKNSKLPNDITGRGPQILMIAVFTLTGAVVLLLLVALLMLRKYRKDYELRQKKWSHIPPENIFPLETNETNHVSLKIDDDKRRDTIQRLRQCKYDKKRVILKDLKHNDGNFTEKQKIELNKLLQIDYYNLTKFYGTVKLDTMIFGVIEYCERGSLREVLNDTISYPDGTFMDWEFKISVLYDIAKGMSYLHSSKTEVHGRLKSTNCVVDSRMVVKITDFGCNSILPPKKDLWTAPEHLRQANISQKGDVYSYGIIAQEIILRKETFYTLSCRDRNEKIFRVENSNGMKPFRPDLFLETAEEKELEVYLLVKNCWEEDPEKRPDFKKIETTLAKIFGLFHDQKNESYMDTLIRRLQLYSRNLEHLVEERTQLYKAERDRADRLNFMLLPRLVVKSLKEKGFVEPELYEEVTIYFSDIVGFTTICKYSTPMEVVDMLNDIYKSFDHIVDHHDVYKVETIGDAYMVASGLPKRNGNRHAIDIAKMALEILSFMGTFELEHLPGLPIWIRIGVHSGPCAAGVVGIKMPRYCLFGDTVNTASRMESTGLPLRIHVSGSTIAILKRTECQFLYEVRGETYLKGRGNETTYWLTGMKDQKFNLPTPPTVENQQRLQAEFSDMIANSLQKRQAAGIRSQKPRRVASYKKGTLEYLQLNTTDKESTYF

SEQ ID NO: 2938 - DNA, 2240 bp, Homo sapiens
cgccgggccactggcacttgcttctgcggcgagtcccacccacgaccgcagcccagcaactcgcaaacgcaacctgaagcctgggctgcgcagtgtgggagggcttcgcgatcttgggggacccattccgaacttgcagaggaccgtagctctcctggcctggagagtgtgaacaggattgtggactcttccaagattcacaatgatatggtgaatccaaagactggaaccaaaaagatttactcagtgctttagttttaacaacagtaaattgtctaccaacacccatcatggctaaaagtgcggaggtcaaactggcaatatttgggagagcaggcgtgggcaagtcagctcttgtagtgagatttctgaccaaacggttcatctgggaatatgatcccaccctcgaatcaacctaccgacaccaagcaaccatcgatgatgaagttgtttccatggagatactagacactgctggtcaggaagataccattcagagggaggggcacatgcgatggggggaaggctttgtgctggtctacgacattactgaccgaggaagttttgaggaagtgctgccacttaagaacatcctagatgagatcaaaaagcccaagaatgtgactctcatcttggttggaaacaaagctgacttggaccactccaggcaggttagcacagaagaaggagagaagctggccacagaattggcttgtgctttttacgagtgctctgcctgcactggagaagggaacatcacagagatattctatgaattgtgtcgagaggtgcgtcgccggaggatggtgcagggcaagacgaggcgacgcagctccaccacgcatgtcaagcaagccattaacaagatgctcaccaaaatcagtagttaggcagcccagctgaggtggaccaactaattggaaacactcttccccttctgttcccctttcaaaaataaaacaaaatattgcattctttgtttggattctgagaaatgtctgggcttcccattgtttctggcctctaataggttgggaagttttagcgtgttttatgcaatttcagtgctaacaatttcttcctttcctgcttgaataagatacactctaatggcatttgaacatgtaatcaccagagattctgaaatgactggtttatgttaagctatttttaggcatcttcaccttgctttaagtaggttgaagtttttgcaaaggcatttaaaaattcaatttcttgtcagatactacaaataattttcttaaaagtctaagatagcagaaaatacagtaaaaacacaggagaagaagctgagctattggaacaggaaatagaaggaactctagtttctgtttgaagtgaggattttctgaattatctaatatcatctaggttttctttaaaattttattttgttcttcagttcaagcatcttctcactaatgtttttcactataacagagaattcatttcaatttgagttggttctctcaatgatctattgatcattacaccctaactctccttccttggctcaaacaatattttccctataacaaaggcaataggacacaaaattcacatcctgctgggccttttttcatcaagtcagggtgatataaaaacattggaagtcttttcaccaaaccctgactttattgaatgctagtagaagatgtagaattagagacatctgatttgtttatcaccttagcagaaaaaccacagtccaaaagacaagcaaattaagaatggagcttaaccatgcctccattgggaagtctagactttgagccaggtacagtaagaaaaattagcctctgattcattaagtttgccacatgacttattttgatattttggatacattaactcacttaggagaattcagaaaagaatgggtgattaaagttcattacagctgaataaatgtgtctaaaacagactcttgtattctgaaagtacagtctacaactgataaaaccttatgattcttttctcccccattatgcccctatatatatcaagatttgggtactttattttagtagaaaatatatatcttttacatatgtatgtatttataaatgcatagatatatgtataaaaatttgtaagcgttagcggcattaattcaccaatgcatttggacaacttgatgtaactgactttattttatgtgactataataaaaagcataattttctcattctgtcaaaaaaaaaaaaaaaaaaaaaaaa

SEQ ID NO: 2939 - protein, 199 aa, Homo sapiens
MAKSAEVKLAIFGRAGVGKSALVVRFLTKRFIWEYDPTLESTYRHQATIDDEVVSMEILDTAGQEDTIQREGHMRWGEGFVLVYDITDRGSFEEVLPLKNILDEIKKPKNVTLILVGNKADLDHSRQVSTEEGEKLATELACAFYECSACTGEGNITEIFYELCREVRRRRMVQGKTRRRSSTTHVKQAINKMLTKISS

SEQ ID NO: 2940 - DNA, 5069 bp, Homo sapiens
gggcgcagaggaggaaagggagcaggcgcagggggactggaaaggcagcatgcgctcgccaggagcaacctcggcgcccagggtctgaggctgcagccccagttcgccattgtgagccgccgccgggggagtccgctagcgcagccgtgcccccgagtccccgtccgcgcagcgatggggcacctgcccacggggatacacggcgcccgccgcctcctgcctctgctctggctctttgtgctgttcaagaatgctacagctttccatgtaactgtccaagatgataataacatcgttgtctcattagaagcttcagacgtcatcagtccagcatctgtgtatgttgtgaagataactggtgaatccaaaaattatttcttcgaatttgaggaattcaacagcactttgcctcctcctgttattttcaaggccagttatcatggcctttattatataatcactctggtagtggtaaatggaaatgtggtgaccaagccatccagatcaatcactgtgttaacaaaacctctacctgtaaccagtgtttccatatatgactataaaccttctcctgaaacaggagtcctgtttgaaatacattatccagaaaaatataacgttttcacaagagtgaacattagctactgggaaggtaaagacttccggacaatgctatataaagatttctttaagggaaaaacagtatttaatcactggctgccaggaatgtgttatagtaatatcacctttcagctggtatctgaggcaacttttaataaaagtacccttgttgagtacagtggtgtcagtcacgaacccaaacagcacagaactgccccttatccacctcaaaatatttccgttcgtatcgtaaacttgaacaaaaacaactgggaagaacagagtggcaatttcccagaagaatccttcatgagatcacaagatacaataggaaaagaaaaactcttccattttacagaagaaacccctgaaattccctcgggcaacatttcttccggttggcctgattttaatagcagtgactatgaaactacgtctcagccatattggtgggacagtgcatctgcagctcctgaaagtgaagatgaatttgtcagcgtacttcccatggaatacgaaaataacagtacactcagtgagacagagaagtcaacatcaggctctttctcctttttccctgtgcaaatgatattgacctggttaccacccaaaccacccactgcttttgatgggttccatatccatattgaacgagaagagaactttactgaatatttgatggtggatgaagaagcacatgaatttgttgcagaactgaaggaacctgggaaatataagttatctgtgacaacctttagttcctcaggatcttgtgaaactcgaaaaagtcagtcagcaaaatcactcagcttttatatcagtccttcaggagagtggattgaagaactgaccgagaagccgcagcacgtgagtgtccacgttttaagctcaaccactgccttgatgtcctggacatcttcccaagagaactacaacagcaccattgtgtctgtggtgtcgctgacctgccagaaacaaaaggagagccagaggcttgaaaagcagtactgcactcaggtgaactcaagcaaacctattattgaaaatctggttcctggtgcccagtaccaggttgtaatatacctaaggaaaggccctttgattggaccaccttcagatcctgtgacatttgctattgttcccacaggaataaaggatttaatgctctatcctttgggtcctacggccgtggttctgagctggaccagaccttatttaggcgtgttcagaaaatacgtggttgaaatgttttatttcaaccctgctacaatgacatcagagtggaccacctactatgaaatagcagcaactgtttccttaactgcatccgtgagaatagctaatctgctgccagcatggtactacaacttccgggttaccatggtgacgtggggagatccagaattgagctgctgtgacagctctaccatcagcttcataacagccccagtggctccggaaatcacttctgtggaatatttcaacagtctgttatatatcagttggacatatggggatgatacaacggacttgtcccattctagaatgcttcactggatggtggttgcagaaggaaaaaagaaaattaaaaagagtgtaacacgcaatgtcatgactgcaattctcagcttgcctccaggcgacatctataacctctcagtaactgcttgtactgaaagaggaagtaatacctccatgctccgccttgtcaagctagaaccagctccacccaaatcactcttcgcagtgaacaaaacccagacttcagtgactttgctgtgggtggaagagggagtagctgatttctttgaagttttctgtcaacaagttggctccagtcagaaaaccaaacttcaggaaccagttgctgtttcttcccatgtcgtgaccatctccagccttcttcctgccactgcctacaattgtagtgtcaccagctttagccatgacagccccagtgtccctacgttcatagccgtctcaacaatggttacagagatgaatcccaatgtggtagtgatctccgtgctggccatccttagcacacttttaattggactgttgcttgttaccctcattattcttaggaaaaagcatctgcagatggctagggagtgtggagctggtacatttgtcaattttgcatccttagagagggatggaaagcttccatacaactggagtaaaaatggtttaaagaagaggaaactgacaaacccggttcaactggatgactttgatgcctatattaaggatatggccaaagactctgactataaattttctcttcagtttgaggagttgaaattgattggactggatatcccacactttgctgcagatcttccactgaatcgatgtaaaaaccgttacacaaacatcctaccatatgacttcagccgtgtgagattagtctccatgaatgaagaggaaggtgcagactacatcaatgccaactatattcctggatacaactcaccccaggagtatattgccacccaggggccactgcctgaaaccagaaatgacttctggaagatggtcctgcaacaaaagtctcagattattgtcatgctcactcagtgtaatgagaaaaggagggtgaaatgtgaccattactggccattcacggaagaacctatagcctatggagacatcactgtggagatgatttcagaggaagagcaggacgactgggcctgtagacacttccggatcaactatgctgacgagatgcaggatgtgatgcattttaactacactgcatggcctgatcatggtgtgcccacagcaaatgctgcagaaagtatcctgcagtttgtacacatggtccgacagcaagctaccaagagcaaaggtcccatgatcattcactgcagtgctggcgtgggacggacaggaacattcattgccctggacaggctcttgcagcacattcgggatcatgagtttgttgacatcttagggctggtgtcagaaatgaggtcataccggatgtctatggtacagacagaggagcagtacatttttatccatcagtgtgtgcaactgatgtggatgaagaagaagcagcagttctgcatcagtgatgtcatatacgagaatgttagcaagtcctagttcagaatccggagcagagaggacatgatgtgcgcccatcctcccttgcttccagattgttttagtgggccctgatggtcatttttctaaacagaggccctgctttgtaatatgtggccaaggagataatttatctcacagaagcaccgggaagacttagccttaaagagcctacagtgtccttttggactctttcacttcgggacatttaataatggaccaaattcaacagaacaccaggaaggtcaagacgctctccaaagggcaggaagtacagcacttccgaagagtttagttggccctttgctggttgggctgagttttttatttttaagtgtttgtttttcagtgcaataatttttgtgtgtgtgtgattcttatcagaaagttgaattgttttctgcctacaccgttcatcagccccataacccaggaaggaacaggcattgttagcatcagattatacctcattattaaaaggaggcatggccacacatgaagaaatggtcattctacttcaaagaaattgagccagcactatctgtactccaacattaccggatctggattggggaggttggtcagggaagagaggggttctacccacagatcaactgtgtaatcttttactattcaagctataattcagcttcaaagtagagtagaaaaaaaattgtcttaactgttctagttcttgatggttttcttccttattaacagttggtgtttcttccttggcccttttggactaatgttactgtccaagttctttctcaagaaaccacatctggttcagaagagtgtcaagttggactctttgaactctgttgctgtctgagcaatcgtggtgcctagactttgcattccttgttctgttgacctgcatacatgtgagagctatttctttaagaactatataggctgtgaaaacgcactttctttcccccaaagagctgggaatttatgaagttatggcaatgaactgcagcatgctgggacaattatttgactacttttttttgtaatattgtcaaatgtctctatggattctgacagagatttctttttgttttgttattcttttggttgtcagtttcattttaacgagtgtaactagtaacattttattctttggattttgtataattacagtacatgattgtgtattgtgacatgaatgctgtcaaaatgacattgatggcattgtgaagcctgttactttgtgtcacttcctgataaataagaggtgatgacatggatatacaacagaaaacactttgagttgaaagtaaacacaagctggctgcttccctgtggcaactgtggct

SEQ ID NO: 2941 - protein, 1188 aa, Homo sapiens
MGHLPTGIHGARRLLPLLWLFVLFKNATAFHVTVQDDNNIVVSLEASDVISPASVYVVKITGESKNYFFEFEEFNSTLPPPVIFKASYHGLYYIITLVVVNGNVVTKPSRSITVLTKPLPVTSVSIYDYKPSPETGVLFEIHYPEKYNVFTRVNISYWEGKDFRTMLYKDFFKGKTVFNHWLPGMCYSNITFQLVSEATFNKSTLVEYSGVSHEPKQHRTAPYPPQNISVRIVNLNKNNWEEQSGNFPEESFMRSQDTIGKEKLFHFTEETPEIPSGNISSGWPDFNSSDYETTSQPYWWDSASAAPESEDEFVSVLPMEYENNSTLSETEKSTSGSFSFFPVQMILTWLPPKPPTAFDGFHIHIEREENFTEYLMVDEEAHEFVAELKEPGKYKLSVTTFSSSGSCETRKSQSAKSLSFYISPSGEWIEELTEKPQHVSVHVLSSTTALMSWTSSQENYNSTIVSVVSLTCQKQKESQRLEKQYCTQVNSSKPIIENLVPGAQYQVVIYLRKGPLIGPPSDPVTFAIVPTGIKDLMLYPLGPTAVVLSWTRPYLGVFRKYVVEMFYFNPATMTSEWTTYYEIAATVSLTASVRIANLLPAWYYNFRVTMVTWGDPELSCCDSSTISFITAPVAPEITSVEYFNSLLYISWTYGDDTTDLSHSRMLHWMVVAEGKKKIKKSVTRNVMTAILSLPPGDIYNLSVTACTERGSNTSMLRLVKLEPAPPKSLFAVNKTQTSVTLLWVEEGVADFFEVFCQQVGSSQKTKLQEPVAVSSHVVTISSLLPATAYNCSVTSFSHDSPSVPTFIAVSTMVTEMNPNVVVISVLAILSTLLIGLLLVTLIILRKKHLQMARECGAGTFVNFASLERDGKLPYNWSKNGLKKRKLTNPVQLDDFDAYIKDMAKDSDYKFSLQFEELKLIGLDIPHFAADLPLNRCKNRYTNILPYDFSRVRLVSMNEEEGADYINANYIPGYNSPQEYIATQGPLPETRNDFWKMVLQQKSQIIVMLTQCNEKRRVKCDHYWPFTEEPIAYGDITVEMISEEEQDDWACRHFRINYADEMQDVMHFNYTAWPDHGVPTANAAESILQFVHMVRQQATKSKGPMIIHCSAGVGRTGTFIALDRLLQHIRDHEFVDILGLVSEMRSYRMSMVQTEEQYIFIHQCVQLMWMKKKQQFCISDVIYENVSKS

SEQ ID NO: 2942 - DNA, 5153 bp, Homo sapiens
gggcgcagaggaggaaagggagcaggcgcagggggactggaaaggcagcatgcgctcgccaggagcaacctcggcgcccagggtctgaggctgcagccccagttcgccattgtgagccgccgccgggggagtccgctagcgcagccgtgcccccgagtccccgtccgcgcagcgatggggcacctgcccacggggatacacggcgcccgccgcctcctgcctctgctctggctctttgtgctgttcaagaatgctacagctttccatgtaactgtccaagatgataataacatcgttgtctcattagaagcttcagacgtcatcagtccagcatctgtgtatgttgtgaagataactggtgaatccaaaaattatttcttcgaatttgaggaattcaacagcactttgcctcctcctgttattttcaaggccagttatcatggcctttattatataatcactctggtagtggtaaatggaaatgtggtgaccaagccatccagatcaatcactgtgttaacaaaacctctacctgtaaccagtgtttccatatatgactataaaccttctcctgaaacaggagtcctgtttgaaatacattatccagaaaaatataacgttttcacaagagtgaacattagctactgggaaggtaaagacttccggacaatgctatataaagatttctttaagggaaaaacagtatttaatcactggctgccaggaatgtgttatagtaatatcacctttcagctggtatctgaggcaacttttaataaaagtacccttgttgagtacagtggtgtcagtcacgaacccaaacagcacagaactgccccttatccacctcaaaatatttccgttcgtatcgtaaacttgaacaaaaacaactgggaagaacagagtggcaatttcccagaagaatccttcatgagatcacaagatacaataggaaaagaaaaactcttccattttacagaagaaacccctgaaattccctcgggcaacatttcttccggttggcctgattttaatagcagtgactatgaaactacgtctcagccatattggtgggacagtgcatctgcagctcctgaaagtgaagatgaatttgtcagcgtacttcccatggaatacgaaaataacagtacactcagtgagacagagaagtcaacatcaggctctttctcctttttccctgtgcaaatgatattgacctggttaccacccaaaccacccactgcttttgatgggttccatatccatattgaacgagaagagaactttactgaatatttgatggtggatgaagaagcacatgaatttgttgcagaactgaaggaacctgggaaatataagttatctgtgacaacctttagttcctcaggatcttgtgaaactcgaaaaagtcagtcagcaaaatcactcagcttttatatcagtccttcaggagagtggattgaagaactgaccgagaagccgcagcacgtgagtgtccacgttttaagctcaaccactgccttgatgtcctggacatcttcccaagagaactacaacagcaccattgtgtctgtggtgtcgctgacctgccagaaacaaaaggagagccagaggcttgaaaagcagtactgcactcaggtgaactcaagcaaacctattattgaaaatctggttcctggtgcccagtaccaggttgtaatatacctaaggaaaggccctttgattggaccaccttcagatcctgtgacatttgctattgttcccacaggaataaaggatttaatgctctatcctttgggtcctacggccgtggttctgagctggaccagaccttatttaggcgtgttcagaaaatacgtggttgaaatgttttatttcaaccctgctacaatgacatcagagtggaccacctactatgaaatagcagcaactgtttccttaactgcatccgtgagaatagctaatctgctgccagcatggtactacaacttccgggttaccatggtgacgtggggagatccagaattgagctgctgtgacagctctaccatcagcttcataacagccccagtggctccggaaatcacttctgtggaatatttcaacagtctgttatatatcagttggacatatggggatgatacaacggacttgtcccattctagaatgcttcactggatggtggttgcagaaggaaaaaagaaaattaaaaagagtgtaacacgcaatgtcatgactgcaattctcagcttgcctccaggcgacatctataacctctcagtaactgcttgtactgaaagaggaagtaatacctccatgctccgccttgtcaagctagaaccagctccacccaaatcactcttcgcagtgaacaaaacccagacttcagtgactttgctgtgggtggaagagggagtagctgatttctttgaagttttctgtcaacaagttggctccagtcagaaaaccaaacttcaggaaccagttgctgtttcttcccatgtcgtgaccatctccagccttcttcctgccactgcctacaattgtagtgtcaccagctttagccatgacagccccagtgtccctacgttcatagccgtctcaacaatggttacagagatgaatcccaatgtggtagtgatctccgtgctggccatccttagcacacttttaattggactgttgcttgttaccctcattattcttaggaaaaagcatctgcagatggctagggagtgtggagctggtacatttgtcaattttgcatccttagagagggatggaaagcttccatacaactggcgtaggagtatatttgctttcttaaccctgctaccctcatgtctttggactgattatcttttggcattttatattaatccttggagtaaaaatggtttaaagaagaggaaactgacaaacccggttcaactggatgactttgatgcctatattaaggatatggccaaagactctgactataaattttctcttcagtttgaggagttgaaattgattggactggatatcccacactttgctgcagatcttccactgaatcgatgtaaaaaccgttacacaaacatcctaccatatgacttcagccgtgtgagattagtctccatgaatgaagaggaaggtgcagactacatcaatgccaactatattcctggatacaactcaccccaggagtatattgccacccaggggccactgcctgaaaccagaaatgacttctggaagatggtcctgcaacaaaagtctcagattattgtcatgctcactcagtgtaatgagaaaaggagggtgaaatgtgaccattactggccattcacggaagaacctatagcctatggagacatcactgtggagatgatttcagaggaagagcaggacgactgggcctgtagacacttccggatcaactatgctgacgagatgcaggatgtgatgcattttaactacactgcatggcctgatcatggtgtgcccacagcaaatgctgcagaaagtatcctgcagtttgtacacatggtccgacagcaagctaccaagagcaaaggtcccatgatcattcactgcagtgctggcgtgggacggacaggaacattcattgccctggacaggctcttgcagcacattcgggatcatgagtttgttgacatcttagggctggtgtcagaaatgaggtcataccggatgtctatggtacagacagaggagcagtacatttttatccatcagtgtgtgcaactgatgtggatgaagaagaagcagcagttctgcatcagtgatgtcatatacgagaatgttagcaagtcctagttcagaatccggagcagagaggacatgatgtgcgcccatcctcccttgcttccagattgttttagtgggccctgatggtcatttttctaaacagaggccctgctttgtaatatgtggccaaggagataatttatctcacagaagcaccgggaagacttagccttaaagagcctacagtgtccttttggactctttcacttcgggacatttaataatggaccaaattcaacagaacaccaggaaggtcaagacgctctccaaagggcaggaagtacagcacttccgaagagtttagttggccctttgctggttgggctgagttttttatttttaagtgtttgtttttcagtgcaataatttttgtgtgtgtgtgattcttatcagaaagttgaattgttttctgcctacaccgttcatcagccccataacccaggaaggaacaggcattgttagcatcagattatacctcattattaaaaggaggcatggccacacatgaagaaatggtcattctacttcaaagaaattgagccagcactatctgtactccaacattaccggatctggattggggaggttggtcagggaagagaggggttctacccacagatcaactgtgtaatcttttactattcaagctataattcagcttcaaagtagagtagaaaaaaaattgtcttaactgttctagttcttgatggttttcttccttattaacagttggtgtttcttccttggcccttttggactaatgttactgtccaagttctttctcaagaaaccacatctggttcagaagagtgtcaagttggactctttgaactctgttgctgtctgagcaatcgtggtgcctagactttgcattccttgttctgttgacctgcatacatgtgagagctatttctttaagaactatataggctgtgaaaacgcactttctttcccccaaagagctgggaatttatgaagttatggcaatgaactgcagcatgctgggacaattatttgactacttttttttgtaatattgtcaaatgtctctatggattctgacagagatttctttttgttttgttattcttttggttgtcagtttcattttaacgagtgtaactagtaacattttattctttggattttgtataattacagtacatgattgtgtattgtgacatgaatgctgtcaaaatgacattgatggcattgtgaagcctgttactttgtgtcacttcctgataaataagaggtgatgacatggatatacaacagaaaacactttgagttgaaagtaaacacaagctggctgcttccctgtggcaactgtggct

SEQ ID NO: 2943 - protein, 1216 aa, Homo sapiens
MGHLPTGIHGARRLLPLLWLFVLFKNATAFHVTVQDDNNIVVSLEASDVISPASVYVVKITGESKNYFFEFEEFNSTLPPPVIFKASYHGLYYIITLVVVNGNVVTKPSRSITVLTKPLPVTSVSIYDYKPSPETGVLFEIHYPEKYNVFTRVNISYWEGKDFRTMLYKDFFKGKTVFNHWLPGMCYSNITFQLVSEATFNKSTLVEYSGVSHEPKQHRTAPYPPQNISVRIVNLNKNNWEEQSGNFPEESFMRSQDTIGKEKLFHFTEETPEIPSGNISSGWPDFNSSDYETTSQPYWWDSASAAPESEDEFVSVLPMEYENNSTLSETEKSTSGSFSFFPVQMILTWLPPKPPTAFDGFHIHIEREENFTEYLMVDEEAHEFVAELKEPGKYKLSVTTFSSSGSCETRKSQSAKSLSFYISPSGEWIEELTEKPQHVSVHVLSSTTALMSWTSSQENYNSTIVSVVSLTCQKQKESQRLEKQYCTQVNSSKPIIENLVPGAQYQVVIYLRKGPLIGPPSDPVTFAIVPTGIKDLMLYPLGPTAVVLSWTRPYLGVFRKYVVEMFYFNPATMTSEWTTYYEIAATVSLTASVRIANLLPAWYYNFRVTMVTWGDPELSCCDSSTISFITAPVAPEITSVEYFNSLLYISWTYGDDTTDLSHSRMLHWMVVAEGKKKIKKSVTRNVMTAILSLPPGDIYNLSVTACTERGSNTSMLRLVKLEPAPPKSLFAVNKTQTSVTLLWVEEGVADFFEVFCQQVGSSQKTKLQEPVAVSSHVVTISSLLPATAYNCSVTSFSHDSPSVPTFIAVSTMVTEMNPNVVVISVLAILSTLLIGLLLVTLIILRKKHLQMARECGAGTFVNFASLERDGKLPYNWRRSIFAFLTLLPSCLWTDYLLAFYINPWSKNGLKKRKLTNPVQLDDFDAYIKDMAKDSDYKFSLQFEELKLIGLDIPHFAADLPLNRCKNRYTNILPYDFSRVRLVSMNEEEGADYINANYIPGYNSPQEYIATQGPLPETRNDFWKMVLQQKSQIIVMLTQCNEKRRVKCDHYWPFTEEPIAYGDITVEMISEEEQDDWACRHFRINYADEMQDVMHFNYTAWPDHGVPTANAAESILQFVHMVRQQATKSKGPMIIHCSAGVGRTGTFIALDRLLQHIRDHEFVDILGLVSEMRSYRMSMVQTEEQYIFIHQCVQLMWMKKKQQFCISDVIYENVSKS

SEQ ID NO: 2944 - DNA, 2948 bp, Homo sapiens
aagtaaaaaaatggaagggggaaaaggcaaagtattctgccttccaagttagatagctatctttatgaaaggacatatttcaaaggcaatataaagtctttatggtgctcttacctacctatatttgaattgggggatgcttcacctgcttattagtgaaagaagaaagaatacacttagtaaattaaattttttttaaaactttgtctttgctcagaaccagctccacccaaatcactcttcgcagtgaacaaaacccagacttcagtgactttgctgtgggtggaagagggagtagctgatttctttgaagttttctgtcaacaagttggctccagtcagaaaaccaaacttcaggaaccagttgctgtttcttcccatgtcgtgaccatctccagccttcttcctgccactgcctacaattgtagtgtcaccagctttagccatgacagccccagtgtccctacgttcatagccgtctcaacaatggttacagagatgaatcccaatgtggtagtgatctccgtgctggccatccttagcacacttttaattggactgttgcttgttaccctcattattcttaggaaaaagcatctgcagatggctagggagtgtggagctggtacatttgtcaattttgcatccttagagagggatggaaagcttccatacaactggagtaaaaatggtttaaagaagaggaaactgacaaacccggttcaactggatgactttgatgcctatattaaggatatggccaaagactctgactataaattttctcttcagtttgaggagttgaaattgattggactggatatcccacactttgctgcagatcttccactgaatcgatgtaaaaaccgttacacaaacatcctaccatatgacttcagccgtgtgagattagtctccatgaatgaagaggaaggtgcagactacatcaatgccaactatattcctggatacaactcaccccaggagtatattgccacccaggggccactgcctgaaaccagaaatgacttctggaagatggtcctgcaacaaaagtctcagattattgtcatgctcactcagtgtaatgagaaaaggagggtgaaatgtgaccattactggccattcacggaagaacctatagcctatggagacatcactgtggagatgatttcagaggaagagcaggacgactgggcctgtagacacttccggatcaactatgctgacgagatgcaggatgtgatgcattttaactacactgcatggcctgatcatggtgtgcccacagcaaatgctgcagaaagtatcctgcagtttgtacacatggtccgacagcaagctaccaagagcaaaggtcccatgatcattcactgcagtgctggcgtgggacggacaggaacattcattgccctggacaggctcttgcagcacattcgggatcatgagtttgttgacatcttagggctggtgtcagaaatgaggtcataccggatgtctatggtacagacagaggagcagtacatttttatccatcagtgtgtgcaactgatgtggatgaagaagaagcagcagttctgcatcagtgatgtcatatacgagaatgttagcaagtcctagttcagaatccggagcagagaggacatgatgtgcgcccatcctcccttgcttccagattgttttagtgggccctgatggtcatttttctaaacagaggccctgctttgtaatatgtggccaaggagataatttatctcacagaagcaccgggaagacttagccttaaagagcctacagtgtccttttggactctttcacttcgggacatttaataatggaccaaattcaacagaacaccaggaaggtcaagacgctctccaaagggcaggaagtacagcacttccgaagagtttagttggccctttgctggttgggctgagttttttatttttaagtgtttgtttttcagtgcaataatttttgtgtgtgtgtgattcttatcagaaagttgaattgttttctgcctacaccgttcatcagccccataacccaggaaggaacaggcattgttagcatcagattatacctcattattaaaaggaggcatggccacacatgaagaaatggtcattctacttcaaagaaattgagccagcactatctgtactccaacattaccggatctggattggggaggttggtcagggaagagaggggttctacccacagatcaactgtgtaatcttttactattcaagctataattcagcttcaaagtagagtagaaaaaaaattgtcttaactgttctagttcttgatggttttcttccttattaacagttggtgtttcttccttggcccttttggactaatgttactgtccaagttctttctcaagaaaccacatctggttcagaagagtgtcaagttggactctttgaactctgttgctgtctgagcaatcgtggtgcctagactttgcattccttgttctgttgacctgcatacatgtgagagctatttctttaagaactatataggctgtgaaaacgcactttctttcccccaaagagctgggaatttatgaagttatggcaatgaactgcagcatgctgggacaattatttgactacttttttttgtaatattgtcaaatgtctctatggattctgacagagatttctttttgttttgttattcttttggttgtcagtttcattttaacgagtgtaactagtaacattttattctttggattttgtataattacagtacatgattgtgtattgtgacatgaatgctgtcaaaatgacattgatggcattgtgaagcctgttactttgtgtcacttcctgataaataagaggtgatgacatggatatacaacagaaaacactttgagttgaaagtaaacacaagctggctgcttccctgtggcaactgtggct

SEQ ID NO: 2945 - protein, 377 aa, Homo sapiens
MVTEMNPNVVVISVLAILSTLLIGLLLVTLIILRKKHLQMARECGAGTFVNFASLERDGKLPYNWSKNGLKKRKLTNPVQLDDFDAYIKDMAKDSDYKFSLQFEELKLIGLDIPHFAADLPLNRCKNRYTNILPYDFSRVRLVSMNEEEGADYINANYIPGYNSPQEYIATQGPLPETRNDFWKMVLQQKSQIIVMLTQCNEKRRVKCDHYWPFTEEPIAYGDITVEMISEEEQDDWACRHFRINYADEMQDVMHFNYTAWPDHGVPTANAAESILQFVHMVRQQATKSKGPMIIHCSAGVGRTGTFIALDRLLQHIRDHEFVDILGLVSEMRSYRMSMVQTEEQYIFIHQCVQLMWMKKKQQFCISDVIYENVSKS

SEQ ID NO: 2946 - DNA, 3032 bp, Homo sapiens
aagtaaaaaaatggaagggggaaaaggcaaagtattctgccttccaagttagatagctatctttatgaaaggacatatttcaaaggcaatataaagtctttatggtgctcttacctacctatatttgaattgggggatgcttcacctgcttattagtgaaagaagaaagaatacacttagtaaattaaattttttttaaaactttgtctttgctcagaaccagctccacccaaatcactcttcgcagtgaacaaaacccagacttcagtgactttgctgtgggtggaagagggagtagctgatttctttgaagttttctgtcaacaagttggctccagtcagaaaaccaaacttcaggaaccagttgctgtttcttcccatgtcgtgaccatctccagccttcttcctgccactgcctacaattgtagtgtcaccagctttagccatgacagccccagtgtccctacgttcatagccgtctcaacaatggttacagagatgaatcccaatgtggtagtgatctccgtgctggccatccttagcacacttttaattggactgttgcttgttaccctcattattcttaggaaaaagcatctgcagatggctagggagtgtggagctggtacatttgtcaattttgcatccttagagagggatggaaagcttccatacaactggcgtaggagtatatttgctttcttaaccctgctaccctcatgtctttggactgattatcttttggcattttatattaatccttggagtaaaaatggtttaaagaagaggaaactgacaaacccggttcaactggatgactttgatgcctatattaaggatatggccaaagactctgactataaattttctcttcagtttgaggagttgaaattgattggactggatatcccacactttgctgcagatcttccactgaatcgatgtaaaaaccgttacacaaacatcctaccatatgacttcagccgtgtgagattagtctccatgaatgaagaggaaggtgcagactacatcaatgccaactatattcctggatacaactcaccccaggagtatattgccacccaggggccactgcctgaaaccagaaatgacttctggaagatggtcctgcaacaaaagtctcagattattgtcatgctcactcagtgtaatgagaaaaggagggtgaaatgtgaccattactggccattcacggaagaacctatagcctatggagacatcactgtggagatgatttcagaggaagagcaggacgactgggcctgtagacacttccggatcaactatgctgacgagatgcaggatgtgatgcattttaactacactgcatggcctgatcatggtgtgcccacagcaaatgctgcagaaagtatcctgcagtttgtacacatggtccgacagcaagctaccaagagcaaaggtcccatgatcattcactgcagtgctggcgtgggacggacaggaacattcattgccctggacaggctcttgcagcacattcgggatcatgagtttgttgacatcttagggctggtgtcagaaatgaggtcataccggatgtctatggtacagacagaggagcagtacatttttatccatcagtgtgtgcaactgatgtggatgaagaagaagcagcagttctgcatcagtgatgtcatatacgagaatgttagcaagtcctagttcagaatccggagcagagaggacatgatgtgcgcccatcctcccttgcttccagattgttttagtgggccctgatggtcatttttctaaacagaggccctgctttgtaatatgtggccaaggagataatttatctcacagaagcaccgggaagacttagccttaaagagcctacagtgtccttttggactctttcacttcgggacatttaataatggaccaaattcaacagaacaccaggaaggtcaagacgctctccaaagggcaggaagtacagcacttccgaagagtttagttggccctttgctggttgggctgagttttttatttttaagtgtttgtttttcagtgcaataatttttgtgtgtgtgtgattcttatcagaaagttgaattgttttctgcctacaccgttcatcagccccataacccaggaaggaacaggcattgttagcatcagattatacctcattattaaaaggaggcatggccacacatgaagaaatggtcattctacttcaaagaaattgagccagcactatctgtactccaacattaccggatctggattggggaggttggtcagggaagagaggggttctacccacagatcaactgtgtaatcttttactattcaagctataattcagcttcaaagtagagtagaaaaaaaattgtcttaactgttctagttcttgatggttttcttccttattaacagttggtgtttcttccttggcccttttggactaatgttactgtccaagttctttctcaagaaaccacatctggttcagaagagtgtcaagttggactctttgaactctgttgctgtctgagcaatcgtggtgcctagactttgcattccttgttctgttgacctgcatacatgtgagagctatttctttaagaactatataggctgtgaaaacgcactttctttcccccaaagagctgggaatttatgaagttatggcaatgaactgcagcatgctgggacaattatttgactacttttttttgtaatattgtcaaatgtctctatggattctgacagagatttctttttgttttgttattcttttggttgtcagtttcattttaacgagtgtaactagtaacattttattctttggattttgtataattacagtacatgattgtgtattgtgacatgaatgctgtcaaaatgacattgatggcattgtgaagcctgttactttgtgtcacttcctgataaataagaggtgatgacatggatatacaacagaaaacactttgagttgaaagtaaacacaagctggctgcttccctgtggcaactgtggct

SEQ ID NO: 2947 - protein, 405 aa, Homo sapiens
MVTEMNPNVVVISVLAILSTLLIGLLLVTLIILRKKHLQMARECGAGTFVNFASLERDGKLPYNWRRSIFAFLTLLPSCLWTDYLLAFYINPWSKNGLKKRKLTNPVQLDDFDAYIKDMAKDSDYKFSLQFEELKLIGLDIPHFAADLPLNRCKNRYTNILPYDFSRVRLVSMNEEEGADYINANYIPGYNSPQEYIATQGPLPETRNDFWKMVLQQKSQIIVMLTQCNEKRRVKCDHYWPFTEEPIAYGDITVEMISEEEQDDWACRHFRINYADEMQDVMHFNYTAWPDHGVPTANAAESILQFVHMVRQQATKSKGPMIIHCSAGVGRTGTFIALDRLLQHIRDHEFVDILGLVSEMRSYRMSMVQTEEQYIFIHQCVQLMWMKKKQQFCISDVIYENVSKS

SEQ ID NO: 2948 - DNA, 3980 bp, Homo sapiens
aagtaaaaaaatggaagggggaaaaggcaaagtattctgccttccaagttagatagctatctttatgaaaggacatatttcaaaggcaatataaagtctttatggtgctcttacctacctatatttgaattgggggatgcttcacctgcttattagtgaaagaagaaagaatacacttagtaaattaaattttttttaaaactttgtctttgctcagaaccagctccacccaaatcactcttcgcagtgaacaaaacccagacttcagtgactttgctgtgggtggaagagggagtagctgatttctttgaagttttctgtcaacaagttggctccagtcagaaaaccaaacttcaggaaccagttgctgtttcttcccatgtcgtgaccatctccagccttcttcctgccactgcctacaattgtagtgtcaccagctttagccatgacagccccagtgtccctacgttcatagccgtctcaacaatggttacagagatgaatcccaatgtggtagtgatctccgtgctggccatccttagcacacttttaattggactgttgcttgttaccctcattattcttaggaaaaagcatctgcagatggctagggagtgtggagctggtacatttgtcaattttgcatccttagagagggatggaaagcttccatacaactggagtaaaaatggtttaaagaagaggaaactgacaaacccggttcaactggatgactttgatgcctatattaaggatatggccaaagactctgactataaattttctcttcagtttgaggagttgaaattgattggactggatatcccacactttgctgcagatcttccactgaatcgatgtaaaaaccgttacacaaacatcctaccatatgacttcagccgtgtgagattagtctccatgaatgaagaggaaggtgcagactacatcaatgccaactatattcctggatacaactcaccccaggagtatattgccacccaggggccactgcctgaaaccagaaatgacttctggaagatggtcctgcaacaaaagtctcagattattgtcatgctcactcagtgtaatgagaaaaggagggtgaaatgtgaccattactggccattcacggaagaacctatagcctatggagacatcactgtggagatgatttcagaggaagagcaggacgactgggcctgtagacacttccggatcaactatgctgacgagatgcaggatgtgatgcattttaactacactgcatggcctgatcatggtgtgcccacagcaaatgctgcagaaagtatcctgcagtttgtacacatggtccgacagcaagctaccaagagcaaaggtcccatgatcattcactgcagtgctggcgtgggacggacaggaacattcattgccctggacaggctcttgcagcacattcgggatcatgagtttgttgacatcttagggctggtgtcagaaatgaggtcataccggatgtctatggtacagacagaggagcagtacatttttatccatcagtgtgtgcaactgatgtggatgaagaagaagcagcagttctgcatcagtgatgtcatatacgagaatgttagcaagtcctagttcagaatccggagcagtaagtggagaagagctctccacgagtgttcagtcttagaactattagagggggatgtgatggatgggacaaaagacagcagtagccatttgtattgactctgacttcacatgagtatttcttcccagctcctggcctcacatgggtggtcacagggagaaacaagtactgtagcagatctttgagtttcaatgcaccttggttggtgttggcaacaaacaggagcttctgcacatcatgatgactttacctccattccctctacccagaaccctaaattattctgttattggatctgtgcctgtaatatcaggatactaccatccaaatctatctagatatcttgtgcaaatattttattgattacaagggctgtatacggggttacaaaaagacatgagctggattggacactcctaaaaccaaaaacaacagtgacaatagagtctcaggatagcagagtctgaaaataccttggtctcccccattatgtgagcccttatttgagagcttcatgaagacacttgtaacatattcaacgtcctgtactccagttttgactacgagatcagattttggaggtgtaagtaatcttggctgaggtaacagtaatctgcccatttagttcagtaaacagactgtagagtgtctgactatactgggggaagaggagccaatgacagggtagggagatgacagtggtgcatgatgggagaatcatgaaagtctgggaagcatatggaccagtgggaaggataggattagcactgcacctctacatccatcaagagagacagagcgcacaatggagcaggaaggataaaaaataaagaaagacagagacaaacaaatttgctgggagagggaaagacattcagacccacagaaaggaggcagcacacagagaaagatgcacagatcaacccacatctgcatgggttgtgagactgagcatagtgagagcagtggtggagcaatagaagattgctgtgacaccaggctgcttactgtctttctttgtctcattcacaggagaggacatgatgtgcgcccatcctcccttgcttccagattgttttagtgggccctgatggtcatttttctaaacagaggccctgctttgtaatatgtggccaaggagataatttatctcacagaagcaccgggaagacttagccttaaagagcctacagtgtccttttggactctttcacttcgggacatttaataatggaccaaattcaacagaacaccaggaaggtcaagacgctctccaaagggcaggaagtacagcacttccgaagagtttagttggccctttgctggttgggctgagttttttatttttaagtgtttgtttttcagtgcaataatttttgtgtgtgtgtgattcttatcagaaagttgaattgttttctgcctacaccgttcatcagccccataacccaggaaggaacaggcattgttagcatcagattatacctcattattaaaaggaggcatggccacacatgaagaaatggtcattctacttcaaagaaattgagccagcactatctgtactccaacattaccggatctggattggggaggttggtcagggaagagaggggttctacccacagatcaactgtgtaatcttttactattcaagctataattcagcttcaaagtagagtagaaaaaaaattgtcttaactgttctagttcttgatggttttcttccttattaacagttggtgtttcttccttggcccttttggactaatgttactgtccaagttctttctcaagaaaccacatctggttcagaagagtgtcaagttggactctttgaactctgttgctgtctgagcaatcgtggtgcctagactttgcattccttgttctgttgacctgcatacatgtgagagctatttctttaagaactatataggctgtgaaaacgcactttctttcccccaaagagctgggaatttatgaagttatggcaatgaactgcagcatgctgggacaattatttgactacttttttttgtaatattgtcaaatgtctctatggattctgacagagatttctttttgttttgttattcttttggttgtcagtttcattttaacgagtgtaactagtaacattttattctttggattttgtataattacagtacatgattgtgtattgtgacatgaatgctgtcaaaatgacattgatggcattgtgaagcctgttactttgtgtcacttcctgataaataagaggtgatgacatggatatacaacagaaaacactttgagttgaaagtaaacacaagctggctgcttccctgtggcaactgtggct

SEQ ID NO: 2949 - protein, 377 aa, Homo sapiens; identical to SEQ ID NO: 2945

SEQ ID NO: 2950 - DNA, 4064 bp, Homo sapiens
aagtaaaaaaatggaagggggaaaaggcaaagtattctgccttccaagttagatagctatctttatgaaaggacatatttcaaaggcaatataaagtctttatggtgctcttacctacctatatttgaattgggggatgcttcacctgcttattagtgaaagaagaaagaatacacttagtaaattaaattttttttaaaactttgtctttgctcagaaccagctccacccaaatcactcttcgcagtgaacaaaacccagacttcagtgactttgctgtgggtggaagagggagtagctgatttctttgaagttttctgtcaacaagttggctccagtcagaaaaccaaacttcaggaaccagttgctgtttcttcccatgtcgtgaccatctccagccttcttcctgccactgcctacaattgtagtgtcaccagctttagccatgacagccccagtgtccctacgttcatagccgtctcaacaatggttacagagatgaatcccaatgtggtagtgatctccgtgctggccatccttagcacacttttaattggactgttgcttgttaccctcattattcttaggaaaaagcatctgcagatggctagggagtgtggagctggtacatttgtcaattttgcatccttagagagggatggaaagcttccatacaactggcgtaggagtatatttgctttcttaaccctgctaccctcatgtctttggactgattatcttttggcattttatattaatccttggagtaaaaatggtttaaagaagaggaaactgacaaacccggttcaactggatgactttgatgcctatattaaggatatggccaaagactctgactataaattttctcttcagtttgaggagttgaaattgattggactggatatcccacactttgctgcagatcttccactgaatcgatgtaaaaaccgttacacaaacatcctaccatatgacttcagccgtgtgagattagtctccatgaatgaagaggaaggtgcagactacatcaatgccaactatattcctggatacaactcaccccaggagtatattgccacccaggggccactgcctgaaaccagaaatgacttctggaagatggtcctgcaacaaaagtctcagattattgtcatgctcactcagtgtaatgagaaaaggagggtgaaatgtgaccattactggccattcacggaagaacctatagcctatggagacatcactgtggagatgatttcagaggaagagcaggacgactgggcctgtagacacttccggatcaactatgctgacgagatgcaggatgtgatgcattttaactacactgcatggcctgatcatggtgtgcccacagcaaatgctgcagaaagtatcctgcagtttgtacacatggtccgacagcaagctaccaagagcaaaggtcccatgatcattcactgcagtgctggcgtgggacggacaggaacattcattgccctggacaggctcttgcagcacattcgggatcatgagtttgttgacatcttagggctggtgtcagaaatgaggtcataccggatgtctatggtacagacagaggagcagtacatttttatccatcagtgtgtgcaactgatgtggatgaagaagaagcagcagttctgcatcagtgatgtcatatacgagaatgttagcaagtcctagttcagaatccggagcagtaagtggagaagagctctccacgagtgttcagtcttagaactattagagggggatgtgatggatgggacaaaagacagcagtagccatttgtattgactctgacttcacatgagtatttcttcccagctcctggcctcacatgggtggtcacagggagaaacaagtactgtagcagatctttgagtttcaatgcaccttggttggtgttggcaacaaacaggagcttctgcacatcatgatgactttacctccattccctctacccagaaccctaaattattctgttattggatctgtgcctgtaatatcaggatactaccatccaaatctatctagatatcttgtgcaaatattttattgattacaagggctgtatacggggttacaaaaagacatgagctggattggacactcctaaaaccaaaaacaacagtgacaatagagtctcaggatagcagagtctgaaaataccttggtctcccccattatgtgagcccttatttgagagcttcatgaagacacttgtaacatattcaacgtcctgtactccagttttgactacgagatcagattttggaggtgtaagtaatcttggctgaggtaacagtaatctgcccatttagttcagtaaacagactgtagagtgtctgactatactgggggaagaggagccaatgacagggtagggagatgacagtggtgcatgatgggagaatcatgaaagtctgggaagcatatggaccagtgggaaggataggattagcactgcacctctacatccatcaagagagacagagcgcacaatggagcaggaaggataaaaaataaagaaagacagagacaaacaaatttgctgggagagggaaagacattcagacccacagaaaggaggcagcacacagagaaagatgcacagatcaacccacatctgcatgggttgtgagactgagcatagtgagagcagtggtggagcaatagaagattgctgtgacaccaggctgcttactgtctttctttgtctcattcacaggagaggacatgatgtgcgcccatcctcccttgcttccagattgttttagtgggccctgatggtcatttttctaaacagaggccctgctttgtaatatgtggccaaggagataatttatctcacagaagcaccgggaagacttagccttaaagagcctacagtgtccttttggactctttcacttcgggacatttaataatggaccaaattcaacagaacaccaggaaggtcaagacgctctccaaagggcaggaagtacagcacttccgaagagtttagttggccctttgctggttgggctgagttttttatttttaagtgtttgtttttcagtgcaataatttttgtgtgtgtgtgattcttatcagaaagttgaattgttttctgcctacaccgttcatcagccccataacccaggaaggaacaggcattgttagcatcagattatacctcattattaaaaggaggcatggccacacatgaagaaatggtcattctacttcaaagaaattgagccagcactatctgtactccaacattaccggatctggattggggaggttggtcagggaagagaggggttctacccacagatcaactgtgtaatcttttactattcaagctataattcagcttcaaagtagagtagaaaaaaaattgtcttaactgttctagttcttgatggttttcttccttattaacagttggtgtttcttccttggcccttttggactaatgttactgtccaagttctttctcaagaaaccacatctggttcagaagagtgtcaagttggactctttgaactctgttgctgtctgagcaatcgtggtgcctagactttgcattccttgttctgttgacctgcatacatgtgagagctatttctttaagaactatataggctgtgaaaacgcactttctttcccccaaagagctgggaatttatgaagttatggcaatgaactgcagcatgctgggacaattatttgactacttttttttgtaatattgtcaaatgtctctatggattctgacagagatttctttttgttttgttattcttttggttgtcagtttcattttaacgagtgtaactagtaacattttattctttggattttgtataattacagtacatgattgtgtattgtgacatgaatgctgtcaaaatgacattgatggcattgtgaagcctgttactttgtgtcacttcctgataaataagaggtgatgacatggatatacaacagaaaacactttgagttgaaagtaaacacaagctggctgcttccctgtggcaactgtggct

SEQ ID NO: 2951 - protein, 405 aa, Homo sapiens; identical to SEQ ID NO: 2947

SEQ ID NO: 2952 - DNA, 4333 bp, Homo sapiens
gagaaaatcaattggtttagaaggtttggactcacttgacaggttcagttggagacgatcataggtggctgctgtgacaaagggaaattgtgcttttccagcatgcttactgaccctgatttacctcaggagtttgaaaggatgtcttccaagcgaccagcctctccgtatggggaagcagatggagaggtagccatggtgacaagcagacagaaagtggaagaagaggagagtgacgggctcccagcctttcaccttcccttgcatgtgagttttcccaacaagcctcactctgaggaatttcagccagtttctctgctgacgcaagagacttgtggccataggactcccacttctcagcacaatacaatggaagttgatggcaataaagttatgtcttcatttgccccacacaactcatctacctcacctcagaaggcagaagaaggtgggcgacagagtggcgagtccttgtctagtacagccctgggaactcctgaacggcgcaagggcagtttagctgatgttgttgacaccttgaagcagaggaaaatggaagagctcatcaaaaacgagccggaagaaacccccagtattgaaaaactactctcaaaggactggaaagacaagcttcttgcaatgggatcggggaactttggcgaaataaaagggactcccgagagcttagctgagaaagaaaggcaactcatgggtatgatcaaccagctgaccagcctccgagagcagctgttggctgcccacgatgagcagaagaaactagctgcctctcagattgagaaacagcgtcagcaaatggagctggccaagcagcaacaagaacaaattgcaagacagcagcagcagcttctacagcaacaacacaaaatcaatttgctccagcaacagatccaggttcaaggtcagctgccgccattaatgattcccgtattccctcctgatcaacggacactggctgcagctgcccagcaaggattcctcctccctccaggcttcagctataaggctggatgtagtgacccttaccctgttcagctgatcccaactaccatggcagctgctgccgcagcaacaccaggcttaggcccactccaactgcagcagttatatgctgcccagctagctgcaatgcaggtatctccaggagggaagctgccaggcataccccaaggcaaccttggtgctgctgtatctcctaccagcattcacacagacaagagcacaaacagcccaccacccaaaagcaaggatgaagtggcacagccactgaacctatcagctaaacccaagacctctgatggcaaatcacccacatcacccacctctccccatatgccagctctgagaataaacagtggggcaggccccctcaaagcctctgtcccagcagcgttagctagtccttcagccagagttagcacaataggttacttaaatgaccatgatgctgtcaccaaggcaatccaagaagctcggcaaatgaaggagcaactccgacgggaacaacaggtgcttgatgggaaggtggctgttgtgaatagtctgggtctcaataactgccgaacagaaaaggaaaaaacaacactggagagtctgactcagcaactggcagttaaacagaatgaagaaggaaaatttagccatgcaatgatggatttcaatctgagtggagattctgatggaagtgctggagtctcagagtcaagaatttatagggaatcccgagggcgtggtagcaatgaaccccacataaagcgtccaatgaatgccttcatggtgtgggctaaagatgaacggagaaagatccttcaagcctttcctgacatgcacaactccaacatcagcaagatattgggatctcgctggaaagctatgacaaacctagagaaacagccatattatgaggagcaagcccgtctcagcaagcagcacctggagaagtaccctgactataagtacaagcccaggccaaagcgcacctgcctggtggatggcaaaaagctgcgcattggtgaatacaaggcaatcatgcgcaacaggcggcaggaaatgcggcagtacttcaatgttgggcaacaagcacagatccccattgccactgctggtgttgtgtaccctggagccatcgccatggctgggatgccctcccctcacctgccctcggagcactcaagcgtgtctagcagcccagagcctgggatgcctgttatccagagcacttacggtgtgaaaggagaggagccacatatcaaagaagagatacaggccgaggacatcaatggagaaatttatgatgagtacgacgaggaagaggatgatccagatgtagattatgggagtgacagtgaaaaccatattgcaggacaagccaactgataagggtcaaaagattgttgtgaccttaggacttaaagaagccctaactggttcatccttaccagtggccaagcacattaactttctcatacactgactgttactttaactgttagtcttaaatagttgggacatcagctgactaatagacctcagcctcaaaaggcttggaaagaaaaaacaaatacaacaagcaaacaacaatatcaacaacaagagattgaaataagctatgggtaaaataatgccagtaattcagctgctacatccaagcactgaagtcttacccgtcaacttttttttttttttaaataaactttatggctgtttgttctacaatgttctagaaattctcactcaggtacacagtgccaacaagtggcttgtgaatgtgttttgttgttttgtgctacaatttttaaaaagaaaaaagttttgttttgttttttggggtttctgggttttttccttttctttttctttcctttcattttttttctttgtaatgcacctgacagaaaaaaaagaaaaatgaatttctctttacttctctccaccttctccatctctctactttaaagatggaagtctgtgcatgaggggaaagagggaaaaagagcctgtttttaacttccttgctatccaccacaaaataagcaattattttctttagaggactttatctattgcacaccacactacatctttgagcaagtgccaaatttgtactgaagtgttgaccaagttcattttttctctttactttttccttttccttcttaagttaggacagtgttaaatcttagacaatcccttgaaaaacctgaaataccagcagctggtgagatttgacttttttttttaatggaaactgtaggtgctgttctcaggtgaaaagagagagagagagagagacataagaaatttagagaaaaatattttctgatcttggatttttgtgtgtatgtatgtatgtgattatggtactaataataggaataacgttggaccattgtgagttaaacccacatctggggatgaaatcccacatcctcccaagtgactggtctagaaataatcttgaccttgactttgcacttcaaatgacaacttaaccaagtatagggctcagaaattatatttttaaatgtctgattattattggatggatcaggtggccctgtgtaatagaggtgtgcatgtataacatggaagctactagcaaactgctcccagatgtcctttctccctggtcagttggttccattaacgtttgctacttagtgatttttgtttttcctgttgatattttgagcaaaacaatcattgttttcattgaatatatttggccattttttcagacaaatagaattagcttatttcttcaacattccatcctttcccgatcaggaaatgaaactgatgattttataaggtatttttcacccctccatgaagtgaggtggaggcctttagcatttcagaagtgtgggccatatgtagttcatgccataaaaagtaggatttaattaaaagtcattgcagcccaataaaatggagcctggctgcacccagggatccttgccactgctcttcccttgctgtcagattaatccactgaagtccaactttggttcaagcagagtatttgcaaagagcaacaactgaatgtgatgggactgcttatgtagattttgccagccaaatgccaaggcagttgtagggcctgtacaaataaatgcaaaatcatttcaagtcaattgccattatttgtattgaagtatcagatagatagtaaatactgcaactagtagcttgatgtgctatagttttcactccagtcatcattttcctatctcaccccccgaaacaccaccctaaagttggatttttacatataaataaaaaaagaatcccttttaaaaaaaaaaaaaaaaaa

SEQ ID NO: 2953 - protein, 763 aa, Homo sapiens [sequence omitted]

SEQ ID NO: 2954 - DNA, 4563 bp, Homo sapiens
gtgaaaaaggcgagccaccaaaacccatctccagtctcctcccgggggcccccagcccgcctctgtgccactttgcatcccacgccggaggaggcattaacgagaccgggtaaggctttttaaacggtccaaggtgtagagccatacttcaggaggatcctcagaagttttggacaagcctccccaaatgtggcaggtgctgtgctggccattggtgacccaaagatgatgaaaaatatgttcctgcccacaaggagttagcgacctactgggctttcctcttgctgatgacatgattcctgtttgaatctgttgacaagattctgaaagctgaacagagaattctggcactgcactgggtaggaaaaaggatgtcttccaagcgaccagcctctccgtatggggaagcagatggagaggtagccatggtgacaagcagacagaaagtggaagaagaggagagtgacgggctcccagcctttcaccttcccttgcatgtgagttttcccaacaagcctcactctgaggaatttcagccagtttctctgctgacgcaagagacttgtggccataggactcccacttctcagcacaatacaatggaagttgatggcaataaagttatgtcttcatttgccccacacaactcatctacctcacctcagaaggcagaagaaggtgggcgacagagtggcgagtccttgtctagtacagccctgggaactcctgaacggcgcaagggcagtttagctgatgttgttgacaccttgaagcagaggaaaatggaagagctcatcaaaaacgagccggaagaaacccccagtattgaaaaactactctcaaaggactggaaagacaagcttcttgcaatgggatcggggaactttggcgaaataaaagggactcccgagagcttagctgagaaagaaaggcaactcatgggtatgatcaaccagctgaccagcctccgagagcagctgttggctgcccacgatgagcagaagaaactagctgcctctcagattgagaaacagcgtcagcaaatggagctggccaagcagcaacaagaacaaattgcaagacagcagcagcagcttctacagcaacaacacaaaatcaatttgctccagcaacagatccaggttcaaggtcagctgccgccattaatgattcccgtattccctcctgatcaacggacactggctgcagctgcccagcaaggattcctcctccctccaggcttcagctataaggctggatgtagtgacccttaccctgttcagctgatcccaactaccatggcagctgctgccgcagcaacaccaggcttaggcccactccaactgcagcagttatatgctgcccagctagctgcaatgcaggtatctccaggagggaagctgccaggcataccccaaggcaaccttggtgctgctgtatctcctaccagcattcacacagacaagagcacaaacagcccaccacccaaaagcaaggatgaagtggcacagccactgaacctatcagctaaacccaagacctctgatggcaaatcacccacatcacccacctctccccatatgccagctctgagaataaacagtggggcaggccccctcaaagcctctgtcccagcagcgttagctagtccttcagccagagttagcacaataggttacttaaatgaccatgatgctgtcaccaaggcaatccaagaagctcggcaaatgaaggagcaactccgacgggaacaacaggtgcttgatgggaaggtggctgttgtgaatagtctgggtctcaataactgccgaacagaaaaggaaaaaacaacactggagagtctgactcagcaactggcagttaaacagaatgaagaaggaaaatttagccatgcaatgatggatttcaatctgagtggagattctgatggaagtgctggagtctcagagtcaagaatttatagggaatcccgagggcgtggtagcaatgaaccccacataaagcgtccaatgaatgccttcatggtgtgggctaaagatgaacggagaaagatccttcaagcctttcctgacatgcacaactccaacatcagcaagatattgggatctcgctggaaagctatgacaaacctagagaaacagccatattatgaggagcaagcccgtctcagcaagcagcacctggagaagtaccctgactataagtacaagcccaggccaaagcgcacctgcctggtggatggcaaaaagctgcgcattggtgaatacaaggcaatcatgcgcaacaggcggcaggaaatgcggcagtacttcaatgttgggcaacaagcacagatccccattgccactgctggtgttgtgtaccctggagccatcgccatggctgggatgccctcccctcacctgccctcggagcactcaagcgtgtctagcagcccagagcctgggatgcctgttatccagagcacttacggtgtgaaaggagaggagccacatatcaaagaagagatacaggccgaggacatcaatggagaaatttatgatgagtacgacgaggaagaggatgatccagatgtagattatgggagtgacagtgaaaaccatattgcaggacaagccaactgataagggtcaaaagattgttgtgaccttaggacttaaagaagccctaactggttcatccttaccagtggccaagcacattaactttctcatacactgactgttactttaactgttagtcttaaatagttgggacatcagctgactaatagacctcagcctcaaaaggcttggaaagaaaaaacaaatacaacaagcaaacaacaatatcaacaacaagagattgaaataagctatgggtaaaataatgccagtaattcagctgctacatccaagcactgaagtcttacccgtcaacttttttttttttttaaataaactttatggctgtttgttctacaatgttctagaaattctcactcaggtacacagtgccaacaagtggcttgtgaatgtgttttgttgttttgtgctacaatttttaaaaagaaaaaagttttgttttgttttttggggtttctgggttttttccttttctttttctttcctttcattttttttctttgtaatgcacctgacagaaaaaaaagaaaaatgaatttctctttacttctctccaccttctccatctctctactttaaagatggaagtctgtgcatgaggggaaagagggaaaaagagcctgtttttaacttccttgctatccaccacaaaataagcaattattttctttagaggactttatctattgcacaccacactacatctttgagcaagtgccaaatttgtactgaagtgttgaccaagttcattttttctctttactttttccttttccttcttaagttaggacagtgttaaatcttagacaatcccttgaaaaacctgaaataccagcagctggtgagatttgacttttttttttaatggaaactgtaggtgctgttctcaggtgaaaagagagagagagagagagacataagaaatttagagaaaaatattttctgatcttggatttttgtgtgtatgtatgtatgtgattatggtactaataataggaataacgttggaccattgtgagttaaacccacatctggggatgaaatcccacatcctcccaagtgactggtctagaaataatcttgaccttgactttgcacttcaaatgacaacttaaccaagtatagggctcagaaattatatttttaaatgtctgattattattggatggatcaggtggccctgtgtaatagaggtgtgcatgtataacatggaagctactagcaaactgctcccagatgtcctttctccctggtcagttggttccattaacgtttgctacttagtgatttttgtttttcctgttgatattttgagcaaaacaatcattgttttcattgaatatatttggccattttttcagacaaatagaattagcttatttcttcaacattccatcctttcccgatcaggaaatgaaactgatgattttataaggtatttttcacccctccatgaagtgaggtggaggcctttagcatttcagaagtgtgggccatatgtagttcatgccataaaaagtaggatttaattaaaagtcattgcagcccaataaaatggagcctggctgcacccagggatccttgccactgctcttcccttgctgtcagattaatccactgaagtccaactttggttcaagcagagtatttgcaaagagcaacaactgaatgtgatgggactgcttatgtagattttgccagccaaatgccaaggcagttgtagggcctgtacaaataaatgcaaaatcatttcaagtcaattgccattatttgtattgaagtatcagatagatagtaaatactgcaactagtagcttgatgtgctatagttttcactccagtcatcattttcctatctcaccccccgaaacaccaccctaaagttggatttttacatataaataaaaaaagaatcccttttaaaaaaaaaaaaaaaaaa

SEQ ID NO: 2955 - protein, 750 aa, Homo sapiens
MSSKRPASPYGEADGEVAMVTSRQKVEEEESDGLPAFHLPLHVSFPNKPHSEEFQPVSLLTQETCGHRTPTSQHNTMEVDGNKVMSSFAPHNSSTSPQKAEEGGRQSGESLSSTALGTPERRKGSLADVVDTLKQRKMEELIKNEPEETPSIEKLLSKDWKDKLLAMGSGNFGEIKGTPESLAEKERQLMGMINQLTSLREQLLAAHDEQKKLAASQIEKQRQQMELAKQQQEQIARQQQQLLQQQHKINLLQQQIQVQGQLPPLMIPVFPPDQRTLAAAAQQGFLLPPGFSYKAGCSDPYPVQLIPTTMAAAAAATPGLGPLQLQQLYAAQLAAMQVSPGGKLPGIPQGNLGAAVSPTSIHTDKSTNSPPPKSKDEVAQPLNLSAKPKTSDGKSPTSPTSPHMPALRINSGAGPLKASVPAALASPSARVSTIGYLNDHDAVTKAIQEARQMKEQLRREQQVLDGKVAVVNSLGLNNCRTEKEKTTLESLTQQLAVKQNEEGKFSHAMMDFNLSGDSDGSAGVSESRIYRESRGRGSNEPHIKRPMNAFMVWAKDERRKILQAFPDMHNSNISKILGSRWKAMTNLEKQPYYEEQARLSKQHLEKYPDYKYKPRPKRTCLVDGKKLRIGEYKAIMRNRRQEMRQYFNVGQQAQIPIATAGVVYPGAIAMAGMPSPHLPSEHSSVSSSPEPGMPVIQSTYGVKGEEPHIKEEIQAEDINGEIYDEYDEEEDDPDVDYGSDSENHIAGQAN

SEQ ID NO: 2956 - DNA, 3095 bp, Homo sapiens
atttgtgccataggagctgtgcatgcatgatgaagtggcacagccactgaacctatcagctaaacccaagacctctgatggcaaatcacccacatcacccacctctccccatatgccagctctgagaataaacagtggggcaggccccctcaaagcctctgtcccagcagcgttagctagtccttcagccagagttagcacaataggttacttaaatgaccatgatgctgtcaccaaggcaatccaagaagctcggcaaatgaaggagcaactccgacgggaacaacaggtgcttgatgggaaggtggctgttgtgaatagtctgggtctcaataactgccgaacagaaaaggaaaaaacaacactggagagtctgactcagcaactggcagttaaacagaatgaagaaggaaaatttagccatgcaatgatggatttcaatctgagtggagattctgatggaagtgctggagtctcagagtcaagaatttatagggaatcccgagggcgtggtagcaatgaaccccacataaagcgtccaatgaatgccttcatggtgtgggctaaagatgaacggagaaagatccttcaagcctttcctgacatgcacaactccaacatcagcaagatattgggatctcgctggaaagctatgacaaacctagagaaacagccatattatgaggagcaagcccgtctcagcaagcagcacctggagaagtaccctgactataagtacaagcccaggccaaagcgcacctgcctggtggatggcaaaaagctgcgcattggtgaatacaaggcaatcatgcgcaacaggcggcaggaaatgcggcagtacttcaatgttgggcaacaagcacagatccccattgccactgctggtgttgtgtaccctggagccatcgccatggctgggatgccctcccctcacctgccctcggagcactcaagcgtgtctagcagcccagagcctgggatgcctgttatccagagcacttacggtgtgaaaggagaggagccacatatcaaagaagagatacaggccgaggacatcaatggagaaatttatgatgagtacgacgaggaagaggatgatccagatgtagattatgggagtgacagtgaaaaccatattgcaggacaagccaactgataagggtcaaaagattgttgtgaccttaggacttaaagaagccctaactggttcatccttaccagtggccaagcacattaactttctcatacactgactgttactttaactgttagtcttaaatagttgggacatcagctgactaatagacctcagcctcaaaaggcttggaaagaaaaaacaaatacaacaagcaaacaacaatatcaacaacaagagattgaaataagctatgggtaaaataatgccagtaattcagctgctacatccaagcactgaagtcttacccgtcaacttttttttttttttaaataaactttatggctgtttgttctacaatgttctagaaattctcactcaggtacacagtgccaacaagtggcttgtgaatgtgttttgttgttttgtgctacaatttttaaaaagaaaaaagttttgttttgttttttggggtttctgggttttttccttttctttttctttcctttcattttttttctttgtaatgcacctgacagaaaaaaaagaaaaatgaatttctctttacttctctccaccttctccatctctctactttaaagatggaagtctgtgcatgaggggaaagagggaaaaagagcctgtttttaacttccttgctatccaccacaaaataagcaattattttctttagaggactttatctattgcacaccacactacatctttgagcaagtgccaaatttgtactgaagtgttgaccaagttcattttttctctttactttttccttttccttcttaagttaggacagtgttaaatcttagacaatcccttgaaaaacctgaaataccagcagctggtgagatttgacttttttttttaatggaaactgtaggtgctgttctcaggtgaaaagagagagagagagagagacataagaaatttagagaaaaatattttctgatcttggatttttgtgtgtatgtatgtatgtgattatggtactaataataggaataacgttggaccattgtgagttaaacccacatctggggatgaaatcccacatcctcccaagtgactggtctagaaataatcttgaccttgactttgcacttcaaatgacaacttaaccaagtatagggctcagaaattatatttttaaatgtctgattattattggatggatcaggtggccctgtgtaatagaggtgtgcatgtataacatggaagctactagcaaactgctcccagatgtcctttctccctggtcagttggttccattaacgtttgctacttagtgatttttgtttttcctgttgatattttgagcaaaacaatcattgttttcattgaatatatttggccattttttcagacaaatagaattagcttatttcttcaacattccatcctttcccgatcaggaaatgaaactgatgattttataaggtatttttcacccctccatgaagtgaggtggaggcctttagcatttcagaagtgtgggccatatgtagttcatgccataaaaagtaggatttaattaaaagtcattgcagcccaataaaatggagcctggctgcacccagggatccttgccactgctcttcccttgctgtcagattaatccactgaagtccaactttggttcaagcagagtatttgcaaagagcaacaactgaatgtgatgggactgcttatgtagattttgccagccaaatgccaaggcagttgtagggcctgtacaaataaatgcaaaatcatttcaagtcaattgccattatttgtattgaagtatcagatagatagtaaatactgcaactagtagcttgatgtgctatagttttcactccagtcatcattttcctatctcaccccccgaaacaccaccctaaagttggatttttacatataaataaaaaaagaatcccttttaaaaaaaaaaaaaaaaaa

SEQ ID NO: 2957 - protein, 377 aa, Homo sapiens
MHDEVAQPLNLSAKPKTSDGKSPTSPTSPHMPALRINSGAGPLKASVPAALASPSARVSTIGYLNDHDAVTKAIQEARQMKEQLRREQQVLDGKVAVVNSLGLNNCRTEKEKTTLESLTQQLAVKQNEEGKFSHAMMDFNLSGDSDGSAGVSESRIYRESRGRGSNEPHIKRPMNAFMVWAKDERRKILQAFPDMHNSNISKILGSRWKAMTNLEKQPYYEEQARLSKQHLEKYPDYKYKPRPKRTCLVDGKKLRIGEYKAIMRNRRQEMRQYFNVGQQAQIPIATAGVVYPGAIAMAGMPSPHLPSEHSSVSSSPEPGMPVIQSTYGVKGEEPHIKEEIQAEDINGEIYDEYDEEEDDPDVDYGSDSENHIAGQAN

SEQ ID NO: 2958 - DNA, 3476 bp, Homo sapiens
atccccgcctgacgggagctagccctcagtccgcccgagctgtggttgtgggcgccggacaagtccaaggcgcctcctcccaatatggacagccgctacaacagcactgcgggcatcggggacttgaaccagctgagcgctgccatcccggccacgcgggtggaggtgtccgtgtcctgcagaaatcttcttgacagagacacattttctaaatctgatccaatttgtgtcttatatgtacaaggagttggaaataaagaatggagagagtttggaagaactgaagtaattgataatactttaaatcctgattttgtaagaaagtttattctggactacttttttgaagaaagagagaatcttcgttttgacttgtatgatgttgattcaaagagccccaacttatccaaacatgactttctgggacaagtgttttgtacattgggagagatcgttggttcacagggaagtcgcctggaaaaaccaatagtaggaattccagggaagaaatgtggtacaatcatacttacagcagaggaattaaactgttgcagggatgccgttttgatgcaattttgtgcgaacaaattggacaagaaggacttctttggaaaatcagatcctttccttgtattttatcgaagtaatgaagatggcagttttacaatttgtcacaagacagaagttgtcaaaaacactctaaatccagtatggcaagcattcaagatctcagtcagagcattatgtaatggagactatgacagaacaatcaaagtagaggtgtatgactgggaccgagatggaagtcatgatttcattggagaatttacaacaagctatagggaactttctagagggcagtcacaattcaacgtatatgaggtggtgaatcccaaaaagaaaggaaaaaagaaaaaatatactaattctggaacagtaactttactctctttcttggtagaaacagaagtttcattccttgactacattaagggagggacgcaaatcaatttcacagtggctattgattttacagcatcaaacggcaaccctgctcagcccacttccctccactacatgaatccttaccaactgaatgcctatggtatggcactaaaagcagtgggagaaattgttcaagattatgacagtgataaaatgtttccagctctaggatttggtgcaaaactgcctccagatggaaggatatctcacgaatttgctttgaatgggaatcctcaaaacccctactgtgatggcattgagggggtcatggaggcttattacaggagtctgaaatctgtacaactatatgggcccaccaactttgctcctgtaattaatcatgtagcaagatatgcttcttctgtaaaggatggctcccagtattttgtgcttctgattgttacagatggtgttatctcagatatggcccagactaaggagtccatagttaatgcctcaaaacttccaatgtcaataattatagtaggtgttggaccagcagaatttgatgcaatggtcgaattggatggagatgatgtaagagtctcctctagaggaaaatatgctgaaagagacattgtgcagtttgtgccattcagggattatattgacagaagtggaaaccacatactgagcatggctagattggctaaagatgtcctagctgagatccctgagcagtttctctcctatatgagagcccgaggaatcaagccatcacctgcgcctcccccatacaccccacctacacatgtgttacagactcaaatatgactgtgctctgaaatgctaatgtcaactacaaatcaaaagtgctgagttaatgctttgtgcctggtgctctgtaatgaaccaggcaatgagatagttttctcagtttggtttcagcagttaatgtgctttcttggatccaaatttaaatatcttcctaaaccaaaactgtaaatatggttgttgcatgagcaacagaaaaaattgtttaaatgcttgaagcaaagtatggatgtcttctctaaatctttctttctttttttttttaacagaaacagctaatttccaatgtattgttgggaaaaagcacaaactgtgtttttaactcaaatattgtcttcgactgctatgtgtataggaaagcagtctctgtatcaatgtttacatgttactactttttaaatttcaatacttttataactgttcttaaaaataagagttttaaatactgaatcctttgtcttctaaattgcaatagctataatcacaagagcaatatctctttgaatgactgtctggacaaacacaattgcaaataagggaagggaaaaatgcttttctatttttcagtaactggattgtcttaagaaactacatctgcttaataaacaatttctcagcaatgtttgctgggtatgggagtttaagcccggcagatgtgtctcctggttgaacatgcatttttcatggagtttgggttctaaatttagactgcagttggtttgtattttgtaacactaagtagaaattataaaaagtcaaacattgtgatctataaatgcacagaaaatactttgtaaaaagtagcatccttatataataatgctatttagaaagactgaaaccaagactatttaactgtgaactatgtagcagatgttttaaactttttattccattatatcttgtctagatattttaattcaaagggatactggctctcttgatcggaatttcttgttatcaccattccacgttgccacacaaggtgcacaggctggaagtcttttgtgaaattcccagttaaatatatacaactatgtgacttagtgcacaacacatttgtgaaataacctactcctatatactgacctgcctgtccacgaataattgtaaagggtttttgcatgtacagtttttacaagaattacagttttgtgaagttgtgtctaaattaaagcatttctttagaacaaatggccttaaattctcacggaattcctggaaatgattgtgaattgccttcaaataatagaaaagtgtatttatttgtgtgtgtgtgtgtgtcaaaaatgtaactgctttataatattttttccttacctatatattctatttaatacttggtttatttctactgtacattgttttctttgtcccaagttgacctagggtgacttttataagcatgaaactattttactggaaagaaaaatatatacatccacatatctaacagtatcaatgttatataactatgtaataattgttgatttttaattatgtattaaaatctttaaatcataactatttgctttgtacgtttcatgtatgaatgacaatagtttgatgatttcctttactgatcttaaatatttatgccactacagtgtattacctacagatttttaaatttagctttatttatcaacccaaaaaacaaataaataagatcaatattctttaaaaaaaaaaaaaaa

SEQ ID NO: 2959 - protein, 564 aa, Homo sapiens
MDSRYNSTAGIGDLNQLSAAIPATRVEVSVSCRNLLDRDTFSKSDPICVLYVQGVGNKEWREFGRTEVIDNTLNPDFVRKFILDYFFEERENLRFDLYDVDSKSPNLSKHDFLGQVFCTLGEIVGSQGSRLEKPIVGIPGKKCGTIILTAEELNCCRDAVLMQFCANKLDKKDFFGKSDPFLVFYRSNEDGSFTICHKTEVVKNTLNPVWQAFKISVRALCNGDYDRTIKVEVYDWDRDGSHDFIGEFTTSYRELSRGQSQFNVYEVVNPKKKGKKKKYTNSGTVTLLSFLVETEVSFLDYIKGGTQINFTVAIDFTASNGNPAQPTSLHYMNPYQLNAYGMALKAVGEIVQDYDSDKMFPALGFGAKLPPDGRISHEFALNGNPQNPYCDGIEGVMEAYYRSLKSVQLYGPTNFAPVINHVARYASSVKDGSQYFVLLIVTDGVISDMAQTKESIVNASKLPMSIIIVGVGPAEFDAMVELDGDDVRVSSRGKYAERDIVQFVPFRDYIDRSGNHILSMARLAKDVLAEIPEQFLSYMRARGIKPSPAPPPYTPPTHVLQTQI

SEQ ID NO: 2960 - DNA, 2279 bp, Homo sapiens
gctgacggggtggcagtgcggcgggttacggcctggtcagaccataatgacttcagcaaataaagcaatcgaattacaactacaagtgaaacaaaatgcagaagaattacaagactttatgcgggatttagaaaactgggaaaaagacattaaacaaaaggatatggaactaagaagacagaatggtgttcctgaagagaatttacctcctattcgaaatgggaattttaggaaaaagaagaaaggcaaagctaaagagtcttccaaaaaaaccagagaggaaaacacaaaaaacaggataaaatcttatgattatgaggcatgggcaaaacttgatgtggaccgtatccttgatgagcttgacaaagacgatagtacccatgagtctctgtctcaagaatcagagtcggaagaagatgggattcatgtagattcacaaaaggctcttgttttaaaagaaaagggcaataaatacttcaaacaaggaaaatatgatgaagcaattgactgctacacaaaaggcatggatgccgatccatataatcccgtgttgccaacgaacagagcgtcagcatattttagactgaaaaaatttgctgttgctgagtctgattgtaatttagcagttgccttgaatagaagttatacaaaggcttattccagacgaggtgctgctcgatttgctttgcaaaaattagaagaggccaaaaaagattatgaaagagtattagaactagaaccaaataactttgaagcaacaaatgaactcaggaaaatcagtcaggctttagcatccaaagaaaactcatatccaaaggaagctgacatagtgattaagtcaacagaaggagagcgaaagcaaattgaagcacaacagaataagcagcaggccatttcagagaaagatcgggggaatggatttttcaaagaggggaaatatgaaagagcaattgaatgctatactcgagggatagcagcagatggtgctaatgcccttcttccagctaacagagctatggcctatctgaagattcagaaatatgaagaagctgaaaaagactgcacacaagccattttattagatggctcatattctaaagcttttgccagaagaggaactgcaagaacatttttgggaaagctaaatgaggcaaaacaagattttgaaactgttttacttctggaacctggaaataagcaagcagtaactgaactctccaaaattaaaaaggaattaattgagaaaggacactgggatgatgtctttcttgattccacacaaagacaaaatgtggtaaaacccattgataatccaccgcatcctggatcaactaaaccactcaagaaggttattattgaagaaactggtaatttgatacagactattgatgtgccagatagcactactgctgctgctccagagaataatcctattaatctagcaaatgtaatagcagccacaggcaccacaagtaagaagaattcaagccaagatgtcctttttcccacaagtgatactccaagagcaaaagtattgaaaatagaagaagtcagtgatacttcatccctgcaacctcaagccagtttgaagcaggatgtatgtcagtcttacagcgagaaaatgcccatagagatagaacaaaaacctgctcagtttgccacaactgttcttcctccaattcctgcaaactcgttccagctcgaatctgatttcagacaattgaaaagttctccagatatgttgtatcagtatttaaagcaaattgaaccatctttgtatcctaagttgtttcagaaaaatctggatccagatgtattcaaccagatcgttaaaattctgcatgacttttacattgagaaagaaaagccattactcatctttgaaatcttacaaagactttctgaactaaaaaggtttgatatggcagtgatgtttatgtcagaaacagagaaaaagattgcacgtgcattatttaatcacatagacaagtcaggattgaaggatagttctgtcgaagaactcaagaaaagatacggtggttgatttccatttttgctgaaataattgtttttgactttcatatgtaaattttttctactgaaagtgttttgctttttaagaaaatgaaattatatagcaggaaaggactatctttgaacataagttaattaactataaggtgaattgtgatttaactagtgagaattgtattcaagtgaactctgtttttctgaaaataaaaatataaacaatgagaaaaaaaaaaaaaaaaaaaaaa

SEQ ID NO: 2961 - protein, 665 aa, Homo sapiens
MTSANKAIELQLQVKQNAEELQDFMRDLENWEKDIKQKDMELRRQNGVPEENLPPIRNGNFRKKKKGKAKESSKKTREENTKNRIKSYDYEAWAKLDVDRILDELDKDDSTHESLSQESESEEDGIHVDSQKALVLKEKGNKYFKQGKYDEAIDCYTKGMDADPYNPVLPTNRASAYFRLKKFAVAESDCNLAVALNRSYTKAYSRRGAARFALQKLEEAKKDYERVLELEPNNFEATNELRKISQALASKENSYPKEADIVIKSTEGERKQIEAQQNKQQAISEKDRGNGFFKEGKYERAIECYTRGIAADGANALLPANRAMAYLKIQKYEEAEKDCTQAILLDGSYSKAFARRGTARTFLGKLNEAKQDFETVLLLEPGNKQAVTELSKIKKELIEKGHWDDVFLDSTQRQNVVKPIDNPPHPGSTKPLKKVIIEETGNLIQTIDVPDSTTAAAPENNPINLANVIAATGTTSKKNSSQDVLFPTSDTPRAKVLKIEEVSDTSSLQPQASLKQDVCQSYSEKMPIEIEQKPAQFATTVLPPIPANSFQLESDFRQLKSSPDMLYQYLKQIEPSLYPKLFQKNLDPDVFNQIVKILHDFYIEKEKPLLIFEILQRLSELKRFDMAVMFMSETEKKIARALFNHIDKSGLKDSSVEELKKRYGG

SEQ ID NO: 2962 - DNA, 2321 bp, Homo sapiens
cttcctgaaaggatctggagacaccagctccacaagtcctggtgtctttaaaaggatcagcttgaggaataaggctcgtctgagagctgtgacattcatctgactctagtgaaagtccaacagccactccctttttggcctccaactgggcaccatgagggcctgcatctccctggtattggccgtgctgtgtggcctggcctgggctgaggaccacaaagagtcagagccattgccacagctggaggaagagacagaagaggccctcgccagcaacttgtactcggcacccacctcctgccagggccgctgctacgaagcctttgacaagcaccaccaatgtcactgcaatgcccgctgccaagagtttgggaactgctgcaaggattttgagagcctgtgtagtgaccacgaggtctcccacagcagtgatgccataacaaaagaggagattcagagcatctctgagaagatctacagggcagacaccaacaaagcccagaaggaagacatcgttctcaatagccaaaactgcatctccccgtcagagaccagaaaccaagtggatcgctgcccaaagccactcttcacttatgtcaatgagaagctgttctccaagcccacctatgcagccttcatcaacctcctcaacaactaccagcgggcaacaggccatggggagcacttcagtgcccaggagctggccgagcaggacgccttcctcagagagatcatgaagacagcagtcatgaaggagctctacagcttcctccatcaccagaatcgctatggctcagagcaagagtttgtcgatgacttgaagaacatgtggtttgggctctattcaagaggcaatgaagagggggactcgagtggctttgaacatgtcttctcaggtgaggtaaaaaaaggcaaggttactggcttccataactggatccgcttctacctggaggagaaggagggtctggttgactattacagtcacatctacgatgggccttgggattcttaccccgatgtgctggcaatgcagttcaactgggacggctactataaggaagtgggctctgctttcatcggcagcagccctgagtttgagtttgcactctactccctgtgcttcatcgccaggccaggcaaagtgtgccagttaagcctgggaggatatcccttagctgtccggacatatacctgggacaagtccacctatgggaatggcaagaagtacatcgccacagcctacatagtgtcttccacctaatagaacttcgagccagaaaggggcatgagggctcttgcgagactgaagtgctatcttctctggactagagagaagagggagaggactggaagggatcaccaaatctcaaagcaatgagaagcattcctaaatcccaaagtgcccacatgggaaagagataaaatgtacaaattagaaaaatgtggataaacagtcaaacctttatcctctagaattttggcaatgttgactaagaaacagagtccaagcagagaaggtaggaaccctccatagctctctgccctgatgtgtgggggaactaggaagaagtcctttgacctcaccaggcctcatgcttccctttaatgtaaagggaaggggtttgcccactttcctctttttggggttggtgagagggcaaaccctgatatttttactgtgaaggtgttttcagttgttcttaggaagaacagctgatagaaattcaagattactataatggctgttattatacacagctctgtaaactaccactcagccctgtgttggggtcctcaaagaagtaaggccacagtaatcaagcaagggcctttggttttttccagagttagatcctctcagaacagagtctgggagaactccaatgctgaatggagaagggtaataggttggtgcagtgaatgggctgggggtggggtggccttctccaggcctgagtgtttttgtgtccagctcagtatctgcaacaagaagtttcccacttgtggatgtttagtgcagccacagacttgtattttgatccccaatttttttttgaaagagttctcctcataggaggatgattcagcatcagaagaagaaggaacccatagcttggtgtcattaacataattattttaagccttatccagcagccataatttgaataactctacgagaccagagagactgtagttccctattttaacctcaattatgcatttgtcccccaaccccactgagaactaaatgctgtaccacagagccgggtgtgaactatggtttagaaggttcaagtttccaattaaagtcattgaag

SEQ ID NO: 2963 - protein, 369 aa, Homo sapiens
MRACISLVLAVLCGLAWAEDHKESEPLPQLEEETEEALASNLYSAPTSCQGRCYEAFDKHHQCHCNARCQEFGNCCKDFESLCSDHEVSHSSDAITKEEIQSISEKIYRADTNKAQKEDIVLNSQNCISPSETRNQVDRCPKPLFTYVNEKLFSKPTYAAFINLLNNYQRATGHGEHFSAQELAEQDAFLREIMKTAVMKELYSFLHHQNRYGSEQEFVDDLKNMWFGLYSRGNEEGDSSGFEHVFSGEVKKGKVTGFHNWIRFYLEEKEGLVDYYSHIYDGPWDSYPDVLAMQFNWDGYYKEVGSAFIGSSPEFEFALYSLCFIARPGKVCQLSLGGYPLAVRTYTWDKSTYGNGKKYIATAYIVSST

SEQ ID NO: 2964 - DNA, 3327 bp, Homo sapiens
gcccccacccctctactcacccaagaggagcctctccaccgagccctgcatcctgctgccctggcagccagtccagctaggcactggcccagttcactgtacctggacttacccactggcaccctccggatccccttatcaaagctgatgggggtcgctggggaccccccagccttttgctagagcctgcacggctgtgcgagcttgaaaagaaacatgaaggtgggctggccaggtgagagctgctggcaggtgggcctggctgtggaggatagcccagctctgggagcaccgcgggtgggagccctccctgacgtggtgccggaggggacactactcaacatggtgttgagaaggatgcaccggccccgaagctgctcctaccagctgctgctggagcaccagcgtccgagctgcatccaggggctgcgctggacaccactcaccaacagcgaggagtccctggatttcagcgagagcctggagcaggcctccacagagcgggtgctcagggctgggaggcagctgcatcggcatctgctggccacctgcccaaacctcatccgagaccggaagtaccaccttaggctctatcggcagtgctgctctggccgggagctggtggatgggatcttggccctgggacttggggtccattcccggagccaagttgtgggaatctgccaggtgctgctggatgaaggtgccctctgccatgtgaaacacgactgggccttccaggaccgagatgcccaattctaccggttccccgggcccgagcccgagcccgtgggaactcatgagatggaggaggagttggccgaagctgtggccctgctctcccagcgggggcctgacgccctgctcactgtggcacttcgaaagcccccaggtcagcgcacggatgaagagctggacctcatctttgaggagctgctgcacatcaaggctgtggcccacctctccaactcggtgaagcgagaattagcggctgttctgctctttgaaccacacagcaaggcagggaccgtgttgttcagccagggggacaagggcacttcgtggtacattatctggaagggatctgtcaacgtggtgacccatggcaaggggctggtgaccaccctgcatgagggagatgattttggacagctggctctggtgaatgatgcaccccgggcagccaccatcatcctgcgagaagacaactgtcatttcctgcgtgtggacaagcaggacttcaaccgtatcatcaaggatgtggaggcaaagaccatgcggctggaagaacatggcaaagtggtgctggtgctggagagagcctctcagggcgccggcccttcccgacccccaaccccaggcaggaaccggtatacagtgatgtctggcaccccagagaagatcctagagcttctgttggaggccatgggaccagattccagtgctcatgacccaacagagacattcctcagcgacttcctcctgacccacagggtcttcatgcccagcgcccaactctgcgctgcccttctgcaccacttccatgtggagcctgcgggtggcagcgagcaggagcgcagcacctacgtctgcaacaagaggcagcagatcttgcggctggtcagccagtgggtggccctgtatggctccatgctccacactgaccctgtggccaccagcttcctccagaaactctcagacctggtgggcagggacacccgactcagcaacctgctgagggagcagtggccagagaggcggcgatgccacaggttggagaatggctgtgggaatgcatctcctcagatgaaggcccggaacttgcctgtttggctccccaaccaggacgagccccttcctggcagcagctgtgccatccaagttggggataaagtcccctatgacatctgccggccagaccactcagtgttgaccctgcagctgcctgtgacagcctccgtgagagaggtgatggcagcgttggcccaggaggatggctggaccaaggggcaggtgctggtgaaggtcaattctgcaggtgatgccattggcctgcagccagatgcccgtggtgtggccacatctctggggctcaatgagcgtctctttgttgtcaacccacaggaagtgcatgagctgatcccacaccctgaccagctggggcccactgtgggctctgctgaggggctggacctggtgagtgccaaggacctggcaggccagctgacggaccacgactggagcctcttcaacagtatccaccaggtggagctgatccactatgtgctgggcccccagcatctgcgggatgtcaccaccgccaacctggagcgcttcatgcgccgcttcaatgagctgcagtactgggtggccaccgagctgtgtctctgccccgtgcccggcccccgggcccagctgctcaggaagttcattaagctggcggcccacctcaaggagcagaagaatctcaattccttctttgccgtcatgtttggcctcagcaactcggccatcagccgcctagcccacacctgggagcggctgcctcacaaagtccggaagctgtactccgccctcgagaggctgctggatccctcatggaaccaccgggtataccgactggccctcgccaagctctcccctcctgtcatccccttcatgccccttcttctcaaagacatgaccttcattcatgagggaaaccacacactagtggagaatctcatcaactttgagaagatgagaatgatggccagagccgcgcggatgctgcaccactgccgaagccacaaccctgtgcctctctcaccactcagaagccgagtttcccacctccacgaggacagccaggtggcgaggatttccacatgctcggagcagtccctgagcacccggagtccagccagcacctgggcttatgtccagcagctgaaggtcattgacaaccagcgggaactctcccgcctctcccgagagctggagccatgaggaggggctgggactggagctggagcaggcacttgcagccgggaaagccagggtgtgccgggccaagatactcacaggctggccacagctgggcaaggctctccgtggagtggactcgagtccctggagcaggcagtgtggaggcagccatcccctgtgatgactggcagctaaggaggacctcggagtggacccgagccaggaataacgaatgacccaaggccaaggaagggaggacagagaggccccaggagtgggtggagagtggagtgcgctgggacgttgtgtgcaatagagaggtctccacaccagatgtcttccagaaaaaaaaaaaaaaaa

SEQ ID NO: 2965 - protein, 881 aa, Homo sapiens
MVLRRMHRPRSCSYQLLLEHQRPSCIQGLRWTPLTNSEESLDFSESLEQASTERVLRAGRQLHRHLLATCPNLIRDRKYHLRLYRQCCSGRELVDGILALGLGVHSRSQVVGICQVLLDEGALCHVKHDWAFQDRDAQFYRFPGPEPEPVGTHEMEEELAEAVALLSQRGPDALLTVALRKPPGQRTDEELDLIFEELLHIKAVAHLSNSVKRELAAVLLFEPHSKAGTVLFSQGDKGTSWYIIWKGSVNVVTHGKGLVTTLHEGDDFGQLALVNDAPRAATIILREDNCHFLRVDKQDFNRIIKDVEAKTMRLEEHGKVVLVLERASQGAGPSRPPTPGRNRYTVMSGTPEKILELLLEAMGPDSSAHDPTETFLSDFLLTHRVFMPSAQLCAALLHHFHVEPAGGSEQERSTYVCNKRQQILRLVSQWVALYGSMLHTDPVATSFLQKLSDLVGRDTRLSNLLREQWPERRRCHRLENGCGNASPQMKARNLPVWLPNQDEPLPGSSCAIQVGDKVPYDICRPDHSVLTLQLPVTASVREVMAALAQEDGWTKGQVLVKVNSAGDAIGLQPDARGVATSLGLNERLFVVNPQEVHELIPHPDQLGPTVGSAEGLDLVSAKDLAGQLTDHDWSLFNSIHQVELIHYVLGPQHLRDVTTANLERFMRRFNELQYWVATELCLCPVPGPRAQLLRKFIKLAAHLKEQKNLNSFFAVMFGLSNSAISRLAHTWERLPHKVRKLYSALERLLDPSWNHRVYRLALAKLSPPVIPFMPLLLKDMTFIHEGNHTLVENLINFEKMRMMARAARMLHHCRSHNPVPLSPLRSRVSHLHEDSQVARISTCSEQSLSTRSPASTWAYVQQLKVIDNQRELSRLSRELEP

SEQ ID NO: 2966 - DNA, 1950 bp, Homo sapiens
gctctggcggctcccgcggctccggctggcggcttcgggccctgcacctgtgactctcggccgcgctcgccctcggcccgcccggcgccgcagccccatggccccgtccaggctgcagctcggcctccgcgccgcctactccggcatcagctccgtggccggcttctccatcttcctcgtctggacggtggtctaccgacagccggggaccgcggccatgggagggctcgcaggggtgctggcactgtgggtcctggtgacgcacgtgatgtacatgcaagattattggaggacctggctcaaggggctgcgcggcttcttcttcgtgggggtcctcttctcggccgtctccatcgctgccttctgcaccttcctcgtgctggccatcacccggcatcagagcctcacagaccccaccagctactacctctccagcgtctggagcttcatttccttcaagtgggccttcctgctcagcctctatgcccaccgctaccgggctgactttgctgacatcagcatcctcagcgatttctgacccagggggtgaggtctctgcaccctgggggggccttaggacctggactcagcctctgagatgttgggagaggctactcccaccccctggtgaccccagaactgtggcagaaaatacacagcaggacgagtgtggtctcccaggaagctgtcctgcccgtcccctttcgaggaaacctgagtgtggtagagaggggatcctgccatgttgctcctcatcagcctggccagagggcagctttagaccttttcaaatgaatctgttttcttttctttcttttttttttcttttttttttttttttgagatggagtcttactctgtcacccaggctggagtgcagtagtgcgatctcagctcactgcaacctccgcctcccaggttcaagcaattctcctgccttggcctctcaagtagctgggattacaggcatctgccaccatgcccggcaaatttttgtgtttttagtagagacagggttttgccatgttggccaggctggtctcgaactcctgatctcaggtgattcacccgcctcagccttccaaagtgctgggattataggtgtgagccaccgtgcccggcctggatctgttttcttagcacgcagtgaggaatctttgtacttaaggccagggcaacaaagtcaagaggtcaaggtgtagggccatgaggcctggacctatgctgcaggcaagggtttccatccccgctgccctaggcactctcttcccaaggccaggttgggcacctggggaggtcagttcagaaatatctagcagagacctcttaaacccccatcccagcaccccatcctgttgttcccagagctggtctcccatgagtgtgctagagccagatagccgtggccccccacccatctcactcacacacacaggcatccatacaccccagaagacttcccaaatgaggccagactcagggtcacggggaatgtgcttctgcccctgtaagggctttggggaagggggcaacatagtagaggctggaaagagcccccaaacctgtgcccatgcccctccagccctgcgtttccattctgccttctcagagtgcccttgctgcacccagaccaccggccaggagagaccttctctcccactccagcccctctcactgcccttcaactagagctttcacctttttacatttcccttctgaaggacacaaatctgcttttctgcccatacactggcccaagggctcacctaacttgggagggaaggggctgttggtacaaggatgattttctgttaggctgccattttgcacggtctccccctccccatctgatgtgtcctgcccctcagctctttgccttatctgtgtcactgtcactttagcaaaaatacagcggccatttgtatcaaaaaaaaaaaaaaaaaaaaaaaa

SEQ ID NO: 2967 - protein, 239 aa, Homo sapiens
MPTATGLTLLTSASSAISDPGGEVSAPWGGLRTWTQPLRCWERLLPPPGDPRTVAENTQQDECGLPGSCPARPLSRKPECGREGILPCCSSSAWPEGSFRPFQMNLFSFLSFFFLFFFFLRWSLTLSPRLECSSAISAHCNLRLPGSSNSPALASQVAGITGICHHARQIFVFLVETGFCHVGQAGLELLISGDSPASAFQSAGIIGVSHRARPGSVFLARSEESLYLRPGQQSQEVKV

SEQ ID NO: 2968 - DNA, 4206 bp, Homo sapiens
ataatacctaccttgcaggaccacgacaggattaagtgaggaaaaacccccatgagagtgttttgccattgtcaagtgagcctgagggaggctgaggggggatcaggctgtatcatgcccccgaggacaaactttccagtttaccctgctccctctctctgtccctaggctgccccaggccctgtgcagacacaccaggccctcagccgcagcccatggacctgcgggtgggccagcggcccccagtggagcccccaccagagcccacattgctggccctgcagcgtccccagcgcctgcaccaccacctcttcctagcaggcctgcagcagcagcgctcggtggagcccatgaggctctccatggacacgccgatgcccgagttgcaggtgggaccccaggaacaagagctgcggcagcttctccacaaggacaagagcaagcgaagtgctgtagccagcagcgtggtcaagcagaagctagcggaggtgattctgaaaaaacagcaggcggccctagaaagaacagtccatcccaacagccccggcattccctacagaaccctggagcccctggagacggaaggagccacccgctccatgctcagcagctttttgcctcctgttcccagcctgcccagtgaccccccagagcacttccctctgcgcaagacagtctctgagcccaacctgaagctgcgctataagcccaagaagtccctggagcggaggaagaatccactgctccgaaaggagagtgcgccccccagcctccggcggcggcccgcagagaccctcggagactcctccccaagtagtagcagcacgcccgcatcagggtgcagctcccccaatgacagcgagcacggccccaatcccatcctgggctcggaggcgctcttgggccagcggctgcggctgcaggagacttctgtggccccgttcgccttgccgacagtgtccttgctgcccgcaatcactctggggctgcccgcccctgccagggctgacagtgaccgcaggacccatccgactctgggccctcgggggccaatcctggggagcccccacactcccctcttcctgccccatggcttggagcccgaggctgggggcaccttgccctctcgcctgcagcccattctcctcctggacccctcaggctctcatgccccgctgctgactgtgcccgggcttgggcccttgcccttccactttgcccagtccttaatgaccaccgagcggctctctgggtcaggcctccactggccactgagccggactcgctcagagcccctgccccccagtgccaccgctcccccaccgccgggccccatgcagccccgcctggagcagctcaaaactcacgtccaggtgatcaagaggtcagccaagccgagtgagaagccccggctgcggcagataccctcggctgaagacctggagacagatggcgggggaccgggccaggtggtggacgatggcctggagcacagggagctgggccatgggcagcctgaggccagaggccccgctcctctccagcagcaccctcaggtgttgctctgggaacagcagcgactggctgggcggctcccccggggcagcaccggggacactgtgctgcttcctctggcccagggtgggcaccggcctctgtcccgggctcagtcttccccagccgcacctgcctcactgtcagccccagagcctgccagccaggcccgagtcctctccagctcagagacccctgccaggaccctgcccttcaccacagggctgatctatgactcggtcatgctgaagcaccagtgctcctgcggtgacaacagcaggcacccggagcacgccggccgcatccagagcatctggtcccggctgcaggagcgggggctccggagccagtgtgagtgtctccgaggccggaaggcctccctggaagagctgcagtcggtccactctgagcggcacgtgctcctctacggcaccaacccgctcagccgcctcaaactggacaacgggaagctggcagggctcctggcacagcggatgtttgtgatgctgccctgtggtggggttggggtggacactgacaccatctggaatgagcttcattcctccaatgcagcccgctgggccgctggcagtgtcactgacctcgccttcaaagtggcttctcgtgagctaaagaatggtttcgctgtggtgcggcccccaggacaccatgcagatcattcaacagccatgggcttctgcttcttcaactcagtggccatcgcctgccggcagctgcaacagcagagcaaggccagcaagatcctcattgtagactgggacgtgcaccatggcaacggcacccagcaaaccttctaccaagaccccagtgtgctctacatctccctgcatcgccatgacgacggcaacttcttcccggggagtggggctgtggatgaggtaggggctggcagcggtgagggcttcaatgtcaatgtggcctgggctggaggtctggacccccccatgggggatcctgagtacctggctgctttcaggatagtcgtgatgcccatcgcccgagagttctctccagacctagtcctggtgtctgctggatttgatgctgctgagggtcacccggccccactgggtggctaccatgtttctgccaaatgttttggatacatgacgcagcaactgatgaacctggcaggaggcgcagtggtgctggccttggagggtggccatgacctcacagccatctgtgacgcctctgaggcctgtgtggctgctcttctgggtaacagggtggatcccctttcagaagaaggctggaaacagaaacccaacctcaatgccatccgctctctggaggccgtgatccgggtgcacagtaaatactggggctgcatgcagcgcctggcctcctgtccagactcctgggtgcctagagtgccaggggctgacaaagaagaagtggaggcagtgaccgcactggcgtccctctctgtgggcatcctggctgaagataggccctcggagcagctggtggaggaggaagaacctatgaatctctaaggctctggaaccatctgcccgcccaccatgcccttgggacctggttctcttctaacccctggcaatagcccccattcctgggtctttagagatcctgtgggcaagtagttggaaccagagaacagcctgcctgctttgacagttatcccagggagcgtgagaaaatccctgggtctagaatgggaactggagaggaccctgagaggagacgggctgggcggcgacccccacagggctctcgagaacagattctcccctccagtatgggccctggctgtggcccccattcctcaggactgcacagaggaggactggctccggctccgtcgggctcacccttaaccactattcctggctctgcaaaccccagactttgcacacagccccaggctccacacagaaatgtgaacttggcctcagacaggctggcccttcctaggctctaggggctaggggggagtggggagccaagaggtcccatattcctgagtgcaggggtagtccctctcacctgcttcctcagacgactctggaagcttccctctaccaccgggcactgagacgaagctccctgacagccgagactggcagccctccatctggtccgtaccctcgccagaggcccccctacatcaacctcctggcgatgccctggtggagcagatgggtgctctgggagtcctgtgcttcctgatccaatggtgccaaacccttcatctcccccagaagcgcagcatacccctgggacccctcggccactgcccactcggggagccttctctgtttctggggcctcccccaccatagctctgattcccaccccacataggaatagcctgactgagggggaaggggtgggagagaagatacagacatggaggaggggaggctgctctggcaaagtcttcaaggcttttgggggtccaggcctggggtcaagaaggaaaatgtgtgtgagcatgtgtgtgagtgaggcgtgtgtgtgagcgtgtgtgtgagtgaggcgtgtgtgtgtgtctttcctaggacccaccataccctgtgtatgtatgcatgtttttgtaaaaaggaagaaaatggaaaaaaatctgaacaataaatgttttatttgctttaaaaaaaaaaaaaaaaa

SEQ ID NO: 2969 - protein, 952 aa, Homo sapiens
MDLRVGQRPPVEPPPEPTLLALQRPQRLHHHLFLAGLQQQRSVEPMRLSMDTPMPELQVGPQEQELRQLLHKDKSKRSAVASSVVKQKLAEVILKKQQAALERTVHPNSPGIPYRTLEPLETEGATRSMLSSFLPPVPSLPSDPPEHFPLRKTVSEPNLKLRYKPKKSLERRKNPLLRKESAPPSLRRRPAETLGDSSPSSSSTPASGCSSPNDSEHGPNPILGSEALLGQRLRLQETSVAPFALPTVSLLPAITLGLPAPARADSDRRTHPTLGPRGPILGSPHTPLFLPHGLEPEAGGTLPSRLQPILLLDPSGSHAPLLTVPGLGPLPFHFAQSLMTTERLSGSGLHWPLSRTRSEPLPPSATAPPPPGPMQPRLEQLKTHVQVIKRSAKPSEKPRLRQIPSAEDLETDGGGPGQVVDDGLEHRELGHGQPEARGPAPLQQHPQVLLWEQQRLAGRLPRGSTGDTVLLPLAQGGHRPLSRAQSSPAAPASLSAPEPASQARVLSSSETPARTLPFTTGLIYDSVMLKHQCSCGDNSRHPEHAGRIQSIWSRLQERGLRSQCECLRGRKASLEELQSVHSERHVLLYGTNPLSRLKLDNGKLAGLLAQRMFVMLPCGGVGVDTDTIWNELHSSNAARWAAGSVTDLAFKVASRELKNGFAVVRPPGHHADHSTAMGFCFFNSVAIACRQLQQQSKASKILIVDWDVHHGNGTQQTFYQDPSVLYISLHRHDDGNFFPGSGAVDEVGAGSGEGFNVNVAWAGGLDPPMGDPEYLAAFRIVVMPIAREFSPDLVLVSAGFDAAEGHPAPLGGYHVSAKCFGYMTQQLMNLAGGAVVLALEGGHDLTAICDASEACVAALLGNRVDPLSEEGWKQKPNLNAIRSLEAVIRVHSKYWGCMQRLASCPDSWVPRVPGADKEEVEAVTALASLSVGILAEDRPSEQLVEEEEPMNL

SEQ ID NO: 2970 - DNA, 4086 bp, Homo sapiens
ataatacctaccttgcaggaccacgacaggattaagtgaggaaaaacccccatgagagtgttttgccattgtcaagtgagcctgagggaggctgaggggggatcaggctgtatcatgcccccgaggacaaactttccagtttaccctgctccctctctctgtccctaggctgccccaggccctgtgcagacacaccaggccctcagccgcagcccatggacctgcgggtgggccagcggcccccagtggagcccccaccagagcccacattgctggccctgcagcgtccccagcgcctgcaccaccacctcttcctagcaggcctgcagcagcagcgctcggtggagcccatgaggctctccatggacacgccgatgcccgagttgcaggtgggaccccaggaacaagagctgcggcagcttctccacaaggacaagagcaagcgaagtgctgtagccagcagcgtggtcaagcagaagctagcggaggtgattctgaaaaaacagcaggcggccctagaaagaacagtccatcccaacagccccggcattccctacagaaccctggagcccctggagacggaaggagccacccgctccatgctcagcagctttttgcctcctgttcccagcctgcccagtgaccccccagagcacttccctctgcgcaagacagtctctgagcccaacctgaagctgcgctataagcccaagaagtccctggagcggaggaagaatccactgctccgaaaggagagtgcgccccccagcctccggcggcggcccgcagagaccctcggagactcctccccaagtagtagcagcacgcccgcatcagggtgcagctcccccaatgacagcgagcacggccccaatcccatcctgggcgacagtgaccgcaggacccatccgactctgggccctcgggggccaatcctggggagcccccacactcccctcttcctgccccatggcttggagcccgaggctgggggcaccttgccctctcgcctgcagcccattctcctcctggacccctcaggctctcatgccccgctgctgactgtgcccgggcttgggcccttgcccttccactttgcccagtccttaatgaccaccgagcggctctctgggtcaggcctccactggccactgagccggactcgctcagagcccctgccccccagtgccaccgctcccccaccgccgggccccatgcagccccgcctggagcagctcaaaactcacgtccaggtgatcaagaggtcagccaagccgagtgagaagccccggctgcggcagataccctcggctgaagacctggagacagatggcgggggaccgggccaggtggtggacgatggcctggagcacagggagctgggccatgggcagcctgaggccagaggccccgctcctctccagcagcaccctcaggtgttgctctgggaacagcagcgactggctgggcggctcccccggggcagcaccggggacactgtgctgcttcctctggcccagggtgggcaccggcctctgtcccgggctcagtcttccccagccgcacctgcctcactgtcagccccagagcctgccagccaggcccgagtcctctccagctcagagacccctgccaggaccctgcccttcaccacagggctgatctatgactcggtcatgctgaagcaccagtgctcctgcggtgacaacagcaggcacccggagcacgccggccgcatccagagcatctggtcccggctgcaggagcgggggctccggagccagtgtgagtgtctccgaggccggaaggcctccctggaagagctgcagtcggtccactctgagcggcacgtgctcctctacggcaccaacccgctcagccgcctcaaactggacaacgggaagctggcagggctcctggcacagcggatgtttgtgatgctgccctgtggtggggttggggtggacactgacaccatctggaatgagcttcattcctccaatgcagcccgctgggccgctggcagtgtcactgacctcgccttcaaagtggcttctcgtgagctaaagaatggtttcgctgtggtgcggcccccaggacaccatgcagatcattcaacagccatgggcttctgcttcttcaactcagtggccatcgcctgccggcagctgcaacagcagagcaaggccagcaagatcctcattgtagactgggacgtgcaccatggcaacggcacccagcaaaccttctaccaagaccccagtgtgctctacatctccctgcatcgccatgacgacggcaacttcttcccggggagtggggctgtggatgaggtaggggctggcagcggtgagggcttcaatgtcaatgtggcctgggctggaggtctggacccccccatgggggatcctgagtacctggctgctttcaggatagtcgtgatgcccatcgcccgagagttctctccagacctagtcctggtgtctgctggatttgatgctgctgagggtcacccggccccactgggtggctaccatgtttctgccaaatgttttggatacatgacgcagcaactgatgaacctggcaggaggcgcagtggtgctggccttggagggtggccatgacctcacagccatctgtgacgcctctgaggcctgtgtggctgctcttctgggtaacagggtggatcccctttcagaagaaggctggaaacagaaacccaacctcaatgccatccgctctctggaggccgtgatccgggtgcacagtaaatactggggctgcatgcagcgcctggcctcctgtccagactcctgggtgcctagagtgccaggggctgacaaagaagaagtggaggcagtgaccgcactggcgtccctctctgtgggcatcctggctgaagataggccctcggagcagctggtggaggaggaagaacctatgaatctctaaggctctggaaccatctgcccgcccaccatgcccttgggacctggttctcttctaacccctggcaatagcccccattcctgggtctttagagatcctgtgggcaagtagttggaaccagagaacagcctgcctgctttgacagttatcccagggagcgtgagaaaatccctgggtctagaatgggaactggagaggaccctgagaggagacgggctgggcggcgacccccacagggctctcgagaacagattctcccctccagtatgggccctggctgtggcccccattcctcaggactgcacagaggaggactggctccggctccgtcgggctcacccttaaccactattcctggctctgcaaaccccagactttgcacacagccccaggctccacacagaaatgtgaacttggcctcagacaggctggcccttcctaggctctaggggctaggggggagtggggagccaagaggtcccatattcctgagtgcaggggtagtccctctcacctgcttcctcagacgactctggaagcttccctctaccaccgggcactgagacgaagctccctgacagccgagactggcagccctccatctggtccgtaccctcgccagaggcccccctacatcaacctcctggcgatgccctggtggagcagatgggtgctctgggagtcctgtgcttcctgatccaatggtgccaaacccttcatctcccccagaagcgcagcatacccctgggacccctcggccactgcccactcggggagccttctctgtttctggggcctcccccaccatagctctgattcccaccccacataggaatagcctgactgagggggaaggggtgggagagaagatacagacatggaggaggggaggctgctctggcaaagtcttcaaggcttttgggggtccaggcctggggtcaagaaggaaaatgtgtgtgagcatgtgtgtgagtgaggcgtgtgtgtgagcgtgtgtgtgagtgaggcgtgtgtgtgtgtctttcctaggacccaccataccctgtgtatgtatgcatgtttttgtaaaaaggaagaaaatggaaaaaaatctgaacaataaatgttttatttgctttaaaaaaaaaaaaaaaaa

SEQ ID NO: 2971 - protein, 912 aa, Homo sapiens
MDLRVGQRPPVEPPPEPTLLALQRPQRLHHHLFLAGLQQQRSVEPMRLSMDTPMPELQVGPQEQELRQLLHKDKSKRSAVASSVVKQKLAEVILKKQQAALERTVHPNSPGIPYRTLEPLETEGATRSMLSSFLPPVPSLPSDPPEHFPLRKTVSEPNLKLRYKPKKSLERRKNPLLRKESAPPSLRRRPAETLGDSSPSSSSTPASGCSSPNDSEHGPNPILGDSDRRTHPTLGPRGPILGSPHTPLFLPHGLEPEAGGTLPSRLQPILLLDPSGSHAPLLTVPGLGPLPFHFAQSLMTTERLSGSGLHWPLSRTRSEPLPPSATAPPPPGPMQPRLEQLKTHVQVIKRSAKPSEKPRLRQIPSAEDLETDGGGPGQVVDDGLEHRELGHGQPEARGPAPLQQHPQVLLWEQQRLAGRLPRGSTGDTVLLPLAQGGHRPLSRAQSSPAAPASLSAPEPASQARVLSSSETPARTLPFTTGLIYDSVMLKHQCSCGDNSRHPEHAGRIQSIWSRLQERGLRSQCECLRGRKASLEELQSVHSERHVLLYGTNPLSRLKLDNGKLAGLLAQRMFVMLPCGGVGVDTDTIWNELHSSNAARWAAGSVTDLAFKVASRELKNGFAVVRPPGHHADHSTAMGFCFFNSVAIACRQLQQQSKASKILIVDWDVHHGNGTQQTFYQDPSVLYISLHRHDDGNFFPGSGAVDEVGAGSGEGFNVNVAWAGGLDPPMGDPEYLAAFRIVVMPIAREFSPDLVLVSAGFDAAEGHPAPLGGYHVSAKCFGYMTQQLMNLAGGAVVLALEGGHDLTAICDASEACVAALLGNRVDPLSEEGWKQKPNLNAIRSLEAVIRVHSKYWGCMQRLASCPDSWVPRVPGADKEEVEAVTALASLSVGILAEDRPSEQLVEEEEPMNL

SEQ ID NO: 2972 - DNA, 4669 bp, Homo sapiens
ctgcttgtcaaaaggcggcagcggagccgtgtgcgccgggagcgcggaacagcttgtccacccgccggccggaccagaagcctttgggtctgaagtgtctgtgagacctcacagaagagcacccctgggctccacttacctgccccctgctccttcagggatggaggcaatggcggccagcacttccctgcctgaccctggagactttgaccggaacgtgccccggatctgtggggtgtgtggagaccgagccactggctttcacttcaatgctatgacctgtgaaggctgcaaaggcttcttcaggcgaagcatgaagcggaaggcactattcacctgccccttcaacggggactgccgcatcaccaaggacaaccgacgccactgccaggcctgccggctcaaacgctgtgtggacatcggcatgatgaaggagttcattctgacagatgaggaagtgcagaggaagcgggagatgatcctgaagcggaaggaggaggaggccttgaaggacagtctgcggcccaagctgtctgaggagcagcagcgcatcattgccatactgctggacgcccaccataagacctacgaccccacctactccgacttctgccagttccggcctccagttcgtgtgaatgatggtggagggagccatccttccaggcccaactccagacacactcccagcttctctggggactcctcctcctcctgctcagatcactgtatcacctcttcagacatgatggactcgtccagcttctccaatctggatctgagtgaagaagattcagatgacccttctgtgaccctagagctgtcccagctctccatgctgccccacctggctgacctggtcagttacagcatccaaaaggtcattggctttgctaagatgataccaggattcagagacctcacctctgaggaccagatcgtactgctgaagtcaagtgccattgaggtcatcatgttgcgctccaatgagtccttcaccatggacgacatgtcctggacctgtggcaaccaagactacaagtaccgcgtcagtgacgtgaccaaagccggacacagcctggagctgattgagcccctcatcaagttccaggtgggactgaagaagctgaacttgcatgaggaggagcatgtcctgctcatggccatctgcatcgtctccccagatcgtcctggggtgcaggacgccgcgctgattgaggccatccaggaccgcctgtccaacacactgcagacgtacatccgctgccgccacccgcccccgggcagccacctgctctatgccaagatgatccagaagctagccgacctgcgcagcctcaatgaggagcactccaagcagtaccgctgcctctccttccagcctgagtgcagcatgaagctaacgccccttgtgctcgaagtgtttggcaatgagatctcctgactaggacagcctgtggcggtgcctgggtggggctgctcctccagggccacgtgccaggcccggggctggcggctactcagcagccctcctcaccccgtctggggttcagcccctcctctgccacctcccctatccacccagcccattctctctcctgtccaacctaacccctttcctgcgggcttttccccggtcccttgagacctcagccatgaggagttgctgtttgtttgacaaagaaacccaagtgggggcagagggcagaggctggaggcagggccttgcccagagatgcctccaccgctgcctaagtggctgctgactgatgttgagggaacagacaggagaaatgcatccattcctcagggacagagacacctgcacctccccccactgcaggccccgcttgtccagcgcctagtggggtctccctctcctgcctactcacgataaataatcggcccacagctcccaccccacccccttcagtgcccaccaacatcccattgccctggttatattctcacgggcagtagctgtggtgaggtgggttttcttcccatcactggagcaccaggcacgaacccacctgctgagagacccaaggaggaaaaacagacaaaaacagcctcacagaagaatatgacagctgtccctgtcaccaagctcacagttcctcgccctgggtctaaggggttggttgaggtggaagccctccttccacggatccatgtagcaggactgaattgtccccagtttgcagaaaagcacctgccgacctcgtcctccccctgccagtgccttacctcctgcccaggagagccagccctccctgtcctcctcggatcaccgagagtagccgagagcctgctcccccaccccctccccaggggagagggtctggagaagcagtgagccgcatcttctccatctggcagggtgggatggaggagaagaattttcagaccccagcggctgagtcatgatctccctgccgcctcaatgtggttgcaaggccgctgttcacccacagggctaagagctagcgctgccgcaccccagagtgtgggaagggagagcggggcagtctcgggtggctagtcagagagagtgtttgggggttccgtgatgtagggtaaggtgccttcttattctcactccaccacccaaaagtcaaaaggtgcctgtgaggcaggggcggagtgatacaacttcaagtgcatgctctctgcagccagcccagcccagctggtgggaagcgtctgtccgtttactccaaggtggggtctttgtgagagtgagctgtaggtgtgcgggaccggtacagaaaggcgttcttcgaggtggatcacagaggcttcttcagatcagtgcttgagtttggggaatgcggccgcattccctgagtcaccaggaatgttaaagtcagtgggaacgtgactgccccaactcctggaagctgtgtccttgcacctgcatccgtagttccctgaaaacccagagaggaatcagacttcacactgcaagagccttggtgtccacctggccccatgtctctcagaattcttcaggtggaaaaacatctgaaagccacgttccttactgcagaatagcatatatatcgcttaatcttaaatttattagatatgagttgttttcagactcagactccatttgtattatagtctaatatacagggtagcaggtaccactgatttggagatatttatggggggagaacttacattgtgaaacttctgtacattaattattattgctgttgttattttacaagggtctagggagagacccttgtttgattttagctgcagaacgtattggtccagcttgctcttcagtgggagaaaacacttgtaagttgctaaacgagtcaatcccctcattcaggaaaactgacagaggagggcgtgactcacccaagcatatataactagctagaagtgggccaggacaggcccggcgcggtggctcacgcctgtaatcccagcagtttgggaggtcgaggtaggtggatcacctgaggtcgggagttcgagaccaacctgaccaacatggagaaaccctgtctctattaaaaatacaaaaaaaaaaaaaaaaaaaatagccgggcatggtggcgcaagcctgtaatcccagctactcaggaggctgaggcagaagaattgaacccaggaggtggaggttgcagtgagctgagatcgtgccgttactctccaacctggacaacaagagcgaaactccgtcttagaagtggaccaggacaggaccagattttggagtcatggtccggtgtccttttcactacaccatgtttgagctcagacccccactctcattccccaggtggctgacccagtccctgggggaagccctggatttcagaaagagcaagtctggatctgggaccctttccttccttccctggcttgtaactccaccaacccatcagaaggagaaggaaggagactcacctctgcctcaatgtgaatcagaccctaccccaccacgatgtggccctggcctgctgggctctccacctcagccttggataatgctgttgcctcatctataacatgcatttgtctttgtaatgtcaccaccttcccagctctccctctggccctgccttcttcggggaactcctggaaatatcagttactcagccctgggccccaccacctaggccactcctccaaaggaagtctaggagctgggaggaaaagaaaagaggggaaaatgagtttttatggggctgaacggggagaaaaggtcatcatcgattctactttagaatgagagtgtgaaatagacatttgtaaatgtaaaacttttaaggtatatcattataactgaaggagaaggtgccccaaaatgcaagattttccacaagattcccagagacaggaaaatcctctggctggctaactggaagcatgtaggagaatccaagcgaggtcaacagagaaggcaggaatgtgtggcagatttagtgaaagctagagatatggcagcgaaaggatgtaaacagtgcctgctgaatgatttccaaagagaaaaaaagtttgccagaagtttgtcaagtcaaccaatgtagaaagctttgcttatggtaataaaaatggctcatacttatatagcacttactttgttgcaagtactgctgtaaataaatgctttatgcaaaccaaaaaaaaaaaaaaaaaa

SEQ ID NO: 2973 - protein, 427 aa, Homo sapiens
MEAMAASTSLPDPGDFDRNVPRICGVCGDRATGFHFNAMTCEGCKGFFRRSMKRKALFTCPFNGDCRITKDNRRHCQACRLKRCVDIGMMKEFILTDEEVQRKREMILKRKEEEALKDSLRPKLSEEQQRIIAILLDAHHKTYDPTYSDFCQFRPPVRVNDGGGSHPSRPNSRHTPSFSGDSSSSCSDHCITSSDMMDSSSFSNLDLSEEDSDDPSVTLELSQLSMLPHLADLVSYSIQKVIGFAKMIPGFRDLTSEDQIVLLKSSAIEVIMLRSNESFTMDDMSWTCGNQDYKYRVSDVTKAGHSLELIEPLIKFQVGLKKLNLHEEEHVLLMAICIVSPDRPGVQDAALIEAIQDRLSNTLQTYIRCRHPPPGSHLLYAKMIQKLADLRSLNEEHSKQYRCLSFQPECSMKLTPLVLEVFGNEIS

SEQ ID NO: 2974 - DNA, 4791 bp, Homo sapiens
ctgcttgtcaaaaggcggcagcggagccgtgtgcgccgggagcgcggaacagcttgtccacccgccggccggaccagggctcctgaacctagcccagctggacggagaaatggactctagcctcctctgatagcctcatgccaggccccgtgcacattgctttgcttgcctccctcaatcctcatagcttctctttgggaagcctttgggtctgaagtgtctgtgagacctcacagaagagcacccctgggctccacttacctgccccctgctccttcagggatggaggcaatggcggccagcacttccctgcctgaccctggagactttgaccggaacgtgccccggatctgtggggtgtgtggagaccgagccactggctttcacttcaatgctatgacctgtgaaggctgcaaaggcttcttcaggcgaagcatgaagcggaaggcactattcacctgccccttcaacggggactgccgcatcaccaaggacaaccgacgccactgccaggcctgccggctcaaacgctgtgtggacatcggcatgatgaaggagttcattctgacagatgaggaagtgcagaggaagcgggagatgatcctgaagcggaaggaggaggaggccttgaaggacagtctgcggcccaagctgtctgaggagcagcagcgcatcattgccatactgctggacgcccaccataagacctacgaccccacctactccgacttctgccagttccggcctccagttcgtgtgaatgatggtggagggagccatccttccaggcccaactccagacacactcccagcttctctggggactcctcctcctcctgctcagatcactgtatcacctcttcagacatgatggactcgtccagcttctccaatctggatctgagtgaagaagattcagatgacccttctgtgaccctagagctgtcccagctctccatgctgccccacctggctgacctggtcagttacagcatccaaaaggtcattggctttgctaagatgataccaggattcagagacctcacctctgaggaccagatcgtactgctgaagtcaagtgccattgaggtcatcatgttgcgctccaatgagtccttcaccatggacgacatgtcctggacctgtggcaaccaagactacaagtaccgcgtcagtgacgtgaccaaagccggacacagcctggagctgattgagcccctcatcaagttccaggtgggactgaagaagctgaacttgcatgaggaggagcatgtcctgctcatggccatctgcatcgtctccccagatcgtcctggggtgcaggacgccgcgctgattgaggccatccaggaccgcctgtccaacacactgcagacgtacatccgctgccgccacccgcccccgggcagccacctgctctatgccaagatgatccagaagctagccgacctgcgcagcctcaatgaggagcactccaagcagtaccgctgcctctccttccagcctgagtgcagcatgaagctaacgccccttgtgctcgaagtgtttggcaatgagatctcctgactaggacagcctgtggcggtgcctgggtggggctgctcctccagggccacgtgccaggcccggggctggcggctactcagcagccctcctcaccccgtctggggttcagcccctcctctgccacctcccctatccacccagcccattctctctcctgtccaacctaacccctttcctgcgggcttttccccggtcccttgagacctcagccatgaggagttgctgtttgtttgacaaagaaacccaagtgggggcagagggcagaggctggaggcagggccttgcccagagatgcctccaccgctgcctaagtggctgctgactgatgttgagggaacagacaggagaaatgcatccattcctcagggacagagacacctgcacctccccccactgcaggccccgcttgtccagcgcctagtggggtctccctctcctgcctactcacgataaataatcggcccacagctcccaccccacccccttcagtgcccaccaacatcccattgccctggttatattctcacgggcagtagctgtggtgaggtgggttttcttcccatcactggagcaccaggcacgaacccacctgctgagagacccaaggaggaaaaacagacaaaaacagcctcacagaagaatatgacagctgtccctgtcaccaagctcacagttcctcgccctgggtctaaggggttggttgaggtggaagccctccttccacggatccatgtagcaggactgaattgtccccagtttgcagaaaagcacctgccgacctcgtcctccccctgccagtgccttacctcctgcccaggagagccagccctccctgtcctcctcggatcaccgagagtagccgagagcctgctcccccaccccctccccaggggagagggtctggagaagcagtgagccgcatcttctccatctggcagggtgggatggaggagaagaattttcagaccccagcggctgagtcatgatctccctgccgcctcaatgtggttgcaaggccgctgttcacccacagggctaagagctagcgctgccgcaccccagagtgtgggaagggagagcggggcagtctcgggtggctagtcagagagagtgtttgggggttccgtgatgtagggtaaggtgccttcttattctcactccaccacccaaaagtcaaaaggtgcctgtgaggcaggggcggagtgatacaacttcaagtgcatgctctctgcagccagcccagcccagctggtgggaagcgtctgtccgtttactccaaggtggggtctttgtgagagtgagctgtaggtgtgcgggaccggtacagaaaggcgttcttcgaggtggatcacagaggcttcttcagatcagtgcttgagtttggggaatgcggccgcattccctgagtcaccaggaatgttaaagtcagtgggaacgtgactgccccaactcctggaagctgtgtccttgcacctgcatccgtagttccctgaaaacccagagaggaatcagacttcacactgcaagagccttggtgtccacctggccccatgtctctcagaattcttcaggtggaaaaacatctgaaagccacgttccttactgcagaatagcatatatatcgcttaatcttaaatttattagatatgagttgttttcagactcagactccatttgtattatagtctaatatacagggtagcaggtaccactgatttggagatatttatggggggagaacttacattgtgaaacttctgtacattaattattattgctgttgttattttacaagggtctagggagagacccttgtttgattttagctgcagaacgtattggtccagcttgctcttcagtgggagaaaacacttgtaagttgctaaacgagtcaatcccctcattcaggaaaactgacagaggagggcgtgactcacccaagcatatataactagctagaagtgggccaggacaggcccggcgcggtggctcacgcctgtaatcccagcagtttgggaggtcgaggtaggtggatcacctgaggtcgggagttcgagaccaacctgaccaacatggagaaaccctgtctctattaaaaatacaaaaaaaaaaaaaaaaaaaatagccgggcatggtggcgcaagcctgtaatcccagctactcaggaggctgaggcagaagaattgaacccaggaggtggaggttgcagtgagctgagatcgtgccgttactctccaacctggacaacaagagcgaaactccgtcttagaagtggaccaggacaggaccagattttggagtcatggtccggtgtccttttcactacaccatgtttgagctcagacccccactctcattccccaggtggctgacccagtccctgggggaagccctggatttcagaaagagcaagtctggatctgggaccctttccttccttccctggcttgtaactccaccaacccatcagaaggagaaggaaggagactcacctctgcctcaatgtgaatcagaccctaccccaccacgatgtggccctggcctgctgggctctccacctcagccttggataatgctgttgcctcatctataacatgcatttgtctttgtaatgtcaccaccttcccagctctccctctggccctgccttcttcggggaactcctggaaatatcagttactcagccctgggccccaccacctaggccactcctccaaaggaagtctaggagctgggaggaaaagaaaagaggggaaaatgagtttttatggggctgaacggggagaaaaggtcatcatcgattctactttagaatgagagtgtgaaatagacatttgtaaatgtaaaacttttaaggtatatcattataactgaaggagaaggtgccccaaaatgcaagattttccacaagattcccagagacaggaaaatcctctggctggctaactggaagcatgtaggagaatccaagcgaggtcaacagagaaggcaggaatgtgtggcagatttagtgaaagctagagatatggcagcgaaaggatgtaaacagtgcctgctgaatgatttccaaagagaaaaaaagtttgccagaagtttgtcaagtcaaccaatgtagaaagctttgcttatggtaataaaaatggctcatacttatatagcacttactttgttgcaagtactgctgtaaataaatgctttatgcaaaccaaaaaaaaaaaaaaaaaa

SEQ ID NO: 2975 - protein, 427 aa, Homo sapiens; identical to SEQ ID NO: 2973

SEQ ID NO: 2976 - DNA, 1449 bp, Homo sapiens
gacatgacaccagtggcatatcacggccatggggtctcagcattccgctgctgctcgcccctcctcctgcaggcgaaagcaagaagatgacagggacggtttgctggctgaacgagagcaggaagaagccattgctcagttcccatatgtggaattcaccgggagagatagcatcacctgtctcacgtgccaggggacaggctacattccaacagagcaagtaaatgagttggtggctttgatcccacacagtgatcagagattgcgccctcagcgaactaagcaatatgtcctcctgtccatcctgctttgtctcctggcatctggtttggtggttttcttcctgtttccgcattcagtccttgtggatgatgacggcatcaaagtggtgaaagtcacatttaataagcaagactcccttgtaattctcaccatcatggccaccctgaaaatcaggaactccaacttctacacggtggcagtgaccagcctgtccagccagattcagtacatgaacacagtggtcagtacatatgtgactactaacgtctcccttattccacctcggagtgagcaactggtgaattttaccgggaaggccgagatgggaggaccgttttcctatgtgtacttcttctgcacggtacctgagatcctggtgcacaacatagtgatcttcatgcgaacttcagtgaagatttcatacattggcctcatgacccagagctccttggagacacatcactatgtggattgtggaggaaattccacagctatttaacaactgctattggttcttccacacagcgcctgtagaagagagcacagcatatgttcccaaggcctgagttctggacctacccccacgtggtgtaagcagaggaggaattggttcacttaactcccagcaaacatcctcctgccacttaggaggaaacacctccctatggtaccatttatgtttctcagaaccagcagaatcagtgcctagcctgtgcccagcaaatagttggcactcaataaagatttgcagaatttaatacagatcttttcagctgttcttagggcattataaatggaaatcataacgtggttctaggttatcaaaccatggagtgatgtggagctaggattgtgagtgacctgcaggccattatcagtgcctcatctgtgcagaagtggcagcagagagggaccatccaaatacctaagagaaaacagacctagtcaggatatgaatttgtttcagctgttcccaaaggcctgggagctttttgaaaagaaagaaaaaagtgtgttggcttttttttttttttagaaagttagaattgtttttaccaagagtctatgtggggcttgattcacccttcatccattggctggaacatggattggggatttgatagaaaaataaaccctgcttttgattcaaaaaaaaaaaaaaaaaaa

SEQ ID NO: 2977 - protein, 250 aa, Homo sapiens
MGSQHSAAARPSSCRRKQEDDRDGLLAEREQEEAIAQFPYVEFTGRDSITCLTCQGTGYIPTEQVNELVALIPHSDQRLRPQRTKQYVLLSILLCLLASGLVVFFLFPHSVLVDDDGIKVVKVTFNKQDSLVILTIMATLKIRNSNFYTVAVTSLSSQIQYMNTVVSTYVTTNVSLIPPRSEQLVNFTGKAEMGGPFSYVYFFCTVPEILVHNIVIFMRTSVKISYIGLMTQSSLETHHYVDCGGNSTAI

SEQ ID NO: 2978 - DNA, 3300 bp, Homo sapiens
ctgctgctgctgcagccaccagagcagagagccttgagtacactttgccacagaaagcagtgagcaagaatgatagctgtctcttttaaatgccgttgtcaaattctgaggcgacttactaaagatgagagtccctacactaaatccgccagccagacaaagccgcctgatggagcgttggctgtgaggagacagagcatcccagaggaattcaagggctccacagtcgtcgagctgatgaagaaggaaggcactaccctgggtctgacggtatcgggaggaattgataaggatggcaagccaagagtatctaatctgcggcaaggaggaattgctgctagaagtgaccagctggatgtgggtgactacatcaaagcagtgaatggaatcaacctggccaaattccgccatgacgagatcatcagcttgctgaagaatgtgggagaaagagtggttcttgaagtagagtacgagcttccaccggtctctgtgcaaggatcaagtgttattttccgaacagtggaggtcacattacataaagaaggcaatacctttggttttgtaattcgagggggagcacatgatgatagaaataaatctcgtccagttgtgataacatgtgttcgtcctggagggcctgctgacagagagggcacgatcaaacccggtgacaggttgctcagtgtggatggaattcggcttcttggaactacgcatgctgaagccatgagtattcttaaacaatgtggacaagaagcagcactgctgatagaatatgatgtctcagtaatggactctgtggcaacagcatccgggccactactagtcgaagttgccaaaactcctggtgccagccttggggttgccctaactacctcgatgtgctgtaacaaacaagtcattgtcatagacaaaatcaaatctgcaagtattgcagacagatgtggcgcattgcatgtgggagatcacatcctctccatcgatggaaccagcatggagtactgtacacttgcagaagcaacccagttcctggccaacaccactgaccaggtcaagcttgagatccttccccatcatcagacccggctggccctaaaggggcccgaccatgcagctttggtgtcttcatccttctctcctacctccatgagtgcatacagcctgagttccctgaacatggggactctacctcgaagcctctactccaccagcccacgtggaaccatgatgaggaggagactgaaaaagaaagacttcaaaagctcattgtccttagcctccagcacagtaggattggctgggcaggttgttcacacagaaaccacagaggttgtgctgacggcagatcctgtcacaggatttgggatccaactgcagggcagtgtgtttgccacagaaactctctcttctccacctctgatttcctatatcgaagctgacagcccagcagagagatgtggggtgctacagattggagacagagtgatggccatcaatggaattccaacagaagacagcaccttcgaagaagccagtcagctcctccgagactcttcaatcacgagcaaggtcacactggaaatcgagtttgatgttgcagagtctgtcatcccaagtagtggaacatttcatgtaaagctgcctaagaagcacaatgtggaacttggaataaccataagttcaccatccagtagaaaaccaggagaccccctcgtcatttcagatatcaagaaagggagtgtggcacacagaactgggaccctggaacttggggataaattgctcgcaatagataatatccggctggacaactgttccatggaagatgcagttcagatcctccagcaatgtgaagacctggtgaagctcaaaatccgcaaagatgaagataattcagatgagcaagaaagttccggagcaattatttacaccgtggagcttaaacgctacggggggccccttggcatcacaatttcaggaactgaagagccgtttgatcctataatcatttcaagcctcactaaagggggattagctgaaagaactggcgcaatccacataggagaccgaatcctagccatcaatagcagcagcttgaaagggaagcctctgagtgaagccatccatttgttacagatggcaggagagactgtcaccttgaaaattaagaaacagacagatgcccagtcagcatcgagccccaagaagttccctatttctagccatttgagtgacctgggggatgtggaggaggactcctcaccagcacagaagccaggcaagctctccgacatgtacccctccacggtgcccagtgtggacagtgctgtggattcatgggatgggtctgcaatagacaccagctatggaactgaaggcactagttttcaggcctcaggatacaatttcaacacctatgactggaggagtccaaaacagagaggcagcttgtccccagtcactaagcctcgaagccagacttacccagatgtggggctgagttatgaagactgggaccggtccacagccagtggttttgcaggggctgccgatagtgcagagacagaacaagaggagaacttctggtctcaagcgctggaggatttggaaacctgcggacagtcaggaattctgagagaactggaggagaaagctgacaggcgtgtgtctttgagaaacatgactctcttggcaacaatcatgtcggggagcacgatgagtttgaatcatgaggctccaacacctcgcagtcagctggggcgacaggccagcttccaggagcgcagcagctcgcggccgcactacagccaaacaactcggagcaacaccctgccttcagatgtgggtaggaagtcagtaaccctgagaaaaatgaaacaagaaataaaggagatcatgtctccaactcctgtggagctgcacaaggtgaccttgtacaaggactctgacatggaggactttgggttcagtgtagcagatggcttactggagaaaggagtgtatgtcaaaaatattcgcccagctgggccaggagatcttggtggcttaaagccctatgacaggctcttacaggtgaatcatgtccgaaccagagactttgactgctgccttgttgtgcccctcatagcagaatccgggaataagctggacctggttattagtagaaacccactggcttcacagaagtctatagaccaacagagtctaccaggagattggagtgaacagaacagtgcttttttccagcagcctagccacggtggtaatttggagacacgagaacccactaatacattatag

SEQ ID NO: 2979 - protein, 1076 aa, Homo sapiens
MIAVSFKCRCQILRRLTKDESPYTKSASQTKPPDGALAVRRQSIPEEFKGSTVVELMKKEGTTLGLTVSGGIDKDGKPRVSNLRQGGIAARSDQLDVGDYIKAVNGINLAKFRHDEIISLLKNVGERVVLEVEYELPPVSVQGSSVIFRTVEVTLHKEGNTFGFVIRGGAHDDRNKSRPVVITCVRPGGPADREGTIKPGDRLLSVDGIRLLGTTHAEAMSILKQCGQEAALLIEYDVSVMDSVATASGPLLVEVAKTPGASLGVALTTSMCCNKQVIVIDKIKSASIADRCGALHVGDHILSIDGTSMEYCTLAEATQFLANTTDQVKLEILPHHQTRLALKGPDHAALVSSSFSPTSMSAYSLSSLNMGTLPRSLYSTSPRGTMMRRRLKKKDFKSSLSLASSTVGLAGQVVHTETTEVVLTADPVTGFGIQLQGSVFATETLSSPPLISYIEADSPAERCGVLQIGDRVMAINGIPTEDSTFEEASQLLRDSSITSKVTLEIEFDVAESVIPSSGTFHVKLPKKHNVELGITISSPSSRKPGDPLVISDIKKGSVAHRTGTLELGDKLLAIDNIRLDNCSMEDAVQILQQCEDLVKLKIRKDEDNSDEQESSGAIIYTVELKRYGGPLGITISGTEEPFDPIIISSLTKGGLAERTGAIHIGDRILAINSSSLKGKPLSEAIHLLQMAGETVTLKIKKQTDAQSASSPKKFPISSHLSDLGDVEEDSSPAQKPGKLSDMYPSTVPSVDSAVDSWDGSAIDTSYGTEGTSFQASGYNFNTYDWRSPKQRGSLSPVTKPRSQTYPDVGLSYEDWDRSTASGFAGAADSAETEQEENFWSQALEDLETCGQSGILRELEEKADRRVSLRNMTLLATIMSGSTMSLNHEAPTPRSQLGRQASFQERSSSRPHYSQTTRSNTLPSDVGRKSVTLRKMKQEIKEIMSPTPVELHKVTLYKDSDMEDFGFSVADGLLEKGVYVKNIRPAGPGDLGGLKPYDRLLQVNHVRTRDFDCCLVVPLIAESGNKLDLVISRNPLASQKSIDQQSLPGDWSEQNSAFFQQPSHGGNLETREPTNTL

SEQ ID NO: 2980 - DNA, 5913 bp, Homo sapiens
gtggacgcagcgggctttggaaaggccccaagttaatgaggcgtgcgccggctgccgagcgcctcttggagctgggctttcccccgcggtgcgggcgccaggagccgccttttccgctgggtgtcactcgggggtggggaagatggcccattcaaaagcgccgcgagggggcccggccagtgcccttcagtgagcgctcgcaagaggacggcagaggcccggcagctcggagctccgggaccttgtggcgcatcaggacgcggctgtccctctgccgggacccagagccgccgccgccgctctgcctcctgcgtgttagcctcctctgcgcgctccgggcaggcggccgtgggagccgctggggcgaggacggcgcgaggctgctgctgctgcccccggcccgcgcggctggaaacggagaggccgagccaagcggcggcccctcttatgctgggaggatgctggagagtagcggctgcaaagcgctgaaggagggcgtgctggagaagcgcagcgacgggttgttgcagctctggaagaaaaagtgttgcatcctcaccgaggaagggctgctgcttatcccgcccaagcagctgcaacaccagcagcagcagcagcaacagcagcagcagcagcagcaacaacagcccgggcaggggccggccgagccgtcccaacccagtggccccgctgtcgccagcctcgagccgccggtcaagctcaaggaactgcacttctccaacatgaagaccgtggactgtgtggagcgcaagggcaagtacatgtacttcactgtggtgatggcagagggcaaggagatcgactttcggtgcccgcaagaccagggctggaacgccgagatcacgctgcagatggtgcagtacaagaatcgtcaggccatcctggcggtcaaatccacgcggcagaagcagcagcacctggtccagcagcagcccccctcgcagccgcagccgcagccgcagctccagccccaaccccagcctcagcctcagccgcaaccccagccccaatcacaaccccagcctcagccccaacccaagcctcagccccagcagctccacccgtatccgcatccacatccacatccacactctcatcctcactcgcacccacaccctcacccgcacccgcatccgcaccaaataccgcacccacacccacagccgcactcgcagccgcacgggcaccggcttctccgcagcacctccaactctgcctgaaaggggcagctcccgggcaagacaaggttttgaggacttgaggaagtgggacgagcacatttctattgtcttcacttggatcaaaagcaaaacagtctctccgccccgcaccagatcaagtagtttggacatcaccctactgaaaacttgcgattcttcttagttttctgcatacttttcatcacgatgcaggaaacgatttcgagtcaagaagacttttatttatgaacctttgaaaggatcgtcttgtatggtgaattttctaggagcgatgatgtactgtaattttattttaatgtattttgatttatgattatttattagtttttttttaaatgcttgttctaagacatttctgaatgtagaccattttccaaaaaggaaactttattttcaaaaacctaatccgtagtaattcctaatcttggagaataaaaaagggcggtggaggggaaaacattaagaatttattcattatttctcgagtactttcagaaagtctgacactttcattgttgtgccagctggttgaaattaaaactctgatattactttttttgaggatttttatttttgtttttgcttaaacatatagtttgtctagaagtttaaaaagctaaaagttaaaaatggtgtaattatgaaaatctaacactcaagatagtttctaaaaggaaatcagtagttaaggatacctgatttcaaaatatttaaagcataacctaactgatggtaggatgattgtatcttgaatatgtggtagggccacatctattgtaggaaaaccttgcttttatcatctgtgtgtaaagggcttaataaggagaagaggccttttgactgatttgtgagtataaatgcatttgctgtttcatttcaaaaatgttgtggaggaaaagagtacatttaacttgtataagagaatatttgtactcctgtccaggctgcaggacctttcttcgagagctttgcacacttgacttgaaccacattttctgatccctttactttgttttagaagcacactgaaaaatctcgttgtttaaagtacaatttgtaaatatttcaaaggtctaggagtcataacttttgttttcatactgaaaatgatgttgatcagagaaaccaactgttttgcttttcattgctctgtgagaaatttgaggattctgttttgctgttaggtaagctaaactcagaaattgaaaaggaaaagactggataaacacaggattttcagtaagaaaacaaccccagtcttgtcttagaagccacttgttgaggagtctgttgggggaaaaaagaggatatgcttttaaaggtagaacaaaccttcttctgtgttaaatcaaaaggatgttcaaaatccaccaggacagatgctacttgggtttaaatggagccatagatgatacaaagtcctcttggggctgaaaatcacttcctatttgcatggctttactaactggtttctgttttccattatctttttcacagaaagtcttggtcagtatttttccagcatttaaattgaaacggtcagtattagaccactgctaggttatgtagtcaagaaataaaaatagaattacatgctacagatgtctttattctccttccatctagaaaggagttccaaggtcaaattactttttagtgcaatagttaaatgacattttgagatcataactcatatccaaaaagttgcagggaaaattaaaatagctttcccctattaagctaatggcaaacaaaacttaagtggacccccacttccagtggttgtttaggttgcagttgtgaaaatatgctgccaacatttaaaaacttgtttcatatgtatatatgtatacacatatatgaatatgtatgtatatatacatatatgagaacatgtgtgtacacatatatgaatatgtatatatgtgtatgtatgtatatatgtatatgaaatgagagccacatctaaagatttcttaaatcaagtttggttcagcttccttagaactgtggctgtactttttgaggagtacctcatagtactatatttttaatgcatgcaaatcataatagctccaaatgaaccacagttttttcccaatggaggatttttttttaattcttgtactaaaaaaaaaaaatccataccaaatatttttacaaattaagattgatgtaggttttaaaaaaggcatttgtatgttgttagcttacatatggggctaggtaatttcattgcttaaaaagatgcgcctaggctccctcttggtggctggatttctttttcttcgcccgtggtggccatggttcttaatagggccaccggaatcatggtttctttttttttttttttttttgagatggagtctcgccctgtgacccaggctggagtgcagtggcacgatctcggctcactgcaacctctgcctcctgggttcacgccattctcctgtctcagcctcctgagtagctgggactacaggtgaatgccaccacgcccggctgatttttgtatttttagtagagatggggtttcaccatagtggtcaggctgttctcgaactcctgacctcaggtgatccacctgccttggcctcccaaagtgctaggattacaggtgtgagccaccacacccggccccagaataatggtttcttgactttctgtagcccttgttccttagtctgctgtgatatttatgttgacctttatcattttctattctgaacccctcttagcatttaatgtgaaatctaagaaattagaagtagaatggcttttattgttttgacacctttgaaattattattaataatttttccagagcaaaaaagcaaacacgctcaataagactaaacaaaacaaaatataaatgtacatcatttaatgtcccagtggctctattctacctgtaagaaaatgatacaaaaccacctaagatattttgaagcctgacaaatcagcttcatggaaaaaggtaaaaaatgcatttttcaaccgaaagggcagatccaatagaagacccgctccttaaataaacataaaatgtaaaaagttggaaaattaagagtaatgttccatctggaaactgaacttttgtccttgaacttgtgttggcaccaagcctcatacacagtgagctcaataactgttgggacaaaggaaggaaggacaaaatgtgtaacttcccagcatctgggagatgctgtctcttgcctcactgagtgttccttttctttgctctcatgtcattccctgagaacaatgaattctgggacaggctaaacatcatgatgaagtttcttaaacagactttcttagtggaaatccatttagatctgggtgtgctctatggggagtgctgacgtcaaagagcaaatgtctataaggggcccttttaaaatgaacattttcctcattgagcaagctgggattctctaatgtagaaatcaagccatctttataatttcacttcagatgtttatgtttttgttttttttgtctccaatgatggtaaaaataaaaactacgcattacttaaaggagtttccctcacatgtaaacactgttaggaagtctggattaagttgaaagtcctgttttaactttttttctctcatataccaaacactctgtatttctcttaaagaagccctttaagagaaagccctaattttatatctgacagtaaagtttgctgcaagtgtatgagttcaaacacatcccttgttttctgtccctaggggaaaagtcatgtagttttagcttggctccagtgttaatattatattcagtagcagccttagaagagtggtctaagacttgaacctggagcaattttatagcacagaatcctacgaagataggactgtgaacatttgttttctttttcgtgtgtgtcaaactaactggtttttgctttaccaataaaatgtcctcggcagagtaaattttaaacgtgaaaattatagatcttgatattgaatccatcagtgattcaagagatacacctatttgcctaaaacaacctaagatgtattggttatggaatcatgtgttggataggttcttaagacctgtttcctcaaatcttgacacagttttcaagggtggcttattgacttgcacggttgggcagataatccagatttacctaagattgggtaaaaaagtcatctgtgactttgctggcagggcatttgctaagtggagtacaggatctaaaagggttttcttagaaagggcaatattgtccaatgaagtaagcagaaggactctgggttagaagcatctgcacaaaaactggtgagacctactctccactgctctgcagctggatggctgatggcaggctgagcagtggggaagcaggttttaacaacagggagtccttccaggtcactgtatattgagaagaaacataaaactattgtctgttacattccgaggtcagccttcttcttaacgttttataatatgcaaatgccagcttctggaaagcaagtatcatcatgtaccaaatgctttatacaccatcacattcatgaattttttagcatggtcagaacttgtgtaaatatgtctcttagatgattttggggagatgtgatttatttttcatattttcaaaatgcatttcatttcaaataaagttatctattgagacaaccga

SEQ ID NO: 2981 - protein, 401 aa, Homo sapiens
MRRAPAAERLLELGFPPRCGRQEPPFPLGVTRGWGRWPIQKRREGARPVPFSERSQEDGRGPAARSSGTLWRIRTRLSLCRDPEPPPPLCLLRVSLLCALRAGGRGSRWGEDGARLLLLPPARAAGNGEAEPSGGPSYAGRMLESSGCKALKEGVLEKRSDGLLQLWKKKCCILTEEGLLLIPPKQLQHQQQQQQQQQQQQQQQPGQGPAEPSQPSGPAVASLEPPVKLKELHFSNMKTVDCVERKGKYMYFTVVMAEGKEIDFRCPQDQGWNAEITLQMVQYKNRQAILAVKSTRQKQQHLVQQQPPSQPQPQPQLQPQPQPQPQPQPQPQSQPQPQPQPKPQPQQLHPYPHPHPHPHSHPHSHPHPHPHPHPHQIPHPHPQPHSQPHGHRLLRSTSNSA

SEQ ID NO: 2982 - DNA, 2908 bp, Homo sapiens
ctgctcgcggcgccgcctcctgctcctcccgctgctgctgccgctgccgccctgagtcactgcctgcgcagctccggccgcctggctccccatactagtcgccgatatttggagttcttacaacatggcagacattgacaacaaagaacagtctgaacttgatcaagatttggatgatgttgaagaagtagaagaagaggaaactggtgaagaaacaaaactcaaagcacgtcagctaactgttcagatgatgcaaaatcctcagattcttgcagcccttcaagaaagacttgatggtctggtagaaacaccaacaggatacattgaaagcctgcctagggtagttaaaagacgagtgaatgctctcaaaaacctgcaagttaaatgtgcacagatagaagccaaattctatgaggaagttcacgatcttgaaaggaagtatgctgttctctatcagcctctatttgataagcgatttgaaattattaatgcaatttatgaacctacggaagaagaatgtgaatggaaaccagatgaagaagatgagatttcggaggaattgaaagaaaaggccaagattgaagatgagaaaaaggatgaagaaaaagaagaccccaaaggaattcctgaattttggttaactgtttttaagaatgttgacttgctcagtgatatggttcaggaacacgatgaacctattctgaagcacttgaaagatattaaagtgaagttctcagatgctggccagcctatgagttttgtcttagaatttcactttgaacccaatgaatattttacaaatgaagtgctgacaaagacatacaggatgaggtcagaaccagatgattctgatcccttttcttttgatggaccagaaattatgggttgtacagggtgccagatagattggaaaaaaggaaagaatgtcactttgaaaactattaagaagaagcagaaacacaagggacgtgggacagttcgtactgtgactaaaacagtttccaatgactctttctttaacttttttgcccctcctgaagttcctgagagtggagatctggatgatgatgctgaagctatccttgctgcagacttcgaaattggtcactttttacgtgagcgtataatcccaagatcagtgttatattttactggagaagctattgaagatgatgatgatgattatgatgaagaaggtgaagaagcggatgaggaaggggaagaagaaggagatgaggaaaatgatccagactatgacccaaagaaggatcaaaacccagcagagtgcaagcagcagtgaagcaggatgtatgtggccttgaggataacctgcactggtctaccttctgcttccctggaaaggatgaatttacatcatttgacaagcctattttcaagttatttgttgtttgtttgcttgtttttgtttttgcagctaaaataaaaatttcaaatacaattttagttcttacaagataatgtcttaattttgtaccaattcaggtagaagtagaggcctaccttgaattaagggttatactcagtttttaacacattgttgaagaaaaggtaccagctttggaacgagatgctatactaataagcaagtgtaaaaaaaaaaaaaaaagaggaagaaaatcttaagtgattgatgctgttttcttttaaaaaaaaaaaaaaaaattcattttctttgggttagagctagagagaaggccccaagcttctatggtttcttctaattcttattgcttaaagtatgagtatgtcacttacccgtgcttctgtttactgtgtaattaaaatgggtagtactgtttacctaactacctcatggatgtgttaaggcatattgagttaaatctcatataatgtttctcaatcttgttaaaagctcaaaattttgggcctatttgtaatgccagtgtgacactaagcattttgttcacaccacgctttgataactaaactggaaaacaaaggtgttaagtacctctgttctggatctgggcagtcagcactctttttagatctttgtgtggctcctatttttatagaagtggagggatgcactatttcacaaggtccaagatttgttttcagatatttttgatgactgtattgtaaatactacagggatagcactatagtattgtagtcatgagacttaaagtggaaataagactatttttgacaaaagatgccattaaatttcagactgtagagccacatttacaatacctcaggctaattactgttaattttggggttgaactttttttgacagtgagggtggattattggattgtcattagaggaaggtctagatttcctgctcttaataaaattacattgaattgatttttagaggtaatgaaaacttcctttctgagaagttagtgttaaggtcttggaatgtgaacacattgtttgtagtgctatccattcctctcctgagattttaacttactactggaaatccttaaccaattataatagctttttttctttattttcaaaatgatttcctttgctttgattagacactatgtgctttttttttttaaccatagttcatcgaaatgcagctttttctgaacttcaaagatagaatcccatttttaatgaactgaagtagcaaaatcatctttttcattctttaggaaatagctattgccaaagtgaaggtgtagataatacctagtcttgttacataaaggggatgtggtttgcagaagaattttctttataaaattgaagttttaagggacgtcagtgtttatgccatttttccagttccaaaatgattccattccattctagaaatttgaagtatgtaacctgaaatccttaataaaatttggatttaattttataaaaaaaaaaaaaaaaaaaaaaaaaaaaaaaa

SEQ ID NO: 2983 - protein, 391 aa, Homo sapiens
MADIDNKEQSELDQDLDDVEEVEEEETGEETKLKARQLTVQMMQNPQILAALQERLDGLVETPTGYIESLPRVVKRRVNALKNLQVKCAQIEAKFYEEVHDLERKYAVLYQPLFDKRFEIINAIYEPTEEECEWKPDEEDEISEELKEKAKIEDEKKDEEKEDPKGIPEFWLTVFKNVDLLSDMVQEHDEPILKHLKDIKVKFSDAGQPMSFVLEFHFEPNEYFTNEVLTKTYRMRSEPDDSDPFSFDGPEIMGCTGCQIDWKKGKNVTLKTIKKKQKHKGRGTVRTVTKTVSNDSFFNFFAPPEVPESGDLDDDAEAILAADFEIGHFLRERIIPRSVLYFTGEAIEDDDDDYDEEGEEADEEGEEEGDEENDPDYDPKKDQNPAECKQQ

SEQ ID NO: 2984 - DNA, 3582 bp, Homo sapiens
ctgctcgcggcgccgcctcctgctcctcccgctgctgctgccgctgccgccctgagtcactgcctgcgcagctccggccgcctggctccccatactagtcgccgatatttggagttcttacaacatggcagacattgacaacaaagaacagtctgaacttgatcaagatttggatgatgttgaagaagtagaagaagaggaaactggtgaagaaacaaaactcaaagcacgtcagctaactgttcagatgatgcaaaatcctcagattcttgcagcccttcaagaaagacttgatggtctggtagaaacaccaacaggatacattgaaagcctgcctagggtagttaaaagacgagtgaatgctctcaaaaacctgcaagttaaatgtgcacagatagaagccaaattctatgaggaagttcacgatcttgaaaggaagtatgctgttctctatcagcctctatttgataagcgatttgaaattattaatgcaatttatgaacctacggaagaagaatgtgaatggaaaccagatgaagaagatgagatttcggaggaattgaaagaaaaggccaagattgaagatgagaaaaaggatgaagaaaaagaagaccccaaaggaattcctgaattttggttaactgtttttaagaatgttgacttgctcagtgatatggttcaggaacacgatgaacctattctgaagcacttgaaagatattaaagtgaagttctcagatgctggccagcctatgagttttgtcttagaatttcactttgaacccaatgaatattttacaaatgaagtgctgacaaagacatacaggatgaggtcagaaccagatgattctgatcccttttcttttgatggaccagaaattatgggttgtacagggtgccagatagattggaaaaaaggaaagaatgtcactttgaaaactattaagaagaagcagaaacacaagggacgtgggacagttcgtactgtgactaaaacagtttccaatgactctttctttaacttttttgcccctcctgaagttcctgagagtggagatctggatgatgatgctgaagctatccttgctgcagacttcgaaattggtcactttttacgtgagcgtataatcccaagatcagtgttatattttactggagaagctattgaagatgatgatgatgattatgatgaagaaggtgaagaagcggatgaggaaggggaagaagaaggagatgaggaaaatgatccagactatgacccaaagaaggatcaaaacccagcagagtgcaagcagcagtgaagcaggatgtatgtggccttgaggataacctgcactgtaatagcctaaacacaactcttatttacttacagccttatgtttttgtattttcttggtagactaggtaatttttttttaaaggacaggaaactgatattttaaagaccaatttgttctacctagcattttaactagtttttctgccagctatgttgaatgcacaaattctgtcacgcatgttcattcattgctacataatttggttcttctggaatatttttatgtagctcttggagtacagctatgaaaattaacaactgttaaaggaaataccttttttttttttttgtaattttttccttgaagaaccaaagtattttttcagctggttgttgaatagggttaagtccgcttggattagctgtgcctttcattactttgttacagaaatgcagtgacttatactaagacaatttattgtttaaaaaaaaaattggcaagacaactatatggttaagaatttccagtatgaccacacccaataactgttattagagtgttaatggattattgtgttttaggtgacatagttaactgtaaagtaacctgactcagtatagttactggtaccacagtgaggtgaataaaacgggattttcagaagttagcctgaatttaactgtatttttaaatttaacctccattaactaagcatcttttctttgtggtagggtctaccttctgcttccctggaaaggatgaatttacatcatttgacaagcctattttcaagttatttgttgtttgtttgcttgtttttgtttttgcagctaaaataaaaatttcaaatacaattttagttcttacaagataatgtcttaattttgtaccaattcaggtagaagtagaggcctaccttgaattaagggttatactcagtttttaacacattgttgaagaaaaggtaccagctttggaacgagatgctatactaataagcaagtgtaaaaaaaaaaaaaaaagaggaagaaaatcttaagtgattgatgctgttttcttttaaaaaaaaaaaaaaaaattcattttctttgggttagagctagagagaaggccccaagcttctatggtttcttctaattcttattgcttaaagtatgagtatgtcacttacccgtgcttctgtttactgtgtaattaaaatgggtagtactgtttacctaactacctcatggatgtgttaaggcatattgagttaaatctcatataatgtttctcaatcttgttaaaagctcaaaattttgggcctatttgtaatgccagtgtgacactaagcattttgttcacaccacgctttgataactaaactggaaaacaaaggtgttaagtacctctgttctggatctgggcagtcagcactctttttagatctttgtgtggctcctatttttatagaagtggagggatgcactatttcacaaggtccaagatttgttttcagatatttttgatgactgtattgtaaatactacagggatagcactatagtattgtagtcatgagacttaaagtggaaataagactatttttgacaaaagatgccattaaatttcagactgtagagccacatttacaatacctcaggctaattactgttaattttggggttgaactttttttgacagtgagggtggattattggattgtcattagaggaaggtctagatttcctgctcttaataaaattacattgaattgatttttagaggtaatgaaaacttcctttctgagaagttagtgttaaggtcttggaatgtgaacacattgtttgtagtgctatccattcctctcctgagattttaacttactactggaaatccttaaccaattataatagctttttttctttattttcaaaatgatttcctttgctttgattagacactatgtgctttttttttttaaccatagttcatcgaaatgcagctttttctgaacttcaaagatagaatcccatttttaatgaactgaagtagcaaaatcatctttttcattctttaggaaatagctattgccaaagtgaaggtgtagataatacctagtcttgttacataaaggggatgtggtttgcagaagaattttctttataaaattgaagttttaagggacgtcagtgtttatgccatttttccagttccaaaatgattccattccattctagaaatttgaagtatgtaacctgaaatccttaataaaatttggatttaattttataaaaaaaaaaaaaaaaaaaaaaaaaaaaaaaa

SEQ ID NO: 2985 - protein, 391 aa, Homo sapiens; identical to SEQ ID NO: 2983

SEQ ID NO: 2986 - DNA, 1071 bp, Homo sapiens
ctgtaattgcacagattgttcctcttacaagagaaatatccagagctctaagaaaacaactgatgaaaacgacatgcgtgacatttggtgctgaagacccaggtcagagagactcctttgggggaccagtccgctgtccttgccctcactctgtgaggagacccacctacgacctcgggtcctcagaccaaccagctcaaggaacatctcaccaatttcaaatcgggaccccactggaaaatggactgtccaactcacccggcagccactcccagagcccctggaactctggcccaaggctctctgactgactccttcccagatcttctcggctcagcagctgaagactgacactgcttgattgcctgggaagcctataggaccatcacagacactttggataactcttacagtgaaggacaaaaaagcgccactgcagggaggaatgccagggtcccatagagggagaccgacagtgaagtggagcctgccatgaattcaccaaaggccattctccctttcttccagaagaacagcatttagctgggcctatggctacctacctaaagactgcacctcttagtcacccttgtggccaggtgtggccacgtgacagtggaatgtaagtggaagtgatgtatgcacttgggttcattggtttaaaaaaaaatatgaccgccctccatttccactctttgtcttatctgtgaatgggaacatggctgtgtctgcagcccgactttgtgcagcaaaggacaaggccctaggggaaggtggagaaacaagatggaacaacttggacccaacaacttggatccctatgtggccatgtggagtcatctcacccacctgggccactcaccccgaagactgttgtgtgagggtgaaataaacttctgtatcactagcccctgcatttcagaaattctttgttatggcagttttgcctttatcctaacacagacagcaaagtatcttctgtggccccatgactaatttcgttgtttaaactcattataaaaactatataaataaaatattaaaaatcaaataaaatagcaagataacact

SEQ ID NO: 2987 - protein, 82 aa, Homo sapiens
MKTTCVTFGAEDPGQRDSFGGPVRCPCPHSVRRPTYDLGSSDQPAQGTSHQFQIGTPLENGLSNSPGSHSQSPWNSGPRLSD

SEQ ID NO: 2988 - DNA, 3583 bp, Homo sapiens
attccgtttccggccgttcccacccctgttttcggtcggcccgggtgttctgcaagctggtcaaaaaggggaagcggcccagatatgttaagttctatggccgctgcagggtctgtgaaggcggcgttgcaggtggccgaggtgctggaagccatcgtgagctgctgcgtggggcccgagggacggcaagttttgtgtacgaagcccactggcgaggtgcttctcagccggaatggaggccgcctcctggaggcgctacacttagagcatcccatagccaggatgatagtggactgtgtttccagtcatctcaaaaaaacaggagatggtgcaaaaacatttattatctttctttgccatttgcttagaggacttcatgcaatcacagacagagaaaaggatcctttgatgtgtgaaaacattcaaacccatggaaggcattggaaaaattgttctcggtggaaatttatttcccaggctctcctaacgtttcagacacaaatattagacggtattatggaccagtacctaagtagacactttttgtctatcttttcgtctgctaaagagagaacattgtgtaggagctctttagagttgctcttagaagcatacttttgtggaagagtgggaagaaataatcataaatttatttcacagttgatgtgtgactactttttcaagtgtatgacttgtaaaagtgggattggtgtatttgagttagtggatgaccattttgtagagttgaatgttggtgtcactggccttcctgtttcagattccaggatcatagctggtcttgtgcttcagaaagatttttctgtgtaccgcccagcagatggtgacatgcgaatggtgatagtaacagaaaccattcagcctcttttttccacttctggatcagagtttattctaaattcagaagcacagtttcagacatctcaattttggattatggaaaagacaaaagcaataatgaaacatctacatagtcagaatgtaaaattgctcatatctagtgtgaaacaaccagatttagttagttattatgcaggggtgaatggcatatcagtggttgagtgtttatcatcagaagaagtttctcttatccggaggatcattggtctttctccatttgtaccaccacaggccttttcgcagtgtgaaatacctaacactgctttggtgaaattttgtaaacctcttatccttagatccaaaagatatgttcatctaggcttgataagcacatgtgcatttataccacactctatagttctttgtggaccagtgcatggtctcattgaacaacatgaggatgctttacatggagcacttaaaatgcttcggcaattatttaaagaccttgatctaaattacatgacacaaaccaatgaccaaaatggcacttcaagtctttttatttataagaacagtggagaaagttatcaagcaccagatcctggtaatggctcaatacaaaggccttatcaggacacagttgcagagaacaaagatgcattggaaaaaactcaaacatatttaaaagtacattctaatttggtaattccagatgtagaattagaaacatatattccgtattcaacccccacactgacaccaacagatacattccaaacagttgaaacgctgacatgtttgtctttggaaagaaacaggctaactgattattatgaaccattactcaagaacaattccactgcttattcaacaaggggaaatagaatagaaatttcttacgaaaatttacaggtcacaaatattactagaaagggaagcatgttaccagtgagctgtaagttaccgaatatgggtacttcccagagttacctttcctcatctatgccagctggttgtgttttgccagtaggtggtaattttgagatcttgttacattactatcttctcaattatgccaaaaaatgccatcaatcagaagaaaccatggttagtatgataatagctaatgcacttttaggcattcccaaagtcctttataaatctaaaacaggaaagtacagctttccacatacatatataagagctgtccatgcactgcaaaccaatcaacccttggtaagcagtcagacaggtttggaatcagtaatgggtaaataccagctactaacttcagttcttcagtgtttgacaaaaatattaaccattgacatggtaatcactgttaagagacaccctcagaaagttcacaatcaagattcagaagatgaactataacatcagaagtttttaattaaccaaacttttcatctaactcaagccaagtaaagcagtcatgtgaccactggttctaaagtcagttcagtctacttaggaaaatagcgtaactttaaaagtctttagaagaagcacactaaggtcaccagaccagatacaaatattaaattactttatggaacaaatctagaggggaagccaagatttggctaagtgtgtctgttttttccctattttatgcctctgtgtctcagctctgtgttagcctatgtgtttaggggagggtttttctttatagctcctttttactctcctgtatctttttcactccagccctccttcatcgttacatgtttagttcatagaatcatttaatctctgatttgggtgggcttattctaattgtttttaatattgaatacattatttgcattaattttccctactcatactttgtaaagctgagtaaaaggctcaaattatttttttcaaaaagcataaaattaaattagcagtgagtaaaaggctcaaattttttttcaaaaagcataaaattaatttttacttttatgtggtcattggtttactgccacttcatttggaaaacttggatagattttcacctttgatatacctttgaatatatgttacctgaaatataactgtgcattgttaactctttcatttctgtagtaaaaggttaatactagaaaggatatgcaattaatactttgattttctcctgaccccaagagcttgtaaggatatgtcatgtatttactggtttttcttgtatctggtgcatagccagagttccacagtaacaaataatttgacaatttttatttctaatgtttatttctgttttatttttaatttttatttctaatttatttcatttacaaatgttcatattttaaaaacttgtcaatgtaaataatatgatgcatcttatcatggacaaggacagtgttttctacctttatcagttctctgtaatacccaaaacagtgctgtatttactccaagtattcagaagtgcttgttgaacaaaacagtgttatctttaattcattcctttaaatacatgtttccagtttacttattcaacagattcttacttgggattgactgaagaaaaaaaactttaattatagttgaataagtgttgactaatgtattttaaaaactataatatcaaaattttttatattaaatgtaattctgattttttaaacatttatgctatatgatgcattattttgtttctgtgaatatggagagaataaattagctcttttgctgaattcatggatgaatgaacttt

SEQ ID NO: 2989 - protein, 723 aa, Homo sapiens
MLSSMAAAGSVKAALQVAEVLEAIVSCCVGPEGRQVLCTKPTGEVLLSRNGGRLLEALHLEHPIARMIVDCVSSHLKKTGDGAKTFIIFLCHLLRGLHAITDREKDPLMCENIQTHGRHWKNCSRWKFISQALLTFQTQILDGIMDQYLSRHFLSIFSSAKERTLCRSSLELLLEAYFCGRVGRNNHKFISQLMCDYFFKCMTCKSGIGVFELVDDHFVELNVGVTGLPVSDSRIIAGLVLQKDFSVYRPADGDMRMVIVTETIQPLFSTSGSEFILNSEAQFQTSQFWIMEKTKAIMKHLHSQNVKLLISSVKQPDLVSYYAGVNGISVVECLSSEEVSLIRRIIGLSPFVPPQAFSQCEIPNTALVKFCKPLILRSKRYVHLGLISTCAFIPHSIVLCGPVHGLIEQHEDALHGALKMLRQLFKDLDLNYMTQTNDQNGTSSLFIYKNSGESYQAPDPGNGSIQRPYQDTVAENKDALEKTQTYLKVHSNLVIPDVELETYIPYSTPTLTPTDTFQTVETLTCLSLERNRLTDYYEPLLKNNSTAYSTRGNRIEISYENLQVTNITRKGSMLPVSCKLPNMGTSQSYLSSSMPAGCVLPVGGNFEILLHYYLLNYAKKCHQSEETMVSMIIANALLGIPKVLYKSKTGKYSFPHTYIRAVHALQTNQPLVSSQTGLESVMGKYQLLTSVLQCLTKILTIDMVITVKRHPQKVHNQDSEDEL

SEQ ID NO: 2990 - DNA, 7213 bp, Homo sapiens
cactagaatgtgaaggatcttcgcggttctgggtgcccagaaaggcggcgacgcggcggatgacaacattaggccgcgacgcgctcctggccaggcggcggctgtagtgttagctttggacgccgcagtagccgctgccggtagcaagccgactgagggaaggtgggggtccgcccgggctggtggacctcggggccgaaagttcccgccccgctcgggggctgagccggcagtgcctccgcggccgctgggcagcgcccttcgtccaggctcgcgccccagctgccgccgacgacagcggccgagagaagttggggtctgactagacgcttacggggcctcggaccccggcgccgcggcgacctcggaggaaccggctccttgcgtcccgcctccctgggagctccgcacgggatttgcagatttacagaatggctgcacattaatggaaagagaagcataaacctatcttctttcattatggagggaggtttggcagatggagaacctgatcgaacttcgcaaacagtgacgaatctcagcttctgacaccaggaaagatgagtcagcgccaaggaaaagaagcttatccaacgccaaccaaagatttgcatcagccatctcttagtccagcaagtcctcatagccagggttttgaaagagggaaggaagatatttctcaaaataaagatgaatcttcactttctatgtcaaagagcaagtctgaatctaaactttataatggctcagagaaggacagttcaacttcaagcaaactcacaaaaaaagaatctcttaaggtacaaaagaaaaattaccgagaagaaaagaaaagagccacaaaggagctgctcagtacaatcacagatccttctgttattgttatggctgattggttaaagattcgtggtactctaaagagctggaccaagttatggtgtgtgttgaaacctggggtgctactgatctataaaacccaaaaaaatggtcagtgggtaggaacagttcttctgaatgcctgtgaaatcattgaacgtccatcaaaaaaggatggcttttgtttcaaacttttccatcctttggagcaatctatttgggcagtgaagggtccaaaaggtgaagcggttggatccattactcaacccttacctagcagttatttgatcatccgagctacttcagagtcagatggaaggtgctggatggatgctttggagttggctttgaaatgttctagtcttcttaaacgtacaatgatcagagaaggaaaggaacatgacctgagcgtttcatcagatagcacacatgtgactttctatggcttactacgtgctaacaatctccacagtggtgataacttccagttaaatgatagtgaaattgaacgacaacattttaaggaccaagatatgtattctgataaatctgataaagaaaatgatcaagaacatgatgagtctgataatgaggtgatggggaaaagtgaagaaagtgacacagatacatcagaaagacaagatgactcatatatcgaacctgagcctgttgagcctttaaaggagactacctacactgaacagagccatgaagaacttggagaggcaggtgaggcttctcaaacagaaactgtatctgaagaaaacaaaagccttatctggacactattgaaacaagtccgtcctggcatggacctatccaaggtggttctgcctacatttattttggaaccccgttctttcctggataaactttcagattactactatcatgcagatttcctatctgaggcagctcttgaagaaaatccttatttccgtttgaagaaagtagtgaaatggtatttgtcaggattctataaaaagccaaagggactgaagaaaccttataatcctatacttggcgagactttccgttgtttatggattcatcccagaacaaacagcaaaactttttatattgctgaacaggtgtcccatcatccaccaatatctgccttttatgttagtaatcgaaaagatggattttgccttagcggtagtatcctggctaagtctaagttttatggaaactcattatctgcaatattagagggagaagcacggttaactttcttgaatagaggtgaagattatgtaatgacaatgccatacgctcattgtaaaggaattctttatggtacaatgacactggagcttggtggaacagtcaatattacatgtcaaaaaactggatacagtgcaatacttgaatttaaactaaagccattcctagggagtagtgactgtgttaatcaaatatcagggaaacttaaactgggaaaagaagtcctagctactttggaaggtcattgggatagtgaagtttttattactgataaaaagactgataattcagaggttttctggaatccaacacctgacattaagcaatggagattaataaggcacactgtaaaatttgaagaacagggagattttgaatcagagaaactctggcaacgggtaactcgagccataaatgccaaagaccaaactgaagctacccaagagaagtatgttttggaagaagctcaaagacaagctgccagggatcggaaaacaaaaaatgaagagtggtcttgcaaattatttgaacttgatccactcacaggagaatggcattacaagtttgcagatacccgaccatgggacccacttaatgatatgatacagtttgaaaaagatggtgttattcagaccaaagtgaaacatcgtactccaatggttagcgtccccaaaatgaaacataagccaaccaggcaacagaagaaagtagcaaaaggctattcctccccagaacctgacattcaagactcctctggaagtgaagctcaatcagtaaaaccaagtacaagaagaaagaaaggaatagaactgggagacattcagagttccatcgaatctataaaacaaacacaggaagaaattaaaagaaatattatggctcttcgaaatcatttagtttcaagcacaccggccacggattattttctgcaacaaaaagactacttcatcattttcctcctgattttgcttcaagtcataataaacttcatgttcaagtagaagttctctaccattgaatcagtgaactagaaagatctgatttggcctgggaccagtgttcaagttggtttggtctttattaaaaatcacaatattccgaaaacaaaaaaacctaggagataaatgtagaggtattgacttttcgtatcttttatcttcacactgaaacaagagctatcctatttgattattaaagtgagctatgtgttaagtgccaggacatttctagcttttgtgagaatgtgtctacatatgagtataataaacccacatgtatacacaattgtctcttatgtactcctacctgacagtagtctttgtattctatagtatgttctgagatataatgttaacattgttcataacaaaaaatgctatcaatcttataaatatatgtaatctattttcttcataaaacaggcacaaaagttttatcagtaaggaattacagattgagaaatgatggaataatagacataattaattcaatacactactgttaaaatcatttgcaaagcactcagctcaattatcttcttagaaagaaagaaaaagtatgaatggtcaaaatgaatacatcgagagagataaatggcaaattgcttttttaaaagtttacataagttttttttaacccctagaatttaatatttgtagatgcaggtaaatatatatacttacgtgtatatcagtataaaaacactggtgtgcaattaattggattgattataataccaccttaagcacttgctgaaaaaagtgtggtcaaaattgattgctgtccttttgtcttatttttgtttttcttaagtcagctggttcataacataggccaaattctagagatgtttatagagcatttgaagtgctgataatttatgttttttcattatgaaaacttattttagctttagactccagtgtgttcagtgaataagtagaatataaaaaaatataaccagtattttacttcaaaagccaaaaagaggcaataagaaaagacactttgtggtggcctttatgtgtgcattaaaattggtttctgtaaaacgtgtaataagttgagtatctacgaagagtatcaagttctgaagtttaatttttttattatcctcctctcttcttagtaacttctttctgtggcaaaaccacaattctttaagattcctattgttcaggctaaggcaaatttttttgtttgtttcttcagtttaatattttgattttgtgtttttacgtaaatatttatattccttgaaagcaatttttgccaaggtagttcagtttaggaatatgttgttctaaaatatgtcttagaatcctgaaagcatagattttgaaatgtttttttaatgaaaatgaaggtcagagagaataattgccctgaccacatttgcctttcagtaggaggaggctgtgaaatagtaaaattataatcgtttatgccatgataaatacaagattggtaaataaatacattgattggtaaattatgagaatcaaaatgataaaaagagcctgcttttttccctaaccaatatagctatcttaagtatccttaggtttctgtgaagaaccatttcccatgttttcttggcaaaataatgctgtattccatatgtacatgtgaaatgatgttttaaattgataaaagcttaaataagatctacctatacccagtattttcatgatattagaacaaatgggtttttggttatattttatatttgtcaatataatttttgtattcacattctgttacactctgcctattcattgatatatgatattctgtaaatattgtacaatttgatcttttttatggtttaaattagttaattacatacaaattgattggcttatcacaaaaatcatttcatcagtaaaccttgttaacattttgtactggtgacccacctcttaggactttggtcttatccacgtgtatgttgttttcatttggtccaaataatattttatttgtatgggtatcttctaagactaaataggtagttgtgttctttatttttaaaatttctttttagagcaaatgttatgggttcttacccaaagagtcaaaaactatttcttaagaaagagcagagttattcatgactgttctttatacactaaaagcatgcatctaatctaatagtcctcttattatgcttttagttgtatgagtctctttctatgaactgaacacaaaactcaggaattggtggcttaattttagatcagtgcttgtactaggcttagttatatgaatctttataacacataattactaactttgtagccatatatgtaattgactttgaatgttatttacctgaaattaatcttccttcacacatggaccgtaaacggttcccagttgtctgagagcctcatgagggtttctaggatttatgaccttatgaccagtttttttcatttaccaagattttattttcctacatgaaaatttaattgagtaataattattcacatgtgcattttctttttagctgttaaatgtactatgccatcatccaccatttagtaaaatgtagctggcccaggacatgtaaaaaaaaaaaaaaaacaacaacaataaatagggcatgtgaaatgttaagttacagcaatagatattttatttgtatttcatgttagtacttttttgttttatatcacttataaaggtacagtgtactctttgtcacagctcagttggtaaccgcattccattgaaaagttggccttgtaaaatacaactctcatttaatattcatgcttttgtgcctttaagaaaatattttttgtcattttttgtgttacagaactataatgtgattcaaggtgtttataggcttgtcataaaagggtcatttctgtgtgttactttctttttatatagctatagtatatttaaacaataatactatcttttataggggtttgtctatttacctattctttactcagacattgatgtagacttgtcagattattctgagtattgttaacagtgccttttcgatggaatcacactttttggctgtcaccttgtgccatatacacacaaaattttgtggaaggcagttttaactttctgaagaatatctgtcaaaatttaagaaaacaaatgtataaaattccattttttccagtgtttagcatttctagtaagcagtgaggttgtttgacatacagtgatgatggcattattgataagccatacatgagactgcagattatattgaatcatattaaatgtacagaaataaaatattagatttatatcaaattttccaatttgaaccagtggggaaaatcccacagaaatcagtaagtttacatttcaatttctatcttatttgactaagtggaaagagattctttaaaatgtataacctgccattatgtaatttggtttcattttattctacctgttgtgtgagtttagtatatttaatttactttttgttactctttacatactgtttatttttgttagtttttaattgaagatggactgttgaaattgtataggaccagtgtcttattaatatgattaatatatttagaagagccacgtgaaacccatgacaaaatgaatgtgaatattctttctaaaaatttagaaaatgttatctttttgcatttattatgtaaaactgttttacagtatcaaaatttttcacttaaagaaaaaaaatgccatgaaacatttgaactgatgagccacagaacttcagttgaaatttttttcactttttagcatgctaaatatacatctgagtttaaatgttctgtttaatggccattcataaattcaagcactaccactggtcagttttgtgtgatagaataaaaatatgttacctgcagtgtaagtacagcacactgtcaaattcttttccttaaggtgcacagtaaatgtacagatagttataggccactgttttgtaatgtagtacatttctaatctattattcctaacctattataactgtttgcagaaagaaaagaatttttctaataatctgtaaaattatgctaacttctacaagtaggcttctaaataaaatttttaaaaagagcaaaaaaaaaaaaaaaaaaaa

SEQ ID NO: 2991 - protein, 847 aa, Homo sapiens
MSQRQGKEAYPTPTKDLHQPSLSPASPHSQGFERGKEDISQNKDESSLSMSKSKSESKLYNGSEKDSSTSSKLTKKESLKVQKKNYREEKKRATKELLSTITDPSVIVMADWLKIRGTLKSWTKLWCVLKPGVLLIYKTQKNGQWVGTVLLNACEIIERPSKKDGFCFKLFHPLEQSIWAVKGPKGEAVGSITQPLPSSYLIIRATSESDGRCWMDALELALKCSSLLKRTMIREGKEHDLSVSSDSTHVTFYGLLRANNLHSGDNFQLNDSEIERQHFKDQDMYSDKSDKENDQEHDESDNEVMGKSEESDTDTSERQDDSYIEPEPVEPLKETTYTEQSHEELGEAGEASQTETVSEENKSLIWTLLKQVRPGMDLSKVVLPTFILEPRSFLDKLSDYYYHADFLSEAALEENPYFRLKKVVKWYLSGFYKKPKGLKKPYNPILGETFRCLWIHPRTNSKTFYIAEQVSHHPPISAFYVSNRKDGFCLSGSILAKSKFYGNSLSAILEGEARLTFLNRGEDYVMTMPYAHCKGILYGTMTLELGGTVNITCQKTGYSAILEFKLKPFLGSSDCVNQISGKLKLGKEVLATLEGHWDSEVFITDKKTDNSEVFWNPTPDIKQWRLIRHTVKFEEQGDFESEKLWQRVTRAINAKDQTEATQEKYVLEEAQRQAARDRKTKNEEWSCKLFELDPLTGEWHYKFADTRPWDPLNDMIQFEKDGVIQTKVKHRTPMVSVPKMKHKPTRQQKKVAKGYSSPEPDIQDSSGSEAQSVKPSTRRKKGIELGDIQSSIESIKQTQEEIKRNIMALRNHLVSSTPATDYFLQQKDYFIIFLLILLQVIINFMFK

SEQ ID NO: 2992 - DNA, 7259 bp, Homo sapiens
cactagaatgtgaaggatcttcgcggttctgggtgcccagaaaggcggcgacgcggcggatgacaacattaggccgcgacgcgctcctggccaggcggcggctgtagtgttagctttggacgccgcagtagccgctgccggtagcaagccgactgagggaaggtgggggtccgcccgggctggtggacctcggggccgaaagttcccgccccgctcgggggctgagccggcagtgcctccgcggccgctgggcagcgcccttcgtccaggctcgcgccccagctgccgccgacgacagcggccgagagaagttggggtctgactagacgcttacggggcctcggaccccggcgccgcggcgacctcggaggaaccggctccttgcgtcccgcctccctgggagctccgcacgggatttgcagatttacagaatggctgcacattaatggaaagagaagcataaacctatcttctttcattatggagggaggtttggcagatggagaacctgatcgaacttcgcttcttggtgatagcaaagatgtccttgggccatcaactgttgtagcaaacagtgacgaatctcagcttctgacaccaggaaagatgagtcagcgccaaggaaaagaagcttatccaacgccaaccaaagatttgcatcagccatctcttagtccagcaagtcctcatagccagggttttgaaagagggaaggaagatatttctcaaaataaagatgaatcttcactttctatgtcaaagagcaagtctgaatctaaactttataatggctcagagaaggacagttcaacttcaagcaaactcacaaaaaaagaatctcttaaggtacaaaagaaaaattaccgagaagaaaagaaaagagccacaaaggagctgctcagtacaatcacagatccttctgttattgttatggctgattggttaaagattcgtggtactctaaagagctggaccaagttatggtgtgtgttgaaacctggggtgctactgatctataaaacccaaaaaaatggtcagtgggtaggaacagttcttctgaatgcctgtgaaatcattgaacgtccatcaaaaaaggatggcttttgtttcaaacttttccatcctttggagcaatctatttgggcagtgaagggtccaaaaggtgaagcggttggatccattactcaacccttacctagcagttatttgatcatccgagctacttcagagtcagatggaaggtgctggatggatgctttggagttggctttgaaatgttctagtcttcttaaacgtacaatgatcagagaaggaaaggaacatgacctgagcgtttcatcagatagcacacatgtgactttctatggcttactacgtgctaacaatctccacagtggtgataacttccagttaaatgatagtgaaattgaacgacaacattttaaggaccaagatatgtattctgataaatctgataaagaaaatgatcaagaacatgatgagtctgataatgaggtgatggggaaaagtgaagaaagtgacacagatacatcagaaagacaagatgactcatatatcgaacctgagcctgttgagcctttaaaggagactacctacactgaacagagccatgaagaacttggagaggcaggtgaggcttctcaaacagaaactgtatctgaagaaaacaaaagccttatctggacactattgaaacaagtccgtcctggcatggacctatccaaggtggttctgcctacatttattttggaaccccgttctttcctggataaactttcagattactactatcatgcagatttcctatctgaggcagctcttgaagaaaatccttatttccgtttgaagaaagtagtgaaatggtatttgtcaggattctataaaaagccaaagggactgaagaaaccttataatcctatacttggcgagactttccgttgtttatggattcatcccagaacaaacagcaaaactttttatattgctgaacaggtgtcccatcatccaccaatatctgccttttatgttagtaatcgaaaagatggattttgccttagcggtagtatcctggctaagtctaagttttatggaaactcattatctgcaatattagagggagaagcacggttaactttcttgaatagaggtgaagattatgtaatgacaatgccatacgctcattgtaaaggaattctttatggtacaatgacactggagcttggtggaacagtcaatattacatgtcaaaaaactggatacagtgcaatacttgaatttaaactaaagccattcctagggagtagtgactgtgttaatcaaatatcagggaaacttaaactgggaaaagaagtcctagctactttggaaggtcattgggatagtgaagtttttattactgataaaaagactgataattcagaggttttctggaatccaacacctgacattaagcaatggagattaataaggcacactgtaaaatttgaagaacagggagattttgaatcagagaaactctggcaacgggtaactcgagccataaatgccaaagaccaaactgaagctacccaagagaagtatgttttggaagaagctcaaagacaagctgccagggatcggaaaacaaaaaatgaagagtggtcttgcaaattatttgaacttgatccactcacaggagaatggcattacaagtttgcagatacccgaccatgggacccacttaatgatatgatacagtttgaaaaagatggtgttattcagaccaaagtgaaacatcgtactccaatggttagcgtccccaaaatgaaacataagccaaccaggcaacagaagaaagtagcaaaaggctattcctccccagaacctgacattcaagactcctctggaagtgaagctcaatcagtaaaaccaagtacaagaagaaagaaaggaatagaactgggagacattcagagttccatcgaatctataaaacaaacacaggaagaaattaaaagaaatattatggctcttcgaaatcatttagtttcaagcacaccggccacggattattttctgcaacaaaaagactacttcatcattttcctcctgattttgcttcaagtcataataaacttcatgttcaagtagaagttctctaccattgaatcagtgaactagaaagatctgatttggcctgggaccagtgttcaagttggtttggtctttattaaaaatcacaatattccgaaaacaaaaaaacctaggagataaatgtagaggtattgacttttcgtatcttttatcttcacactgaaacaagagctatcctatttgattattaaagtgagctatgtgttaagtgccaggacatttctagcttttgtgagaatgtgtctacatatgagtataataaacccacatgtatacacaattgtctcttatgtactcctacctgacagtagtctttgtattctatagtatgttctgagatataatgttaacattgttcataacaaaaaatgctatcaatcttataaatatatgtaatctattttcttcataaaacaggcacaaaagttttatcagtaaggaattacagattgagaaatgatggaataatagacataattaattcaatacactactgttaaaatcatttgcaaagcactcagctcaattatcttcttagaaagaaagaaaaagtatgaatggtcaaaatgaatacatcgagagagataaatggcaaattgcttttttaaaagtttacataagttttttttaacccctagaatttaatatttgtagatgcaggtaaatatatatacttacgtgtatatcagtataaaaacactggtgtgcaattaattggattgattataataccaccttaagcacttgctgaaaaaagtgtggtcaaaattgattgctgtccttttgtcttatttttgtttttcttaagtcagctggttcataacataggccaaattctagagatgtttatagagcatttgaagtgctgataatttatgttttttcattatgaaaacttattttagctttagactccagtgtgttcagtgaataagtagaatataaaaaaatataaccagtattttacttcaaaagccaaaaagaggcaataagaaaagacactttgtggtggcctttatgtgtgcattaaaattggtttctgtaaaacgtgtaataagttgagtatctacgaagagtatcaagttctgaagtttaatttttttattatcctcctctcttcttagtaacttctttctgtggcaaaaccacaattctttaagattcctattgttcaggctaaggcaaatttttttgtttgtttcttcagtttaatattttgattttgtgtttttacgtaaatatttatattccttgaaagcaatttttgccaaggtagttcagtttaggaatatgttgttctaaaatatgtcttagaatcctgaaagcatagattttgaaatgtttttttaatgaaaatgaaggtcagagagaataattgccctgaccacatttgcctttcagtaggaggaggctgtgaaatagtaaaattataatcgtttatgccatgataaatacaagattggtaaataaatacattgattggtaaattatgagaatcaaaatgataaaaagagcctgcttttttccctaaccaatatagctatcttaagtatccttaggtttctgtgaagaaccatttcccatgttttcttggcaaaataatgctgtattccatatgtacatgtgaaatgatgttttaaattgataaaagcttaaataagatctacctatacccagtattttcatgatattagaacaaatgggtttttggttatattttatatttgtcaatataatttttgtattcacattctgttacactctgcctattcattgatatatgatattctgtaaatattgtacaatttgatcttttttatggtttaaattagttaattacatacaaattgattggcttatcacaaaaatcatttcatcagtaaaccttgttaacattttgtactggtgacccacctcttaggactttggtcttatccacgtgtatgttgttttcatttggtccaaataatattttatttgtatgggtatcttctaagactaaataggtagttgtgttctttatttttaaaatttctttttagagcaaatgttatgggttcttacccaaagagtcaaaaactatttcttaagaaagagcagagttattcatgactgttctttatacactaaaagcatgcatctaatctaatagtcctcttattatgcttttagttgtatgagtctctttctatgaactgaacacaaaactcaggaattggtggcttaattttagatcagtgcttgtactaggcttagttatatgaatctttataacacataattactaactttgtagccatatatgtaattgactttgaatgttatttacctgaaattaatcttccttcacacatggaccgtaaacggttcccagttgtctgagagcctcatgagggtttctaggatttatgaccttatgaccagtttttttcatttaccaagattttattttcctacatgaaaatttaattgagtaataattattcacatgtgcattttctttttagctgttaaatgtactatgccatcatccaccatttagtaaaatgtagctggcccaggacatgtaaaaaaaaaaaaaaaacaacaacaataaatagggcatgtgaaatgttaagttacagcaatagatattttatttgtatttcatgttagtacttttttgttttatatcacttataaaggtacagtgtactctttgtcacagctcagttggtaaccgcattccattgaaaagttggccttgtaaaatacaactctcatttaatattcatgcttttgtgcctttaagaaaatattttttgtcattttttgtgttacagaactataatgtgattcaaggtgtttataggcttgtcataaaagggtcatttctgtgtgttactttctttttatatagctatagtatatttaaacaataatactatcttttataggggtttgtctatttacctattctttactcagacattgatgtagacttgtcagattattctgagtattgttaacagtgccttttcgatggaatcacactttttggctgtcaccttgtgccatatacacacaaaattttgtggaaggcagttttaactttctgaagaatatctgtcaaaatttaagaaaacaaatgtataaaattccattttttccagtgtttagcatttctagtaagcagtgaggttgtttgacatacagtgatgatggcattattgataagccatacatgagactgcagattatattgaatcatattaaatgtacagaaataaaatattagatttatatcaaattttccaatttgaaccagtggggaaaatcccacagaaatcagtaagtttacatttcaatttctatcttatttgactaagtggaaagagattctttaaaatgtataacctgccattatgtaatttggtttcattttattctacctgttgtgtgagtttagtatatttaatttactttttgttactctttacatactgtttatttttgttagtttttaattgaagatggactgttgaaattgtataggaccagtgtcttattaatatgattaatatatttagaagagccacgtgaaacccatgacaaaatgaatgtgaatattctttctaaaaatttagaaaatgttatctttttgcatttattatgtaaaactgttttacagtatcaaaatttttcacttaaagaaaaaaaatgccatgaaacatttgaactgatgagccacagaacttcagttgaaatttttttcactttttagcatgctaaatatacatctgagtttaaatgttctgtttaatggccattcataaattcaagcactaccactggtcagttttgtgtgatagaataaaaatatgttacctgcagtgtaagtacagcacactgtcaaattcttttccttaaggtgcacagtaaatgtacagatagttataggccactgttttgtaatgtagtacatttctaatctattattcctaacctattataactgtttgcagaaagaaaagaatttttctaataatctgtaaaattatgctaacttctacaagtaggcttctaaataaaatttttaaaaagagcaaaaaaaaaaaaaaaaaaaa

SEQ ID NO: 2993 - protein, 889 aa, Homo sapiens
MEGGLADGEPDRTSLLGDSKDVLGPSTVVANSDESQLLTPGKMSQRQGKEAYPTPTKDLHQPSLSPASPHSQGFERGKEDISQNKDESSLSMSKSKSESKLYNGSEKDSSTSSKLTKKESLKVQKKNYREEKKRATKELLSTITDPSVIVMADWLKIRGTLKSWTKLWCVLKPGVLLIYKTQKNGQWVGTVLLNACEIIERPSKKDGFCFKLFHPLEQSIWAVKGPKGEAVGSITQPLPSSYLIIRATSESDGRCWMDALELALKCSSLLKRTMIREGKEHDLSVSSDSTHVTFYGLLRANNLHSGDNFQLNDSEIERQHFKDQDMYSDKSDKENDQEHDESDNEVMGKSEESDTDTSERQDDSYIEPEPVEPLKETTYTEQSHEELGEAGEASQTETVSEENKSLIWTLLKQVRPGMDLSKVVLPTFILEPRSFLDKLSDYYYHADFLSEAALEENPYFRLKKVVKWYLSGFYKKPKGLKKPYNPILGETFRCLWIHPRTNSKTFYIAEQVSHHPPISAFYVSNRKDGFCLSGSILAKSKFYGNSLSAILEGEARLTFLNRGEDYVMTMPYAHCKGILYGTMTLELGGTVNITCQKTGYSAILEFKLKPFLGSSDCVNQISGKLKLGKEVLATLEGHWDSEVFITDKKTDNSEVFWNPTPDIKQWRLIRHTVKFEEQGDFESEKLWQRVTRAINAKDQTEATQEKYVLEEAQRQAARDRKTKNEEWSCKLFELDPLTGEWHYKFADTRPWDPLNDMIQFEKDGVIQTKVKHRTPMVSVPKMKHKPTRQQKKVAKGYSSPEPDIQDSSGSEAQSVKPSTRRKKGIELGDIQSSIESIKQTQEEIKRNIMALRNHLVSSTPATDYFLQQKDYFIIFLLILLQVIINFMFK

SEQ ID NO: 2994 - DNA, 8192 bp, Homo sapiens
tagaagcattttctttggcagcaagaagataattttatagaagccatgcctgttcttggggttgcctcaaaactgaggcagccagctgttgggtcaaagcctgtgcatactgctcttccgataccaaatcttggcactactgggtcacagcactgttcttcaagacctttggaacttgctgaaacagagagctccatgctttcttgtcagcttgcgttaaaatcaacctgtgaatttggagagaagaaacccctccaaggaaaagccaaggagaaagaagacagcaagatttacactgactgggccaaccactacctagcaaaatcaggccacaagcggctgatcaaggacttgcaacaagacattgcagatggagtactcctagcagaaatcatccagattattgcaaatgaaaaagttgaagatatcaatggatgtcctagaagtcagtctcagatgattgaaaatgttgatgtctgccttagttttctagcagccagaggggtaaatgttcaaggtctatctgctgaagaaataagaaatggaaacttaaaagccattctagggctgtttttcagtttatctcgctacaagcagcaacaacaccatcaacaacagtactatcagtccttggtggaacttcagcagcgagttactcacgcttcccctccatcggaagccagccaggccaaaacccagcaagatatgcagtccagtctggcagccagatatgcaactcagtctaatcacagtggaattgcaaccagtcaaaaaaagcctactaggcttccagggccctctagggtgcctgctgcaggaagcagcagcaaggtccagggagcctctaatttaaataggagaagtcagagctttaacagcattgacaaaaacaagcctccaaattatgcaaatggaaacgaaaaagattcctccaaaggacctcaatcgtcttcaggtgtaaatggtaacgtgcagcctcccagtactgctgggcagcctcctgcctctgccatcccttctccaagtgccagcaagccctggcgcagcaagtccatgaatgtcaaacacagtgccacctccaccatgttgactgtaaagcagtcaagtacagccacctcccccacaccatcttcagacagactgaagccacctgtctcagaaggggtcaaaactgctccctcaggacagaaatccatgcttgagaaattcaagctagtcaatgcccggactgctttacgccccccgcagcctcccagttcaggacctagtgatggtgggaaggatgatgatgccttttctgaatctggtgaaatggaaggttttaacagtggtctgaatagtggtggctcaacaaatagcagtcccaaagtgtcacctaagttggcccctccaaaagctggaagcaaaaatctcagcaataaaaagtctttgctacagccaaaggaaaaagaagaaaagaacagggacaaaaataaagtttgcactgaaaaaccagtcaaagaagagaaggatcaggtgacagagatggctccaaaaaagacctccaaaattgcaagcttgatccctaagggcagcaagacaacagcagctaagaaggaaagcttaattccgtcttccagtggtattccaaaaccaggctctaaagttccaacagtaaagcaaaccatttcacctggcagcacagcaagcaaagagtctgagaaattcaggactaccaaggggagcccttcccagtccttatctaagcctataaccatggagaaagcaagtgcttctagttgtcctgcccctttggaaggaagggaagctggccaagcttctccttctggttcctgtaccatgacagtggcacaaagcagtgggcagagcacaggaaatggtgctgtccaactccctcaacagcagcaacatagccacccgaataccgcgacagtggcaccattcatttacagggcacattcagaaaatgaaggtaccgctttaccatcggctgactcctgtaccagtcctacaaagatggacttatcatatagtaagactgctaagcagtgcctggaggagatatctggtgaagaccctgaaacaagaagaatgagaacagttaaaaacatagcagacttgaggcagaatttagaagagactatgtccagtcttcgtgggactcagataagccacagcaccctggagacaacatttgacagcactgtgacaacagaagttaatggaaggaccatacccaacttgacaagtcgacccacccccatgacctggaggttgggccaggcatgtccgcgacttcaggcgggagatgctccctccctgggtgctggctatcctcgcagtggtaccagtcgattcatccacacagacccctcgaggttcatgtataccacgcctctccgtcgagctgctgtctctaggctgggaaacatgtcacagattgacatgagtgagaaagcaagcagtgacctggacatgtcttctgaggtcgatgtgggtggatatatgagtgatggtgatatccttgggaaaagtctcaggactgatgacatcaacagtgggtacatgacagatggaggacttaacctatatactagaagtctgaaccgaataccagacacagcaacttcccgggacatcatccagagaggggttcacgatgtgacagtggatgcagacagctgggatgacagcagttcagtgagcagtggtctcagtgacacccttgataacatcagcactgatgacctgaacaccacatcctctgtcagctcttactccaacatcaccgtcccctctaggaagaatactcagctgaggacagattcagagaaacgctccaccacagacgagacctgggatagtcctgaggaactgaaaaaaccagaagaagattttgacagccatggggatgctggtggcaagtggaagactgtgtcctctggacttcctgaagaccccgagaaggcagggcagaaagcttccctgtctgtttcacagacaggttcctggagaagaggcatgtctgcccaaggaggggcgccatctaggcagaaagctggaacaagtgcactcaaaacacccgggaaaaccgatgatgccaaagcttctgagaaaggaaaagctcccctaaaaggatcatctctacaaagatctccttcagatgcaggaaaaagcagtggagatgaagggaaaaagcccccctcaggcattggaagatcgactgccaccagctcctttggctttaagaaaccaagtggagtagggtcatctgccatgatcaccagcagtggagcaaccataacaagtggctctgcaacactgggtaaaattccaaaatctgctgccattggcgggaagtcaaatgcagggagaaaaaccagtttggacggttcacagaatcaggatgatgttgtgctgcatgttagctcaaagactaccctacaatatcgcagcttgccccgcccttcaaaatccagcaccagtggcattcctggccgaggaggccacagatccagtaccagcagtattgattccaacgtcagcagcaagtctgctggggccaccacctcgaaactgagagaaccaactaaaattgggtcagggcgctcgagtcctgtcaccgtcaaccaaacagacaaggaaaaggaaaaagtagcagtctcagattcagaaagtgtttctttgtcaggttcccccaaatccagccccacctctgccagcgcctgtggtgcacaaggtctcaggcagccaggatccaagtatccagatattgcctcacccacatttcgaaggttgtttggtgccaaggcaggtggcaaatctgcctctgcacctaatactgagggtgtgaaatcttcctcagtaatgcccagccctagtaccacattagcgcggcaaggcagtctggagtcaccgtcgtccggtacgggcagcatgggcagtgctggtgggctaagcggcagcagcagccctctcttcaataaaccctcagacttaactacagatgttataagcttaagtcactcgttggcctccagcccagcatcggttcactctttcacatcaggtggtctcgtgtgggctgccaatatgagcagttcctctgcaggcagcaaggatactccgagctaccagtccatgactagcctccacacgagctctgagtccattgacctccccctcagccatcatggctccttgtctggactgaccacaggcactcacgaggtccagagcctgctcatgagaacgggtagtgtgagatctactctctcagaaagcatgcagcttgacagaaatacactacccaaaaagggactaagatataccccatcatctcggcaggccaaccaagaagagggcaaagagtggttgcgttctcattctactggagggcttcaggacactggcaaccagtcacctctggtttccccttctgccatgtcatcttctgcagctggaaaataccacttttctaacttggtgagcccaacaaatttgtctcagtttaaccttcccgggcccagcatgatgcgctcaaacagcatcccagcccaagactcttccttcgatctctatgatgactcccagctttgtgggagtgccacttctctggaggaaagacctcgtgccatcagtcattcgggctcattcagagacagcatggaagaagttcatggctcttcattatcactggtgtccagcacttcttctctttactctacagctgaagaaaaggctcattcagagcaaatccataaactgcggagagagctggttgcatcacaagaaaaagttgctaccctcacatctcagctttcagcaaatgctcaccttgtagcagcttttgaaaagagcttagggaatatgactggccgattgcaaagtctaactatgacagcggaacaaaaggaatctgaacttatagaactaagagaaaccattgaaatgctgaaggctcagaattctgctgcccaggcggctattcagggagcactgaatggtccagaccatcctcccaaagatcttcgcatcagaagacagcattcctctgaaagtgtttctagtatcaacagtgccacaagccattccagtattggcagtggtaatgatgccgactccaagaagaagaaaaagaaaaactgggtgaactctagaggaagtgagctgagaagttctttcaaacaagcctttgggaagaaaaagtccaccaagcctccttcatcacattctgacattgaagagcttactgattcatcccttccggcatcccccaagttaccccataatgctggtgactgtggctcagcatccatgaagccctcacaatctgcttcagcgatctgtgaatgcacagaagctgaggcagagataattctgcagctgaagagcgagctcagagaaaaggaattaaaattaacggatattcggctggaggccctcagctctgctcatcatcttgatcagatccgggaagccatgaaccggatgcagaatgaaattgaaatactgaaagctgaaaatgaccggttgaaggcagaaactggtaacacagctaagcctactcggccaccgtcagaatcctcaagcagcacctcctcttcatcttccaggcagtcattaggactttctctaaacaatttgaacatcacagaggctgttagctcagatattttgctagatgatgctggtgatgcaactggacataaagatggccgcagtgtgaaaattatagtctccataagcaagggctatggtcgagcaaaggaccaaaaatctcaggcatatttgataggatccattggtgttagtggaaaaaccaagtgggatgtcttagatggtgtaataagacgtctctttaaggaatatgtattccgaattgatacatccactagccttggtctgagctctgactgcattgctagctactgtataggagacttaattagatcccataacctagaagtgcctgaattgctgccttgtggataccttgttggagataataacatcatcactgtgaacctcaaaggggtagaagaaaatagtttggacagttttgtttttgatacgctgattcctaaaccaattacccaaaggtactttaacttgttgatggagcatcacagaattatactctcaggaccgagtggtactggaaagacctatttggcaaacaaacttgctgaatatgtaataaccaaatctggaaggaaaaaaacagaggatgcaattgccacttttaatgtggaccacaagtcaagtaaggaattgcaacaatatctagctaacctggctgaacagtgcagtgctgataataatggagtggagctcccagttgtaataattcttgataatcttcatcatgtgggctctctgagtgatatcttcaatggttttctcaattgtaaatacaacaaatgtccatatattattggaacaatgaatcagggagtttcttcatcaccaaatctagagctgcatcacaatttcaggtgggtattatgtgcaaatcatacagaaccagtgaaaggctttttaggcagatatcttcgaagaaaactcatagagatagaaattgaaaggaacattcgcaataatgacctagtcaaaattatagattggattccgaagacgtggcatcatctcaacagttttttggaaacacacagttcttctgacgttaccattggtccccgactattccttccttgccccatggatgtagaaggttctagagtatggttcatggatctctggaactattctttagtaccttatattctggaggcagtgagagagggtcttcagatgtatgggaaacgcacaccatgggaagatccttcaaagtgggtgcttgacacatatccatggagctcagcaactctgcctcaggagagcccagccttacttcagctgcgaccagaagatgttgggtatgaaagctgcacatccactaaggaagccacaacctcaaagcacattccgcaaactgacacagaaggagatcccctgatgaatatgctaatgaaactccaagaagcagccaattactcgagcacacaaagctgcgacagcgaaagcaccagccaccatgaagacattttggattcatctcttgaatctaccctctagagggtgaaaaaagttaagggaaaagactttgcttttaaaaaaatgtttcaaaagaaaggtattttcactaaaccactgccagtataaaagcaccctgtcaagggccctgacccagagttgtggtctccaaggaggcagcagaactaagtctgaaccgccaagatgctaaattgcaatggaagcttaactttagtttatttctaagcattttttatatctgtggagtaatagaaagctccattactcaactggaaaggaccctaatgacagggcaactgaacagattgcacatgggatagccaaactggactttctttgtttcctctttaaaagtttacaatgcagaccattttttgtcccttccttttgtttcctctgaggggctgttcgccccaggcagggtccatctttctgatctgtccaacctcctttgtgccacacggtgctggtcacagggcttcagtagtgtttgtgttgtgcgctcaccccattccagaacaaatccaagaggccagtcctccataagcacaaatggaattgtgcaaccaccagaaaaacactactgtggcaaactggagaagtgccaatttaattctaactgccacgttctcatgatgtgctccaccaactttttagtatatgagtcactggttttataaggttgtttttaccacagtggtctttttaaaccacctgcccactcccttaacaagagttttataccaattattagtcaacactgataaaaggcttttttagggctttatttgtttgagccttttcagtgaaagaaggaacatttcctatggtgctgtctcactgccttaaaacagatttctatgacagtttaacagttggtttaaatcctaaaccattggtaatttccactgtcttttcatttacaaccaagcaacaccagttaacatagtagcctcatctctatatatctttctcttttttttttttttgaagaaatggataggagaaagatcagtatttttagccttgtgaatagatcgctttgcctatcctccaaaatattaaaataacccaga

SEQ ID NO: 2995 - protein, 2363 aa, Homo sapiens
MPVLGVASKLRQPAVGSKPVHTALPIPNLGTTGSQHCSSRPLELAETESSMLSCQLALKSTCEFGEKKPLQGKAKEKEDSKIYTDWANHYLAKSGHKRLIKDLQQDIADGVLLAEIIQIIANEKVEDINGCPRSQSQMIENVDVCLSFLAARGVNVQGLSAEEIRNGNLKAILGLFFSLSRYKQQQHHQQQYYQSLVELQQRVTHASPPSEASQAKTQQDMQSSLAARYATQSNHSGIATSQKKPTRLPGPSRVPAAGSSSKVQGASNLNRRSQSFNSIDKNKPPNYANGNEKDSSKGPQSSSGVNGNVQPPSTAGQPPASAIPSPSASKPWRSKSMNVKHSATSTMLTVKQSSTATSPTPSSDRLKPPVSEGVKTAPSGQKSMLEKFKLVNARTALRPPQPPSSGPSDGGKDDDAFSESGEMEGFNSGLNSGGSTNSSPKVSPKLAPPKAGSKNLSNKKSLLQPKEKEEKNRDKNKVCTEKPVKEEKDQVTEMAPKKTSKIASLIPKGSKTTAAKKESLIPSSSGIPKPGSKVPTVKQTISPGSTASKESEKFRTTKGSPSQSLSKPITMEKASASSCPAPLEGREAGQASPSGSCTMTVAQSSGQSTGNGAVQLPQQQQHSHPNTATVAPFIYRAHSENEGTALPSADSCTSPTKMDLSYSKTAKQCLEEISGEDPETRRMRTVKNIADLRQNLEETMSSLRGTQISHSTLETTFDSTVTTEVNGRTIPNLTSRPTPMTWRLGQACPRLQAGDAPSLGAGYPRSGTSRFIHTDPSRFMYTTPLRRAAVSRLGNMSQIDMSEKASSDLDMSSEVDVGGYMSDGDILGKSLRTDDINSGYMTDGGLNLYTRSLNRIPDTATSRDIIQRGVHDVTVDADSWDDSSSVSSGLSDTLDNISTDDLNTTSSVSSYSNITVPSRKNTQLRTDSEKRSTTDETWDSPEELKKPEEDFDSHGDAGGKWKTVSSGLPEDPEKAGQKASLSVSQTGSWRRGMSAQGGAPSRQKAGTSALKTPGKTDDAKASEKGKAPLKGSSLQRSPSDAGKSSGDEGKKPPSGIGRSTATSSFGFKKPSGVGSSAMITSSGATITSGSATLGKIPKSAAIGGKSNAGRKTSLDGSQNQDDVVLHVSSKTTLQYRSLPRPSKSSTSGIPGRGGHRSSTSSIDSNVSSKSAGATTSKLREPTKIGSGRSSPVTVNQTDKEKEKVAVSDSESVSLSGSPKSSPTSASACGAQGLRQPGSKYPDIASPTFRRLFGAKAGGKSASAPNTEGVKSSSVMPSPSTTLARQGSLESPSSGTGSMGSAGGLSGSSSPLFNKPSDLTTDVISLSHSLASSPASVHSFTSGGLVWAANMSSSSAGSKDTPSYQSMTSLHTSSESIDLPLSHHGSLSGLTTGTHEVQSLLMRTGSVRSTLSESMQLDRNTLPKKGLRYTPSSRQANQEEGKEWLRSHSTGGLQDTGNQSPLVSPSAMSSSAAGKYHFSNLVSPTNLSQFNLPGPSMMRSNSIPAQDSSFDLYDDSQLCGSATSLEERPRAISHSGSFRDSMEEVHGSSLSLVSSTSSLYSTAEEKAHSEQIHKLRRELVASQEKVATLTSQLSANAHLVAAFEKSLGNMTGRLQSLTMTAEQKESELIELRETIEMLKAQNSAAQAAIQGALNGPDHPPKDLRIRRQHSSESVSSINSATSHSSIGSGNDADSKKKKKKNWVNSRGSELRSSFKQAFGKKKSTKPPSSHSDIEELTDSSLPASPKLPHNAGDCGSASMKPSQSASAICECTEAEAEIILQLKSELREKELKLTDIRLEALSSAHHLDQIREAMNRMQNEIEILKAENDRLKAETGNTAKPTRPPSESSSSTSSSSSRQSLGLSLNNLNITEAVSSDILLDDAGDATGHKDGRSVKIIVSISKGYGRAKDQKSQAYLIGSIGVSGKTKWDVLDGVIRRLFKEYVFRIDTSTSLGLSSDCIASYCIGDLIRSHNLEVPELLPCGYLVGDNNIITVNLKGVEENSLDSFVFDTLIPKPITQRYFNLLMEHHRIILSGPSGTGKTYLANKLAEYVITKSGRKKTEDAIATFNVDHKSSKELQQYLANLAEQCSADNNGVELPVVIILDNLHHVGSLSDIFNGFLNCKYNKCPYIIGTMNQGVSSSPNLELHHNFRWVLCANHTEPVKGFLGRYLRRKLIEIEIERNIRNNDLVKIIDWIPKTWHHLNSFLETHSSSDVTIGPRLFLPCPMDVEGSRVWFMDLWNYSLVPYILEAVREGLQMYGKRTPWEDPSKWVLDTYPWSSATLPQESPALLQLRPEDVGYESCTSTKEATTSKHIPQTDTEGDPLMNMLMKLQEAANYSSTQSCDSESTSHHEDILDSSLESTL

SEQ ID NO: 2996 - DNA, 4052 bp, Homo sapiens
gaggcaagtgaggagagaagatgctgtagcgtcctcaccggctgccagcagggaaatggtccaggagtgctgggtgtgagcctcccttctcctcaagccggagactgcggttgtcattgatcaattgaagaagcaaggacccgaaatcacagacattagcaatgatgtgtgaagtgatgcccacgattaatgaggacaccccaatgagccaaagggggtcccaaagcagtggctcggactcagactcccattttgagcagctgatggtgaatatgctagatgaaagggatcgtcttctagacacccttcgggagacccaggaaagcctctcacttgcccagcaaagacttcaggatgtcatctatgaccgagactcactccagagacagctcaattcagccctgccacaggatatcgaatccctaacaggagggctggctggttctaagggggctgatccaccggaatttgctgcactgacaaaagaattaaatgcctgcagggaacaacttctagaaaaggaagaagaaatctctgaacttaaagctgaaagaaacaacacaagactattactggagcatttggagtgccttgtgtcacgacatgaaagatcactaagaatgacggtggtaaaacggcaagcccagtctccctcaggagtatccagtgaagttgaagttctcaaggcactgaaatctttgtttgagcaccacaaggccttggatgaaaaggtaagggagcgactgagggtttctttagaaagagtctctgcactggaagaagaactagctgctgctaatcaggagattgttgccttgcgtgaacaaaatgttcatatacaaagaaaaatggcatcaagcgagggatccacagagtcagaacatcttgaagggatggaacctggacagaaagtccatgagaagcgtttgtccaatggttctatagactcaaccgatgaaactagtcaaatagttgaactacaagaattgcttgaaaagcaaaactatgaaatggcccagatgaaagaacgtttagcagccctttcttcccgagtgggagaggtggaacaggaagcagagacagcaagaaaggatctcattaaaacagaagaaatgaacaccaagtatcaaagggacattagggaggccatggcacaaaaggaagatatggaagaaagaattacaacccttgaaaagcgttacctcagtgctcagagagaatctacctccatacatgacatgaatgataaactagaaaatgagttagcaaataaagaagctatcctgcggcagatggaagagaaaaacagacagttacaagaacgtcttgagctagctgaacaaaagttgcagcagaccatgagaaaggctgaaaccttgcctgaagtagaggctgaactggctcagagaattgcagccctaaccaaggctgaagagagacatggaaatattgaagaacgtatgagacatttagagggtcaacttgaagagaagaatcaagaacttcaaagagctaggcaaagagagaaaatgaatgaggagcataacaagagattatcggatacggttgatagacttctgactgaatccaatgaacgcctacaactacacttaaaggaaagaatggctgctctagaagaaaagaatgttttaattcaagaatcagaaactttcagaaagaatcttgaagaatctttacatgataaggaaagattagcagaagaaattgaaaagctgagatctgaacttgaccaattgaaaatgagaactggctctttaattgaacccacaataccaagaactcatctagacacctcagctgagttgcggtactcagtgggatccctagtggacagccagtctgattacagaacaactaaagtaataagaagaccaaggagaggccgcatgggtgtgcgaagagatgagccaaaggtgaaatctcttggggatcacgagtggaatagaactcaacagattggagtactaagcagccacccttttgaaagtgacactgaaatgtctgatattgatgatgatgacagagaaacaatttttagctcaatggatcttctctctccaagtggtcattccgatgcccagacgctagccatgatgcttcaggaacaattggatgccatcaacaaagaaatcaggctaattcaggaagaaaaagaatctacagagttgcgtgctgaagaaattgaaaatagagtggctagtgtgagcctcgaaggcctgaatttggcaagggtccacccaggtacctccattactgcctctgttacagcttcatcgctggccagttcatctccccccagtggacactcaactccaaagctcacccctcgaagccctgccagggaaatggatcggatgggagtcatgacactgccaagtgatctgaggaaacatcggagaaagattgcagttgtggaagaagatggtcgagaggacaaagcaacaattaaatgtgaaacttctcctcctcctacccctagagccctcagaatgactcacactctcccttcttcctaccacaatgatgctcgaagtagtttatctgtctctcttgagccagaaagcctcgggcttggtagtgccaacagcagccaagactctcttcacaaagcccccaagaagaaaggaatcaagtcttcaataggacgtttgtttggtaaaaaagaaaaagctcgacttgggcagctccgaggctttatggagactgaagctgcagctcaggagtccctggggttaggcaaactcggaactcaagctgagaaggatcgaagactaaagaaaaagcatgaacttcttgaagaagctcggagaaagggattaccttttgcccagtgggatgggccaactgtggtcgcatggctagagctttggttgggaatgcctgcgtggtacgtggcagcctgccgagccaacgtgaagagtggtgccatcatgtctgctttatctgacactgagatccagagagaaattggaatcagcaatccactgcatcgcttaaaacttcgattagcaatccaggagatggtttccctaacaagtccttcagctcctccaacatctcgaactccttcaggcaacgtttgggtgactcatgaagaaatggaaaatcttgcagctccagcaaaaacgaaagaatctgaggaaggaagctgggcccagtgtccggtttttctacagaccctggcttatggagatatgaatcatgagtggattggaaatgaatggcttcccagcttggggttacctcagtacagaagttactttatggaatgcttggtagatgcaagaatgttagatcacctaacaaaaaaagatctccgtgtccatttaaaaatggtggatagtttccatcgaacaagtttacaatatggaattatgtgcttaaagaggttgaattatgacagaaaagaactagaaagaagacgggaagcaagccaacatgaaataaaagacgtgttggtgtggagcaatgaccgagttattcgctggatacaagcaattggacttcgagaatatgcaaataatatacttgagagcggtgtgcatggctcacttatagccctggatgaaaactttgactacagcagcttagctttattattacagattccaacacagaacacccaggcaaggcagattcttgaaagagaatacaataacctcttggccctgggaactgaaaggcgactggatgaaagtgatgacaagaacttcagacgtggatcaacctggagaaggcagtttcctcctcgtgaagtacatggaatcagcatgatgcctgggtcctcagaaacattaccagctggatttaggttaaccacaacctctgggcagtcaagaaaaatgacaacagatgttgcttcatcaagactgcagaggttagacaactccactgttcgcacatactcatgttgaccagccactcaaaggaggcagcactgacctgctatggcgtcttttcagtctactctacctaaagtgcactaccatctaagaagacgagcagtgaaaacctttgtgaaaactgaattc

SEQ ID NO: 2997 - protein, 1257 aa, Homo sapiens
MMCEVMPTINEDTPMSQRGSQSSGSDSDSHFEQLMVNMLDERDRLLDTLRETQESLSLAQQRLQDVIYDRDSLQRQLNSALPQDIESLTGGLAGSKGADPPEFAALTKELNACREQLLEKEEEISELKAERNNTRLLLEHLECLVSRHERSLRMTVVKRQAQSPSGVSSEVEVLKALKSLFEHHKALDEKVRERLRVSLERVSALEEELAAANQEIVALREQNVHIQRKMASSEGSTESEHLEGMEPGQKVHEKRLSNGSIDSTDETSQIVELQELLEKQNYEMAQMKERLAALSSRVGEVEQEAETARKDLIKTEEMNTKYQRDIREAMAQKEDMEERITTLEKRYLSAQRESTSIHDMNDKLENELANKEAILRQMEEKNRQLQERLELAEQKLQQTMRKAETLPEVEAELAQRIAALTKAEERHGNIEERMRHLEGQLEEKNQELQRARQREKMNEEHNKRLSDTVDRLLTESNERLQLHLKERMAALEEKNVLIQESETFRKNLEESLHDKERLAEEIEKLRSELDQLKMRTGSLIEPTIPRTHLDTSAELRYSVGSLVDSQSDYRTTKVIRRPRRGRMGVRRDEPKVKSLGDHEWNRTQQIGVLSSHPFESDTEMSDIDDDDRETIFSSMDLLSPSGHSDAQTLAMMLQEQLDAINKEIRLIQEEKESTELRAEEIENRVASVSLEGLNLARVHPGTSITASVTASSLASSSPPSGHSTPKLTPRSPAREMDRMGVMTLPSDLRKHRRKIAVVEEDGREDKATIKCETSPPPTPRALRMTHTLPSSYHNDARSSLSVSLEPESLGLGSANSSQDSLHKAPKKKGIKSSIGRLFGKKEKARLGQLRGFMETEAAAQESLGLGKLGTQAEKDRRLKKKHELLEEARRKGLPFAQWDGPTVVAWLELWLGMPAWYVAACRANVKSGAIMSALSDTEIQREIGISNPLHRLKLRLAIQEMVSLTSPSAPPTSRTPSGNVWVTHEEMENLAAPAKTKESEEGSWAQCPVFLQTLAYGDMNHEWIGNEWLPSLGLPQYRSYFMECLVDARMLDHLTKKDLRVHLKMVDSFHRTSLQYGIMCLKRLNYDRKELERRREASQHEIKDVLVWSNDRVIRWIQAIGLREYANNILESGVHGSLIALDENFDYSSLALLLQIPTQNTQARQILEREYNNLLALGTERRLDESDDKNFRRGSTWRRQFPPREVHGISMMPGSSETLPAGFRLTTTSGQSRKMTTDVASSRLQRLDNSTVRTYSC

SEQ ID NO: 2998 - DNA, 4855 bp, Homo sapiens
ccagagcccggcttggtccggtccctctgcccccatcccgcacccttccacctcctccgagtcccactcctcacctaggacgccccaaactgccatgggttagggtggggatcgcgacccgcgcgaaagaccagccctgcgcttccgccgggggacgcggagcccaaacgccgctcaccgcttgcgggcgccgggcatggggagtgtggtgtgagcccgcacccggggaggacgcaggagctgcggagacgggcgcgaggaggaggagaggagtcgtggattggaaggacccgagggagggagggtggggaagcgagggaaaagtgaagctgggaggagaaggcggcggaaggtggagattgatgcttctgttttttgttgccgctgctgccctcgcgctgggagccgagccggagggaaggcggtggagagatgattgcagagttggtgagcagcgctctggggctcgccttgtatctcaacaccctgagtgcggatttctgctatgatgacagccgtgctatcaagactaatcaggaccttctcccagaaactccatggacgcacattttctacaatgatttttgggggactcttctaacccacagtggcagccacaagtcctaccggccactctgcactctttcttttcgcctgaaccatgccattggagggttgaatccctggagctaccatcttgtcaatgtcctgttgcatgcagcagtcactggtctcttcacaagcttctccaagatcctccttggtgatggatactggacattcatggctggcttgatgtttgcttctcaccccattcacacggaggcagtggcaggaatcgtgggacgagccgatgtcggggccagtctcttctttctcctctccttgctctgctacattaaacactgttctacaagaggctactcagccagaacctggggctggttcctggggtcaggactgtgcgcaggatgcagcatgttgtggaaggaacaaggagtgactgttctcgcagtttcagcagtttatgatgtctttgtctttcacaggctgaaaataaaacagatattacctaccatttacaaaaggaagaacttgtcgcttttcctaagcattagtttgttaattttctggggttcctcccttttgggtgcccggttatactggatgggaaacaaaccaccaagcttttccaactcggacaaccccgctgctgattcggacagcctcctcacccgcactctcaccttcttctacttgccaaccaagaacctctggctgttgctatgtccagataccctcagttttgattggtcaatggatgctgtgcctctgctcaaaacagtttgtgactggagaaacctacacactgtggccttctatactggactccttctccttgcctactatggtttgaagagcccgagcgtagacagagaatgcaatgggaaaactgtaacaaatggcaagcagaatgcaaatggacatagctgcctttcagatgtggagtaccagaactcagagactaagtccagctttgcatccaaagtagaaaatggcattaaaaacgatgtatcacagagaacccagcttccttctacggagaacattgttgttctgtctttatctttgttaatcataccctttgttcctgccacgaacctgtttttctatgtcggctttgtaattgcagagcgagtattatatattcctagtatgggcttctgcctactgattacagtgggtgctagagccctttatgtcaaagtccaaaagcggttcctcaagagcttgattttttatgctacagctacactaattgttttttatggactcaagactgcgatcaggaatggagactggcagaatgaggaaatgctttatagatcagggataaaagtaaacccagctaaagcatggggtaaccttggaaatgttctgaagagtcagagcaaaatttctgaagctgaaagcgcctatagaaatgctttgtactaccgcagcaacatggctgacatgctttataatttagggctacttctccaggagaacagcaggtttgcagaagcactacattattataaattggccattgggagcaggcctaccctggcttctgcatatttaaataccggtattattctaatgaaccaaggaaggacggaagaagcccgacggacattcttaaagtgttcggagatcccagatgaaaacctaaaggaccctcatgcacacaagagctctgttaccagttgtttgtacaacctaggaaagctgtatcatgagcagggacactatgaggaagcccttagtgtatacaaggaagcaattcagaaaatgccaaggcagtttgccccacagagcttgtacaacatgatgggtgaagcatatatgcgtttaagcaaactccccgaagcagagcattggtatatggaatcactgagatccaagactgaccacatccctgctcatctcacctatgggaagctgctagctctaacaggtcgtaagagtgaggctgaaaagctcttcttgaaggctattgagctggatcccaccaaaggaaactgttacatgcattatggtcagtttcttctggaagaagctcgtctcatagaagcagctgagatggcaaaaaaagcagctgaactagacagcacagagtttgatgttgtcttcaatgctgcccacatgctcagacaggctagcctcaatgaagcagctgagaagtattatgatctggcagccaggctgaggcctaattatccggctgctttgatgaacctgggagccattctgcacctcaatggcagactccagaaggccgaggccaactacctgcgggccctgcagctcaagccagacgatgtcatcacacagtccaatctccgcaaactgtggaacatcatggaaaaacaaggcttaaagacttctaagacctgacacaggaggcagaagcccatcctcctccatttttaaaagctggcttccttagcagacagaacttcccagcagtgctatgacaagagctggtgttagacttcaagaccagggcagaggtcattgaggtcactaccgcttctggaagaatccactttgctgtaggcacagctgttaacaccaaaaaggggaaagccggaaacctcctggaggatgtcattgttacccatagactgtaaaccagagcacttaaaacagaaccttttggcattcttaaaaagggaggggtgggtgtgtaagtcacagattttgttcattttctgaaagctaatttcaaaattatgttgttccttaaacactgtgagaggaagtcagagtgtccattcaggcatggcaaacaattagggttaagtgttacgagggagtgataaacacgtagtgtgagtcccagtgagccgccggttgtcctaacgctgctgtcttccctgtttgggacagcctgcttatcaatttctgaagcttagaacactttttttaatactgtgtcaagatctgtcagaatctgctatgtttcttgaccagtgcacataatgttttatgatttggatgtcagaggcttcattcttttggacatcatttgctttttatgttctgaaaaggatatggagagtagagctaaccatacttcacactcgagttgtatgagggactggggaggccttatatgtgtcaggcaggcattttttaaattttaatatcgtcaatattttcccccaaactgcccagtagaattcattgtattaattcttttgaaattacctttgaaaatagctattcctggagaatgtgcaagcttacataaggataaaggacaggggaggagtttgtaagccttgcagttccaataactaaccaacaggttattagacaaaagggaaggtgttttgtgcttctcagatgttgctggtttaggagtgtgtgatgatgcttgccagtgattttgtgttttggaaagggtaggtatcgaatgttaatcactttctaatgggtacctaaacagcaatgctgataaatgttcaaggaattattttcatcttagtttgttcttctcaaaaggcatcaaaaacaacttatttgaagctgcaatagagtgtagcattagcctgcatgtttctaggtcttctgccaagtgcttttctcagttgaaaactatttttcactagcaaaattggtattttatttcattacctgttagtaactacttcaatgatcatttcacaagaaaaagactataaattaagtagagaacaacatttttattgaacatttttggcttgcaatcaaactttgccactaaaaattaacttcataaaacactagtccgttatcaacttcttcacagagaaagtagctatactataccctacatatttatttatttattattctactatagcagaataacaaaacttgatgcattaagccagttctttgcaactgaaaattacctgtttctccttccctttcacactccatgtatatatgatcagcctctccattaaaaagaagctggacatgcaaatacatcatattatgttttctccatattttatgtttttctatgtatctgaatacagtgggataaataattgaaagtagtgttcctatggcattagtgtttttgtgagaagggtaaatgtagtgagaaaggttttttcatggcattaataagaaagcccttctgtaatatatatattattttgtaaacatttcactgaagggccaaaagttaaattataactaaatcactgtgttttcagaatgatatttaacaacaaacccgtggtcaaaccaaaatagtgggttgaagtgtattattcatcttttagtgcattggcaaaaaaaaaaaaaaaaa

SEQ ID NO: 2999 - protein, 836 aa, Homo sapiens
MIAELVSSALGLALYLNTLSADFCYDDSRAIKTNQDLLPETPWTHIFYNDFWGTLLTHSGSHKSYRPLCTLSFRLNHAIGGLNPWSYHLVNVLLHAAVTGLFTSFSKILLGDGYWTFMAGLMFASHPIHTEAVAGIVGRADVGASLFFLLSLLCYIKHCSTRGYSARTWGWFLGSGLCAGCSMLWKEQGVTVLAVSAVYDVFVFHRLKIKQILPTIYKRKNLSLFLSISLLIFWGSSLLGARLYWMGNKPPSFSNSDNPAADSDSLLTRTLTFFYLPTKNLWLLLCPDTLSFDWSMDAVPLLKTVCDWRNLHTVAFYTGLLLLAYYGLKSPSVDRECNGKTVTNGKQNANGHSCLSDVEYQNSETKSSFASKVENGIKNDVSQRTQLPSTENIVVLSLSLLIIPFVPATNLFFYVGFVIAERVLYIPSMGFCLLITVGARALYVKVQKRFLKSLIFYATATLIVFYGLKTAIRNGDWQNEEMLYRSGIKVNPAKAWGNLGNVLKSQSKISEAESAYRNALYYRSNMADMLYNLGLLLQENSRFAEALHYYKLAIGSRPTLASAYLNTGIILMNQGRTEEARRTFLKCSEIPDENLKDPHAHKSSVTSCLYNLGKLYHEQGHYEEALSVYKEAIQKMPRQFAPQSLYNMMGEAYMRLSKLPEAEHWYMESLRSKTDHIPAHLTYGKLLALTGRKSEAEKLFLKAIELDPTKGNCYMHYGQFLLEEARLIEAAEMAKKAAELDSTEFDVVFNAAHMLRQASLNEAAEKYYDLAARLRPNYPAALMNLGAILHLNGRLQKAEANYLRALQLKPDDVITQSNLRKLWNIMEKQGLKTSKT

SEQ ID NO: 3000 - DNA, 3898 bp, Homo sapiens
ctgttccagacttctcagggtttttacagcacaaacaactgcatacggcccgaggggaggctgaaaaggacttgtgtgtggtggttttattgcctgtcatcactttgctggcctcctcccgactggagcctggaggttcacagtggatttctttctgccgaagacaccaaggcactgaggaaggatcccttctccttctgttgactctttctatttttatggtttaagtttatctattcatggggctgaaaagcgtttgcaaatccatcaacggcgaagtgtggcaagccgcccagcgtcacgtcgtcgcctgcctgtggtcaggcattcctcactcccaccaggcagaaggtcaataaaaatggaggcaagctcttctggaatcactaatggaaaaaccaaagtcttccacccagtggccaaggatgtcaatattctttttgatgaattagaagctgtcagcagtccttgcaaagatgacgattctcttcttcaccctggaaacctgactagtacttcagatgatgccagcagattggaagccgggggagagacagtgccagaaagaaacaaatcaaatggactttactttcgagatggaaagtgtcgaattgactacatccttgtgtacagaaaatccaacccccagactgaaaagagagaagtatttgaaagaaacattagagcagaaggattgcaaatggagaaagagtcctctctaataaatagtgacattatctttgtgaagttgcatgccccatgggaagtccttggaagatatgcagaacaaatgaatgtaagaatgcctttcaggagaaaaatctattacctgccccgccgttacaagttcatgagcaggatcgataaacaaataagcaggcttcggagatggttacctaagaagccaatgaggctggacaaggagacactgccggacctggaggagaatgactgctacactgcccctttcagccagcaaaggatccatcacttcatcatacacaacaaagaaacgttcttcaacaatgccacaagaagtagaatcgtgcatcacattttacaaagaataaaatatgaagaaggaaaaaacaagattggtctgaatcgtttgcttaccaatggctcctatgaagctgcgtttcccctgcatgagggaagttatagaagtaaaaactccattcgaacccatggagcagaaaaccaccgacatctactctatgagtgctgggcctcctggggcgtgtggtataaataccaacctttggatcttgtaaggcggtactttggagagaagattgggttatattttgcctggttgggctggtacaccggcatgctcttcccagctgccttcattggattgtttgtctttttgtatggcgtcaccactctggatcacagccaagtcagtaaagaagtctgccaagctacagatatcatcatgtgtcctgtgtgtgataaatactgtccattcatgaggctgtcagacagctgtgtatatgccaaggtaacccacctttttgacaatggagccactgtcttctttgctgttttcatggcagtctgggcaacagttttcctggagttttggaaaagacggcgagcagtaattgcttatgactgggatttgatagactgggaagaagaggaggaagaaatacgaccccagtttgaagccaagtattccaagaaagagcggatgaatccaatttctggaaagccagaaccttatcaagcatttacagataaatgcagcagacttatcgtttctgcatctggaatattttttatgatctgcgtggtgattgctgccgtgttcgggatcgtcatttaccgggtggtgactgtcagcactttcgctgcctttaagtgggcgttaatcaggaataactctcaggttgcaaccacagggactgctgtgtgcatcaacttctgtatcattatgttgctgaatgtgctctatgaaaaagttgccctgcttctgacgaatttagaacagcctcgcacagagtctgagtgggagaacagcttcaccctgaaaatgtttctttttcagtttgtcaatctgaacagctccacattttacatcgcattcttcctcggaagatttacaggacacccaggtgcctacttgaggctgataaacaggtggagactagaagagtgccaccctagtggatgccttattgatctgtgtatgcaaatgggtattataatggtgctaaagcagacctggaataatttcatggaacttggctacccgttaattcagaattggtggactagaagaaaagtacgacaagaacatggacctgaaaggaaaataagtttcccacaatgggaaaaggactataaccttcagccgatgaatgcctatggactcttcgatgaatacttagaaatgattcttcagtttggattcacaactatctttgtggcagcttttcccctagcaccacttctggccttactgaataacataattgaaattcgacttgatgcttacaaatttgtcacacagtggaggagacctttagcttcaagggccaaagacataggaatttggtatggaattcttgaaggcattggaattctctctgttatcacaaatgcatttgtcatagcgataacatctgactttatccctcgcttggtgtatgcttataagtatggaccttgtgcaggccaaggagaagctgggcaaaagtgcatggttggctatgtgaatgccagcttgtctgtatttcgaatttctgactttgagaaccgatctgagcctgaatctgatggcagtgagttctcggggactcctcttaagtactgcagataccgggactaccgtgacccgcctcattcactggtgccctatggctacacactgcagttttggcatgtcctagctgctcgattagcttttatcattgtctttgagcacctcgtgttttgtataaagcacctcatttcatatctgatcccagacctcccaaaagacctaagggatcgaatgagaagagagaagtacttgattcaggagatgatgtatgaagcagaactggaacgtctccagaaggaacgaaaggagaggaagaagaatggaaaagcacaccacaacgagtggccgtgaccataaaatagtccctttccaggccaaggacctgaattctgtttacttcttctggctgtgcaaaagcacactcaagtgaatgactaaaaatgcaaccacagtgcatgttgcagataccggcggccgcaggaggggcagcatccagtagaggactggcgttggagtcacactgctgtgaaatcacgttgcagtccagcgcacaattgctatctatccatagaccattcttgaccaagcaagcatgcacattatgggcagttacattctcaagtttttaaaatcaaggggaacttgtatactgggcctgtttttcagcctgtttgctaccttttttgcattctatcccatgtgaattttacagacactgggctaaaaagggtattcagacacatggacacacattcctagaatgtcatcatatggtcctaattccatgtcaccaacaacacagacaagaccctgtttacaactttttctttccttttttttaattttagacctttctgagaagattattatatatgacatatctatagctatgtgtatggccatagatgtatttctgtgtgtacatatgtatagtcatgtattcctgcatatgtacatacaaatacagagatatataaagtacatagaaattccttacttgtaaatagccaaaaagtactgacatgagtgaattttcacatttaaatagtcatcaatatgaagccatgattaatgcttgtataatgtgatgcaataaaatttaaaataaatttctgcacatggaat

SEQ ID NO: 3001 - protein, 920 aa, Homo sapiens
MEASSSGITNGKTKVFHPVAKDVNILFDELEAVSSPCKDDDSLLHPGNLTSTSDDASRLEAGGETVPERNKSNGLYFRDGKCRIDYILVYRKSNPQTEKREVFERNIRAEGLQMEKESSLINSDIIFVKLHAPWEVLGRYAEQMNVRMPFRRKIYYLPRRYKFMSRIDKQISRLRRWLPKKPMRLDKETLPDLEENDCYTAPFSQQRIHHFIIHNKETFFNNATRSRIVHHILQRIKYEEGKNKIGLNRLLTNGSYEAAFPLHEGSYRSKNSIRTHGAENHRHLLYECWASWGVWYKYQPLDLVRRYFGEKIGLYFAWLGWYTGMLFPAAFIGLFVFLYGVTTLDHSQVSKEVCQATDIIMCPVCDKYCPFMRLSDSCVYAKVTHLFDNGATVFFAVFMAVWATVFLEFWKRRRAVIAYDWDLIDWEEEEEEIRPQFEAKYSKKERMNPISGKPEPYQAFTDKCSRLIVSASGIFFMICVVIAAVFGIVIYRVVTVSTFAAFKWALIRNNSQVATTGTAVCINFCIIMLLNVLYEKVALLLTNLEQPRTESEWENSFTLKMFLFQFVNLNSSTFYIAFFLGRFTGHPGAYLRLINRWRLEECHPSGCLIDLCMQMGIIMVLKQTWNNFMELGYPLIQNWWTRRKVRQEHGPERKISFPQWEKDYNLQPMNAYGLFDEYLEMILQFGFTTIFVAAFPLAPLLALLNNIIEIRLDAYKFVTQWRRPLASRAKDIGIWYGILEGIGILSVITNAFVIAITSDFIPRLVYAYKYGPCAGQGEAGQKCMVGYVNASLSVFRISDFENRSEPESDGSEFSGTPLKYCRYRDYRDPPHSLVPYGYTLQFWHVLAARLAFIIVFEHLVFCIKHLISYLIPDLPKDLRDRMRREKYLIQEMMYEAELERLQKERKERKKNGKAHHNEWP

SEQ ID NO: 3002 - DNA, 3983 bp, Homo sapiens
gtgtagattcgctggaagcagctggaggctccagttctcatctgctcaggtgtccccggcgccttggcgaactcggccactccagttcctcacgtggtgagcactcagggcagcgggtcgattttccgaggtcccatacctgggtttgaggggcgcggctcgcagcggcgggtgcaggggcgactgccagccctcaccccgcctcggggtgcgttcggaggccgacacctggaggacgcctccagtccccgcgggacgccacgcctgcgcgccagggatccgggataagaagtgcgcgccgggctccggctgcgcgccgcggggccaccagtttgcgcgcagggctcaggcgaccgtgcggccatggacacgccacggggcatcggcaccttcgtggtgtgggactacgtggtgttcgcgggcatgctggtcatctcggccgccatcggcatctactacgccttcgctgggggcggccagcagacctccaaggacttcctgatgggcggccgcagaatgaccgcagtgcccgtggcgctgtccctcaccgctagcttcatgtcagccgtcactgtcctgggcaccccctccgaggtctaccgttttggggccatttttagcatctttgccttcacctacttctttgtggtggtcatcagcgcggaggtcttcctcccggtgttctacaaactgggaattaccagcacctacgagtatttagaacttcgatttaacaaatgtgttcgtctctgtggaacagtcctcttcattgttcaaacaattctgtatactggaattgttatttatgcccctgccctggctttgaatcaagtcacaggatttgatctgtggggcgcggtagtggcaacgggggtggtctgcacattctactgcacactgggtggtcttaaagcagttatctggacagatgtttttcaaattgggatcatggtggctggatttgcatccgtgattatacaggctgtggtgatgcaaggtggaatcagcactattttaaatgatgcctatgatggtggaagattaaatttctggaattttaatcctaaccctttgcaaagacacaccttctggacaattattataggagggaccttcacatggaccagcatctacggtgtcaaccaatcccaggtgcagagatatatttcttgtaaaagcagattccaggcaaaactgtctctctacatcaatcttgtgggactctgggcaatcctcacatgctcagtgttttgtgggctcgccctatattccaggtaccatgactgtgatccttggacagccaagaaagtgtctgcaccagaccagctcatgccttatttggtactggacattctgcaagattatccaggacttcctggactttttgtggcctgtgcttacagtgggacattaagcacagtgtcctccagtattaatgccttagcagcagtaactgtggaagatctaatcaaaccttacttcagatcgctctcagaaaggtctctgtcttggatttcccaaggaatgagtgtggtgtatggagccctgtgtattggaatggctgcgctggcgtcacttatgggagctttgttgcaggcagcactcagcgtatttggtatggttggtggaccacttatgggcctgttcgctttgggcattttggttccctttgccaactcaattggagcacttgttggtctgatggctggatttgccatttctctatgggttggaattggagctcaaatatatcctccacttcctgagagaacattgccattgcaccttgatatccaaggctgtaacagcacctacaatgagacaaatttgattacaaccacagaaatgccatttactactagtgtttttcaaatatacaatgttcaaaggactccactgatggataactggtattctttatcatatctgtacttcagcactgttggaactttggtaacattattagtggggatacttgtcagtttatcaacaggaggaagaaaacagaacttagaccccagatatatactaaccaaagaggactttttatccaattttgatatttttaagaaaaagaagcatgttttgagctataaatcacatccagtggaagatggtggaactgataatcctgctttcaaccacattgaattgaactcagatcagagtggcaagagcaatgggactcgtttgtgaagctgctctgatactagatatccttaaatgatgtttcaattttatatgttttctaagataattggatcaggttttctttgtgtgtgtgtgtgtgtgttgtatcatgagtgtttgggggataagtttttgttaaaacaaagtctggactatcttcatttactacatcattaattgatgttactctggagtttagaattctggcattgacatttccctctctttcctttatttcgatgaagctataattgtgaaaattgtaactacatagatgctgaaaggctaatacacacatatgcacatgtatttgattgtcaaaggtatattcttaaatttgggtattattgaaaatattttccatgccttggtgctagcatataagtttggaagtttgccaacatcacaattcatcttgaaaagagcttttttccctcctaccacatacaccattcttagggagcaatgaggtaacaggtctgtgttgtctagatctttgctttttatccccctatcagtccagggcatatactaacctgcaaactgattctgaatcaggaaggtggtaatcaataagtattctggctgggaaagaccgtgggcccaatgatcaaagtcttcttggtgctgttcattaattcttgtgccttttggcttgttttctagagtttctgggctttggctgctgatactgcctttcttagactgtaatttttatctgcatgcccagtttctgacctatcaacttgggttttattgtgcactctaactgagcttgtcttcataattttctgtttattgccctgggcttggatatgtctcaagacactcatgtgaatcatgccaccccaaatcctggcttatcaagtcccagactataaattatgaactcccattagcttggtactaacatatacttgatgtaggtatttatggacttgatgatccaagaatattatattcttcaaaatggttaagctccatggagttagatgactacacttaatgctattaagttgaacttttgaatgtcaactaatttgcaatcaattaaagatacatatgcctagaaattttgaaatttcggtatatttatccagttaaagggctaaattatataagcaaacactactttttttaaaacgtctggactcaaaaaatgctttgttccatgttttaaaatttttaagtagcagtctcaaagttgcttagctgtttattttgctatgttcctagctaagagtttggttataggagttcatcaataacttattttttgtacagttcccacattagatactgtttaaaagttcttttttaaactcaattttttttagaaacataagagaaatatttagatacatacaaatgtttttatgattaaataattttatgcttattttctgatacgtgttatttaggtaatcatgccctgtacatttagaggttgctaactgacaatgttaagaaatttaaaaaaaaaaaaagcctgggcatgatggctcatgcttgtaatctgaacatttgggaggctgaggcaggaagatcgcttgaggtccagagtttaagtccagcctggaaacatagttagacctcatctctacaaaaataaaaaataaaaataaaaaaaacttagctaggcatgttgccacatacttgtagtcccagttattagggaagctgaggtgggaggatagcttaagcccaggatttcaaggctgcattgagctatgattacaccactgcactccagcctgggtaacagagtgaaatcttgtctctgggaaaaaaaa

SEQ ID NO: 3003 - protein, 610 aa, Homo sapiens
MDTPRGIGTFVVWDYVVFAGMLVISAAIGIYYAFAGGGQQTSKDFLMGGRRMTAVPVALSLTASFMSAVTVLGTPSEVYRFGAIFSIFAFTYFFVVVISAEVFLPVFYKLGITSTYEYLELRFNKCVRLCGTVLFIVQTILYTGIVIYAPALALNQVTGFDLWGAVVATGVVCTFYCTLGGLKAVIWTDVFQIGIMVAGFASVIIQAVVMQGGISTILNDAYDGGRLNFWNFNPNPLQRHTFWTIIIGGTFTWTSIYGVNQSQVQRYISCKSRFQAKLSLYINLVGLWAILTCSVFCGLALYSRYHDCDPWTAKKVSAPDQLMPYLVLDILQDYPGLPGLFVACAYSGTLSTVSSSINALAAVTVEDLIKPYFRSLSERSLSWISQGMSVVYGALCIGMAALASLMGALLQAALSVFGMVGGPLMGLFALGILVPFANSIGALVGLMAGFAISLWVGIGAQIYPPLPERTLPLHLDIQGCNSTYNETNLITTTEMPFTTSVFQIYNVQRTPLMDNWYSLSYLYFSTVGTLVTLLVGILVSLSTGGRKQNLDPRYILTKEDFLSNFDIFKKKKHVLSYKSHPVEDGGTDNPAFNHIELNSDQSGKSNGTRL

SEQ ID NO: 3004 - DNA, 8192 bp, Homo sapiens
cccaggggctcaagccgcacgtgagaaagtctgggcatctgggattcggagagtatagcctgtgagccgctttcccctccttactgtcggttgcatcccttcgacactcccgaggccgtcgcgggccactggccctctgcagccatgaagacaaagcccgtttcccacaagaccgagaacacctaccggtttcttacatttgctgaacgactggggaatgttaatattgatattattcaccggattgatagaactgcaagctatgaggaggaggttgaaacctacttttttgagggtctgctgaaatggagagaattaaacctcacagaacacttcggaaaattttacaaagaagttattgacaaatgccaatcattcaatcagttggtgtatcaccaaaacgagatagttcagagtttgaagactcacctgcaagttaagaacagttttgcctatcaaccccttttggatttggttgtacagttggcacgagatctgcagatggatttctacccacactttccagagttttttttgactatcacctcgatcctggagactcaggacacagagttgttagaatgggctttcacctcgttatcatatctttataagtacctgtggagactgatggtgaaggacatgtccagtatatacagcatgtacagcacactcctggctcataaaaaactacatataagaaattttgctgctgaaagttttacttttttgatgagaaaggtctctgataaaaacgcacttttcaatttaatgtttcttgatcttgataaacatccagaaaaagttgaaggtgttggacagttgctctttgaaatgtgcaaaggagttagaaatatgtttcactcctgtacaggccaggcagtgaagctaattttgcgaaagctaggaccagtcactgaaacagaaactcaactaccatggatgttaattggagaaacactcaaaaacatggtcaaatccactgtatcctacatctccaaggaacattttggtacattttttgaatgtttgcaagaatcgctcttggatctacacacaaaagtaacaaaaactaactgttgtgaaagttctgaacagattaaaaggttgttggaaacataccttatacttgtaaaacatggaagtgggacaaagatacccacgcctgctgatgtctgtaaggtgttatctcaaacactgcaagtagccagtctctccacatcttgctgggagaccctcttggatgtaatttctgctttgatcctgggtgaaaatgtttccttgccggagaccctcatcaaagaaaccatagaaaaaatatttgagagcagatttgaaaaacgtttaattttcagtttttctgaagtcatgtttgccatgaagcagtttgagcagctttttctaccaagctttctgtcatatattgtgaattgcttcttaattgatgatgctgtagtcaaagatgaagctctggccattctggccaagctcattctgaacaaagcagcacctcccactgctggctcgatggcaattgaaaagtaccctctggttttctcaccgcagatggtgggattctatataaagcagaagaagactagatccaagggaagaaacgaacagtttccagtattggaccatcttttatctataattaagttacccccaaataaagatactacttacctttcacaatcttgggcagccctcgtggtgttacctcatattagacctcttgagaaagagaaggtgataccactcgtcaccggcttcatagaggcactcttcatgactgttgacaaaggaagctttgggaaaggaaacttatttgttctttgtcaagctgtaaatactctactaagtttggaagaatcttctgaacttcttcatttggttcctgtggaacgtgtgaagaatttagtattaacctttcccctggagccatctgtgttgctgttgactgatctctattatcagagattagccttgtgtggctgcaaagggccactttcccaggaggctttaatggaattatttcccaagttacaagcaaacatttcaactggtgtatccaagattcggcttttgacaataaggatcctaaaccattttgatgtccagcttccagaatcaatggaggatgatgggctctcagagcggcagtctgtctttgctatattacgccaggcagaacttgttccagcaactgtgaatgattatagagagaagcttcttcatttgagaaaactaagacatgatgtggtacagactgctgtccctgatgggccgttacaggaggtgccgcttcgttatttgttaggcatgctatatattaatttcagtgcactctgggatcctgttattgaactcataagttctcatgcacacgaaatggaaaataagcaattttggaaagtctactatgagcatctagaaaaagcagctacgcatgctgagaaggaactacagaatgatatgacagatgagaagtccgttggagatgaaagttgggagcagacccaggaaggagatgttggagctctttatcatgagcagttagcattgaaaactgactgtcaggaaagacttgaccacaccaacttcagattcctgctctggagagctctgaccaaattcccagaaagagtagagccacggtccagggagctttccccgcttttcttgagatttatcaacaatgagtattacccagcagatctgcaagttgctccaacccaggatctacggagaaaaggcaaagggatggtggcagaggaaatcgaagaggaacctgccgcaggagatgatgaagagttggaggaagaggcagtgccccaagatgaatcctcacagaagaaaaagacgaggagagctgcagcaaagcaattaattgctcatttgcaagttttctctaaattttcaaatccacgggccttatatctggaatccaaactatatgagttatatcttcagttgttgctacaccaagatcaaatggtgcaaaaaataaccttggattgcataatgacatataaacatcctcatgtcctcccttacagggaaaacttacaaaggttgcttgaagacagaagctttaaggaagagatagtgcattttagcatttcagaagataatgctgtagtgaaaacagcccaccgagcagatctatttcctattctgatgagaattttgtatgggcgaatgaagaataagactgggagtaaaactcaggggaaatctgcttcaggcacccgcatggccattgtcctgcggttcctggccgggacccaacctgaggagatccagatattcttagacctgctgtttgaacctgtgaggcatttcaagaatggagagtgccattctgcagtcattcaagcagtagaagacttggatttgtctaaagttcttcctttaggtcgtcagcacggtatcttaaacagccttgagatagtattgaaaaacattagtcatctgatcagcgcatacctgccgaagattttgcagatactgctctgtatgacagcaaccgtatcacacatccttgaccaacgagaaaagatacagctgagatttattaatccattgaaaaatttaagacgtcttggaatcaaaatggtaactgatatctttttggactgggaatcatatcagtttagaacagaagaaattgatgctgtgtttcatggtgcagtttggccccagatcagcaggcttggatctgagagtcaatattctcctactcctctgctgaaactgatcagtatctggagcagaaacgcaagatatttccctttgctggctaaacagaagcctgggcacccagaatgtgatatcctgaccaatgtttttgcaattctctcagcgaagaatctttctgatgccacagccagtattgtaatggacatagttgatgaccttcttaaccttccagatttcgagcctacagaaacagttttgaacttgctggtaactggatgtgtataccctggcatagcagaaaacatcggtgagtctatcacaataggaggaagattaattctacctcatgtacctgcaattcttcagtatctcagcaaaaccacaataagcgcagaaaaggtgaaaaagaaaaagaatagagcacaagtcagtaaagagcttggcattctttcaaagatcagcaagtttatgaaagacaaagaacaaagttctgtactcattacgcttctccttccattcctccaccgtggcaatattgctgaggatacagaggttgatattctggtgacagtacaaaacttgttaaagcattgtgtggaccctacaagcttcctcaagcctatagcaaaacttttctcagttattaagaacaaattgtcaagaaaattgctttgtacggtttttgagactctttctgattttgagagtgggttaaaatatattactgatgttgtcaagcttaacgccttcgatcaaagacatcttgatgatatcaacttcgacgttcgctttgagactttccagaccatcacctcttacattaaagaaatgcaaattgtggatgttaactacctaattccagttatgcataattgtttctataatctagagttaggagatatgagtttaagtgataatgccagcatgtgcctgatgagtatcatcaaaaagctacctgccttgaatgtcacagagaaagactatagagaaatcatccaccgttcactcctggagaaattgagaaaaggtctgaagagccagacagagagtattcagcaggattataccacaatactttcctgtttaattcaaacctttccaaaccaactggaattcaaagacttggtacaacttactcattaccatgacccagaaatggacttctttgagaacatgaagcacattcagatccacagaagagcaagagccttgaagaaacttgcaaaacaactaatggaaggcaaagttgttctgtcttctaaatctcttcagaattacatcatgccttatgccatgactccaatttttgatgagaaaatgctcaagcatgaaaatataaccactgctgccacagagattattggagccatttgcaaacatctctcttggtcagcgtatatgtattacttgaaacatttcattcatgtcttacaaacgggacagatcaatcaaaaactgggtgtcagtttgctagtaatagtgttagaagcattccactttgaccacaaaactcttgaagaacaaatgggaaaaattgagaatgaagaaaacgcaattgaagcaattgagttaccagagcctgaggccatggaattagagcgtgtggatgaggaagagaaggaatatacatgcaagagtttgtcagacaacggacaaccgggaacccctgatccagctgactctggaggaacatcagctaaagaatccgagtgtatcacaaagcctgtctctttccttcctcaaaacaaggaagaaatagagagaacaattaaaaatatccaaggaaccataaccggggatattctccccaggctacataaatgccttgcatctacgactaaaagggaagaagaacacaagcttgtcaagtcaaaggttgtgaatgatgaggaagtcgttcgagttccattagcttttgccatggttaaactaatgcagtcccttccacaagaagttatggaagctaatctgccaagtattttgctgaaagtgtgtgccctactcaagaacagagcccaagaaatcagagacattgcacgcagcactcttgcgaaaataatagaggatcttggtgtgcacttcctccaatatgttttaaaagaattacagactactcttgtccgtggataccaggtccatgtgctgactttcaccgttcacatgctgctgcaaggcctcaccaataagctgcaggtcggagatctggactcttgtttagatataatgattgagatttttaaccatgagttgtttggtgctgttgctgaagagaaggaagtaaagcagatcctctccaaagtcatggaagcacgaagaagcaaaagttacgactcttatgaaatcctcggcaagtttgtaggaaaagatcaggttacaaaactcatccttccattaaaagagatcttacaaaataccacgagtttgaaactggcccggaaagttcatgaaactttacgccgaatcacagtgggattaattgtaaatcaggaaatgacagctgaatccattctattactcagttatggtttgatcagtgaaaatcttcccctgttaacagagaaagaaaaaaatccagtagccccagcaccagatccacgtctaccaccccagagctgccttctgcttcccccaactccagttcgaggtggacagaaagctgttgtgagcaggaaaaccaacatgcacatatttattgagtccgggcttcggctgctgcatctgagtctgaagacttccaagatcaagtcttcaggtgaatgtgtcctggaaatgctggatccttttgtgtctctcctcatagactgcctgggctccatggatgtgaaggtgatcacaggtgctttacagtgcctcatctgggtcttgaggttcccgctaccttccatagaaacaaaagcagagcagctgacaaaacacctcttccttctgctgaaggactatgcaaagctcggggccgccaggggccagaacttccaccttgtggtcaattgtttcaagtgtgtgaccatacttgtcaagaaagtcaagtcttaccagataactgaaaaacagctccaagttctactggcctatgctgaggaggacatttatgatacttcaagacaagccactgcctttggtcttctgaaggcaattttatcaagaaagctgttggtcccagaaatcgatgaggtcatgcggaaagtatccaagttggcagtctctgcacaaagcgaacctgccagggtccagtgtagacaggtttttctgaaatatattcttgactatcccctgggtgacaaattgagaccaaacttggaattcatgctcgctcaactgaattacgaacatgagaccgggagagagtccaccttggaaatgatcgcctatctctttgacacgttccctcaggggctgctccatgagaactgcggaatgttctttatccctctttgtctaatgacgatcaatgatgactctgccacgtgcaaaaagatggcatccatgacaatcaagtccctacttggtaaaatcagcctcgagaaaaaagattggctgtttgatatggttaccacttggtttggagcaaaaaagcgcttaaatagacaacttgctgccctgatctgtggcttgtttgtggaaagtgaaggagttgattttgagaaaagacttggaactgtccttcctgtgattgaaaaggaaattgatcctgaaaactttaaagatatcatggaagaaactgaagaaaaagctgcagatcgccttctgtttagttttcttacactgataactaaacttatcaaggaatgtaatattattcagtttaccaaacccgctgagactttgagtaaaatctggagtcatgtgcattctcacctgagacatccacacaactgggtgtggctcacagcagcccagatttttggattactctttgcctcttgccagccagaggagcttattcaaaaatggaataccaaaaagaccaaaaaacacctcccagaacctgtagcaatcaagttcctagccagtgaccttgaccaaaagatgaaaagtatctctctcgcctcttgccatcaattgcattccaaattcttggatcagtctctaggagaacaggttgttaagaatttgttgttcgcagccaaagtcttgtatttactggaactttattgtgaggataagcaaagtaagataaaagaagacctggaagaacaagaagctttagaagatggtgtggcctgtgcagatgagaaggcggagtctgacggagaagagaaggaagaggtgaaggaagagctcggcaggccggccacgctgctgtggttgatccagaagctgtcccggattgcaaaactggaagctgcttattcgccgagaaaccccttaaagagaacatgcatctttaagttcctcggcgccgtagcaatggatcttgggatagacaaggtaaagccgtatctcccaatgatcatagctcctttgtttcgggaactcaacagcacctattc

SEQ ID NO: 3005 - protein, 2785 aa, Homo sapiens
MKTKPVSHKTENTYRFLTFAERLGNVNIDIIHRIDRTASYEEEVETYFFEGLLKWRELNLTEHFGKFYKEVIDKCQSFNQLVYHQNEIVQSLKTHLQVKNSFAYQPLLDLVVQLARDLQMDFYPHFPEFFLTITSILETQDTELLEWAFTSLSYLYKYLWRLMVKDMSSIYSMYSTLLAHKKLHIRNFAAESFTFLMRKVSDKNALFNLMFLDLDKHPEKVEGVGQLLFEMCKGVRNMFHSCTGQAVKLILRKLGPVTETETQLPWMLIGETLKNMVKSTVSYISKEHFGTFFECLQESLLDLHTKVTKTNCCESSEQIKRLLETYLILVKHGSGTKIPTPADVCKVLSQTLQVASLSTSCWETLLDVISALILGENVSLPETLIKETIEKIFESRFEKRLIFSFSEVMFAMKQFEQLFLPSFLSYIVNCFLIDDAVVKDEALAILAKLILNKAAPPTAGSMAIEKYPLVFSPQMVGFYIKQKKTRSKGRNEQFPVLDHLLSIIKLPPNKDTTYLSQSWAALVVLPHIRPLEKEKVIPLVTGFIEALFMTVDKGSFGKGNLFVLCQAVNTLLSLEESSELLHLVPVERVKNLVLTFPLEPSVLLLTDLYYQRLALCGCKGPLSQEALMELFPKLQANISTGVSKIRLLTIRILNHFDVQLPESMEDDGLSERQSVFAILRQAELVPATVNDYREKLLHLRKLRHDVVQTAVPDGPLQEVPLRYLLGMLYINFSALWDPVIELISSHAHEMENKQFWKVYYEHLEKAATHAEKELQNDMTDEKSVGDESWEQTQEGDVGALYHEQLALKTDCQERLDHTNFRFLLWRALTKFPERVEPRSRELSPLFLRFINNEYYPADLQVAPTQDLRRKGKGMVAEEIEEEPAAGDDEELEEEAVPQDESSQKKKTRRAAAKQLIAHLQVFSKFSNPRALYLESKLYELYLQLLLHQDQMVQKITLDCIMTYKHPHVLPYRENLQRLLEDRSFKEEIVHFSISEDNAVVKTAHRADLFPILMRILYGRMKNKTGSKTQGKSASGTRMAIVLRFLAGTQPEEIQIFLDLLFEPVRHFKNGECHSAVIQAVEDLDLSKVLPLGRQHGILNSLEIVLKNISHLISAYLPKILQILLCMTATVSHILDQREKIQLRFINPLKNLRRLGIKMVTDIFLDWESYQFRTEEIDAVFHGAVWPQISRLGSESQYSPTPLLKLISIWSRNARYFPLLAKQKPGHPECDILTNVFAILSAKNLSDATASIVMDIVDDLLNLPDFEPTETVLNLLVTGCVYPGIAENIGESITIGGRLILPHVPAILQYLSKTTISAEKVKKKKNRAQVSKELGILSKISKFMKDKEQSSVLITLLLPFLHRGNIAEDTEVDILVTVQNLLKHCVDPTSFLKPIAKLFSVIKNKLSRKLLCTVFETLSDFESGLKYITDVVKLNAFDQRHLDDINFDVRFETFQTITSYIKEMQIVDVNYLIPVMHNCFYNLELGDMSLSDNASMCLMSIIKKLPALNVTEKDYREIIHRSLLEKLRKGLKSQTESIQQDYTTILSCLIQTFPNQLEFKDLVQLTHYHDPEMDFFENMKHIQIHRRARALKKLAKQLMEGKVVLSSKSLQNYIMPYAMTPIFDEKMLKHENITTAATEIIGAICKHLSWSAYMYYLKHFIHVLQTGQINQKLGVSLLVIVLEAFHFDHKTLEEQMGKIENEENAIEAIELPEPEAMELERVDEEEKEYTCKSLSDNGQPGTPDPADSGGTSAKESECITKPVSFLPQNKEEIERTIKNIQGTITGDILPRLHKCLASTTKREEEHKLVKSKVVNDEEVVRVPLAFAMVKLMQSLPQEVMEANLPSILLKVCALLKNRAQEIRDIARSTLAKIIEDLGVHFLQYVLKELQTTLVRGYQVHVLTFTVHMLLQGLTNKLQVGDLDSCLDIMIEIFNHELFGAVAEEKEVKQILSKVMEARRSKSYDSYEILGKFVGKDQVTKLILPLKEILQNTTSLKLARKVHETLRRITVGLIVNQEMTAESILLLSYGLISENLPLLTEKEKNPVAPAPDPRLPPQSCLLLPPTPVRGGQKAVVSRKTNMHIFIESGLRLLHLSLKTSKIKSSGECVLEMLDPFVSLLIDCLGSMDVKVITGALQCLIWVLRFPLPSIETKAEQLTKHLFLLLKDYAKLGAARGQNFHLVVNCFKCVTILVKKVKSYQITEKQLQVLLAYAEEDIYDTSRQATAFGLLKAILSRKLLVPEIDEVMRKVSKLAVSAQSEPARVQCRQVFLKYILDYPLGDKLRPNLEFMLAQLNYEHETGRESTLEMIAYLFDTFPQGLLHENCGMFFIPLCLMTINDDSATCKKMASMTIKSLLGKISLEKKDWLFDMVTTWFGAKKRLNRQLAALICGLFVESEGVDFEKRLGTVLPVIEKEIDPENFKDIMEETEEKAADRLLFSFLTLITKLIKECNIIQFTKPAETLSKIWSHVHSHLRHPHNWVWLTAAQIFGLLFASCQPEELIQKWNTKKTKKHLPEPVAIKFLASDLDQKMKSISLASCHQLHSKFLDQSLGEQVVKNLLFAAKVLYLLELYCEDKQSKIKEDLEEQEALEDGVACADEKAESDGEEKEEVKEELGRPATLLWLIQKLSRIAKLEAAYSPRNPLKRTCIFKFLGAVAMDLGIDKVKPYLPMIIAPLFRELNSTYSEQDPLLKNLSQEIIELLKKLVGLESFSLAFASVQKQANEKRALRKKRKALEFVTNPDIAAKKKMKKHKNKSEAKKRKIEFLRPGYKAKRQKSHSLKDLAMVE

SEQ ID NO: 3006 - DNA, 1575 bp, Homo sapiens
tcccttctgaggaaacgaaaccaacagcagtccaagctcagtcagcagaagagataaaagcaaacaggtctgggaggcagttctgttgccactctctctcctgtcaatgatggatctcagaaataccccagccaaatctctggacaagttcattgaagactatctcttgccagacacgtgtttccgcatgcaaatcaaccatgccattgacatcatctgtgggttcctgaaggaaaggtgcttccgaggtagctcctaccctgtgtgtgtgtccaaggtggtaaagggtggctcctcaggcaagggcaccaccctcagaggccgatctgacgctgacctggttgtcttcctcagtcctctcaccacttttcaggatcagttaaatcgccggggagagttcatccaggaaattaggagacagctggaagcctgtcaaagagagagagcattttccgtgaagtttgaggtccaggctccacgctggggcaacccccgtgcgctcagcttcgtactgagttcgctccagctcggggagggggtggagttcgatgtgctgcctgcctttgatgccctgggtcagttgactggcggctataaacctaacccccaaatctatgtcaagctcatcgaggagtgcaccgacctgcagaaagagggcgagttctccacctgcttcacagaactacagagagacttcctgaagcagcgccccaccaagctcaagagcctcatccgcctagtcaagcactggtaccaaaattgtaagaagaagcttgggaagctgccacctcagtatgccctggagctcctgacggtctatgcttgggagcgagggagcatgaaaacacatttcaacacagcccagggatttcggacggtcttggaattagtcataaactaccagcaactctgcatctactggacaaagtattatgactttaaaaaccccattattgaaaagtacctgagaaggcagctcacgaaacccaggcctgtgatcctggacccggcggaccctacaggaaacttgggtggtggagacccaaagggttggaggcagctggcacaagaggctgaggcctggctgaattacccatgctttaagaattgggatgggtccccagtgagctcctggattctgctgacccagcacactccaggcagcatccaccccacaggcagaagaggactggacctgcaccatcctctgaatgccagtgcatcttgggggaaagggctccagtgttatctggaccagttccttcattttcaggtgggactcttgatccagagaggacaaagctcctcagtgagctggtgtataatccaggacagaacccaggtctcctgactcctggccttctatgccctctatcctatcatagataacattctccacagcctcacttcattccacctattctctgaaaatattccctgagagagaacagagagatttagataagagaatgaaattccagccttgactttcttctgtgcacctgatgggagggtaatgtctaatgtattatcaataacaataaaaataaagcaaataccatttaaaaaaaaaaa

SEQ ID NO: 3007 - protein, 414 aa, Homo sapiens
MMDLRNTPAKSLDKFIEDYLLPDTCFRMQINHAIDIICGFLKERCFRGSSYPVCVSKVVKGGSSGKGTTLRGRSDADLVVFLSPLTTFQDQLNRRGEFIQEIRRQLEACQRERAFSVKFEVQAPRWGNPRALSFVLSSLQLGEGVEFDVLPAFDALGQLTGGYKPNPQIYVKLIEECTDLQKEGEFSTCFTELQRDFLKQRPTKLKSLIRLVKHWYQNCKKKLGKLPPQYALELLTVYAWERGSMKTHFNTAQGFRTVLELVINYQQLCIYWTKYYDFKNPIIEKYLRRQLTKPRPVILDPADPTGNLGGGDPKGWRQLAQEAEAWLNYPCFKNWDGSPVSSWILLTQHTPGSIHPTGRRGLDLHHPLNASASWGKGLQCYLDQFLHFQVGLLIQRGQSSSVSWCIIQDRTQVS

SEQ ID NO: 3008 - DNA, 1470 bp, Homo sapiens
tcccttctgaggaaacgaaaccaacagcagtccaagctcagtcagcagaagagataaaagcaaacaggtctgggaggcagttctgttgccactctctctcctgtcaatgatggatctcagaaataccccagccaaatctctggacaagttcattgaagactatctcttgccagacacgtgtttccgcatgcaaatcaaccatgccattgacatcatctgtgggttcctgaaggaaaggtgcttccgaggtagctcctaccctgtgtgtgtgtccaaggtggtaaagggtggctcctcaggcaagggcaccaccctcagaggccgatctgacgctgacctggttgtcttcctcagtcctctcaccacttttcaggatcagttaaatcgccggggagagttcatccaggaaattaggagacagctggaagcctgtcaaagagagagagcattttccgtgaagtttgaggtccaggctccacgctggggcaacccccgtgcgctcagcttcgtactgagttcgctccagctcggggagggggtggagttcgatgtgctgcctgcctttgatgccctgggtcagttgactggcggctataaacctaacccccaaatctatgtcaagctcatcgaggagtgcaccgacctgcagaaagagggcgagttctccacctgcttcacagaactacagagagacttcctgaagcagcgccccaccaagctcaagagcctcatccgcctagtcaagcactggtaccaaaattgtaagaagaagcttgggaagctgccacctcagtatgccctggagctcctgacggtctatgcttgggagcgagggagcatgaaaacacatttcaacacagcccagggatttcggacggtcttggaattagtcataaactaccagcaactctgcatctactggacaaagtattatgactttaaaaaccccattattgaaaagtacctgagaaggcagctcacgaaacccaggcctgtgatcctggacccggcggaccctacaggaaacttgggtggtggagacccaaagggttggaggcagctggcacaagaggctgaggcctggctgaattacccatgctttaagaattgggatgggtccccagtgagctcctggattctgctggtgagacctcctgcttcctccctgccattcatccctgcccctctccatgaagcttgagacatatagctggagaccattctttccaaagaacttacctcttgccaaaggccatttatattcatatagtgacaggctgtgctccatattttacagtcattttggtcacaatcgagggtttctggaattttcacatcccttgtccagaattcattcccctaagagtaataataaataatctctaacaccatttattgactgtctgcttcgggctcaggttctgtcctaagccctttaatatgcactctctcattaaatagtcacaacaa

SEQ ID NO: 3009 - protein, 364 aa, Homo sapiens
MMDLRNTPAKSLDKFIEDYLLPDTCFRMQINHAIDIICGFLKERCFRGSSYPVCVSKVVKGGSSGKGTTLRGRSDADLVVFLSPLTTFQDQLNRRGEFIQEIRRQLEACQRERAFSVKFEVQAPRWGNPRALSFVLSSLQLGEGVEFDVLPAFDALGQLTGGYKPNPQIYVKLIEECTDLQKEGEFSTCFTELQRDFLKQRPTKLKSLIRLVKHWYQNCKKKLGKLPPQYALELLTVYAWERGSMKTHFNTAQGFRTVLELVINYQQLCIYWTKYYDFKNPIIEKYLRRQLTKPRPVILDPADPTGNLGGGDPKGWRQLAQEAEAWLNYPCFKNWDGSPVSSWILLVRPPASSLPFIPAPLHEA

SEQ ID NO: 3010 - DNA, 1673 bp, Homo sapiens
tcccttctgaggaaacgaaaccaacagcagtccaagctcagtcagcagaagagataaaagcaaacaggtctgggaggcagttctgttgccactctctctcctgtcaatgatggatctcagaaataccccagccaaatctctggacaagttcattgaagactatctcttgccagacacgtgtttccgcatgcaaatcaaccatgccattgacatcatctgtgggttcctgaaggaaaggtgcttccgaggtagctcctaccctgtgtgtgtgtccaaggtggtaaagggtggctcctcaggcaagggcaccaccctcagaggccgatctgacgctgacctggttgtcttcctcagtcctctcaccacttttcaggatcagttaaatcgccggggagagttcatccaggaaattaggagacagctggaagcctgtcaaagagagagagcattttccgtgaagtttgaggtccaggctccacgctggggcaacccccgtgcgctcagcttcgtactgagttcgctccagctcggggagggggtggagttcgatgtgctgcctgcctttgatgccctgggtcagttgactggcggctataaacctaacccccaaatctatgtcaagctcatcgaggagtgcaccgacctgcagaaagagggcgagttctccacctgcttcacagaactacagagagacttcctgaagcagcgccccaccaagctcaagagcctcatccgcctagtcaagcactggtaccaaaattgtaagaagaagcttgggaagctgccacctcagtatgccctggagctcctgacggtctatgcttgggagcgagggagcatgaaaacacatttcaacacagcccagggatttcggacggtcttggaattagtcataaactaccagcaactctgcatctactggacaaagtattatgactttaaaaaccccattattgaaaagtacctgagaaggcagctcacgaaacccaggcctgtgatcctggacccggcggaccctacaggaaacttgggtggtggagacccaaagggttggaggcagctggcacaagaggctgaggcctggctgaattacccatgctttaagaattgggatgggtccccagtgagctcctggattctgctggctgaaagcaacagtgcagacgatgagaccgacgatcccaggaggtatcagaaatatggttacattggaacacatgagtaccctcatttctctcatagacccagcacactccaggcagcatccaccccacaggcagaagaggactggacctgcaccatcctctgaatgccagtgcatcttgggggaaagggctccagtgttatctggaccagttccttcattttcaggtgggactcttgatccagagaggacaaagctcctcagtgagctggtgtataatccaggacagaacccaggtctcctgactcctggccttctatgccctctatcctatcatagataacattctccacagcctcacttcattccacctattctctgaaaatattccctgagagagaacagagagatttagataagagaatgaaattccagccttgactttcttctgtgcacctgatgggagggtaatgtctaatgtattatcaataacaataaaaataaagcaaataccatttaaaaaaaaaaa

SEQ ID NO: 3011 - protein, 400 aa, Homo sapiens
MMDLRNTPAKSLDKFIEDYLLPDTCFRMQINHAIDIICGFLKERCFRGSSYPVCVSKVVKGGSSGKGTTLRGRSDADLVVFLSPLTTFQDQLNRRGEFIQEIRRQLEACQRERAFSVKFEVQAPRWGNPRALSFVLSSLQLGEGVEFDVLPAFDALGQLTGGYKPNPQIYVKLIEECTDLQKEGEFSTCFTELQRDFLKQRPTKLKSLIRLVKHWYQNCKKKLGKLPPQYALELLTVYAWERGSMKTHFNTAQGFRTVLELVINYQQLCIYWTKYYDFKNPIIEKYLRRQLTKPRPVILDPADPTGNLGGGDPKGWRQLAQEAEAWLNYPCFKNWDGSPVSSWILLAESNSADDETDDPRRYQKYGYIGTHEYPHFSHRPSTLQAASTPQAEEDWTCTIL

SEQ ID NO: 3012 - DNA, 6646 bp, Homo sapiens
gttcggagagccgggcgggaaaacgaaaccagaaatccgaaggccgcgccagagccctgcttccccttgcacctgcgccgggcggccatggacttgtacagcaccccggccgctgcgctggacaggttcgtggccagaaggctgcagccgcggaaggagttcgtagagaaggcgcggcgcgctctgggcgccctggccgctgccctgagggagcgcgggggccgcctcggtgctgctgccccgcgggtgctgaaaactgtcaagggaggctcctcgggccggggcacagctctcaagggtggctgtgattctgaacttgtcatcttcctcgactgcttcaagagctatgtggaccagagggcccgccgtgcagagatcctcagtgagatgcgggcatcgctggaatcctggtggcagaacccagtccctggtctgagactcacgtttcctgagcagagcgtgcctggggccctgcagttccgcctgacatccgtagatcttgaggactggatggatgttagcctggtgcctgccttcaatgtcctgggtcaggccggctccggcgtcaaacccaagccacaagtctactctaccctcctcaacagtggctgccaagggggcgagcatgcggcctgcttcacagagctgcggaggaactttgtgaacattcgcccagccaagttgaagaacctaatcttgctggtgaagcactggtaccaccaggtgtgcctacaggggttgtggaaggagacgctgcccccggtctatgccctggaattgctgaccatcttcgcctgggagcagggctgtaagaaggatgctttcagcctagccgaaggcctccgaactgtcctgggcctgatccaacagcatcagcacctgtgtgttttctggactgtcaactatggcttcgaggaccctgcagttgggcagttcttgcagcggcagcttaagagacccaggcctgtgatcctggacccagctgaccccacatgggacctggggaatggggcagcctggcactgggatttgctagcccaggaggcagcatcctgctatgaccacccatgctttctgagggggatgggggacccagtgcagtcttggaaggggccgggccttccacgtgctggatgctcaggtttgggccaccccatccagctagaccctaaccagaagacccctgaaaacagcaagagcctcaatgctgtgtacccaagagcagggagcaaacctccctcatgcccagctcctggccccactggggcagccagcatcgtcccctctgtgccgggaatggccttggacctgtctcagatccccaccaaggagctggaccgcttcatccaggaccacctgaagccgagcccccagttccaggagcaggtgaaaaaggccatcgacatcatcttgcgctgcctccatgagaactgtgttcacaaggcctcaagagtcagtaaagggggctcatttggccggggcacagacctaagggatggctgtgatgttgaactcatcatcttcctcaactgcttcacggactacaaggaccaggggccccgccgcgcagagatccttgatgagatgcgagcgcagctagaatcctggtggcaggaccaggtgcccagcctgagccttcagtttcctgagcagaatgtgcctgaggctctgcagttccagctggtgtccacagccctgaagagctggacggatgttagcctgctgcctgccttcgatgctgtggggcagctcagttctggcaccaaaccaaatccccaggtctactcgaggctcctcaccagtggctgccaggagggcgagcataaggcctgcttcgcagagctgcggaggaacttcatgaacattcgccctgtcaagctgaagaacctgattctgctggtgaagcactggtaccgccaggttgcggctcagaacaaaggaaaaggaccagcccctgcctctctgcccccagcctatgccctggagctcctcaccatctttgcctgggagcagggctgcaggcaggattgtttcaacatggcccaaggcttccggacggtgctggggctcgtgcaacagcatcagcagctctgtgtctactggacggtcaactatagcactgaggacccagccatgagaatgcaccttcttggccagcttcgaaaacccagacccctggtcctggaccccgctgatcccacctggaacgtgggccacggtagctgggagctgttggcccaggaagcagcagcgctggggatgcaggcctgctttctgagtagagacgggacatctgtgcagccctgggatgtgatgccagccctcctttaccaaaccccagctggggaccttgacaagttcatcagtgaatttctccagcccaaccgccagttcctggcccaggtgaacaaggccgttgataccatctgttcatttttgaaggaaaactgcttccggaattctcccatcaaagtgatcaaggtggtcaagggtggctcttcagccaaaggcacagctctgcgaggccgctcagatgccgacctcgtggtgttcctcagctgcttcagccagttcactgagcagggcaacaagcgggccgagatcatctccgagatccgagcccagctggaggcatgtcaacaggagcggcagttcgaggtcaagtttgaagtctccaaatgggagaatccccgcgtgctgagcttctcactgacatcccagacgatgctggaccagagtgtggactttgatgtgctgccagcctttgacgccctaggccagctggtctctggctccaggcccagctctcaagtctacgtcgacctcatccacagctacagcaatgcgggcgagtactccacctgcttcacagagctacaacgggacttcatcatctctcgccctaccaagctgaagagcctgatccggctggtgaagcactggtaccagcagtgtaccaagatctccaaggggagaggctccctacccccacagcacgggctggaactcctgactgtgtatgcctgggagcagggcgggaaggactcccagttcaacatggctgagggcttccgcacggtcctggagctggtcacccagtaccgccagctctgtatctactggaccatcaactacaacgccaaggacaagactgttggagacttcctgaaacagcagcttcagaagcccaggcctatcatcctggatccggctgacccgacaggcaacctgggccacaatgcccgctgggacctgctggccaaggaagctgcagcctgcacatctgccctgtgctgcatgggacggaatggcatccccatccagccatggccagtgaaggctgctgtgtgaagttgagaaaatcagcggtcctactggatgaagagaagatggacaccagccctcagcatgaggaaattcagggtcccctaccagatgagagagattgtgtacatgtgtgtgtgagcacatgtgtgcatgtgtgtgcacacgtgtgcatgtgtgtgttttagtgaatctgctctcccagctcacacactcccctgcctcccatggcttacacactaggatccagactccatggtttgacaccagcctgcgtttgcagcttctctgtcacttccatgactctatcctcataccaccactgctgcttcccacccagctgagaatgccccctcctccctgactcctctctgcccatgcaaattagctcacatctttcctcctgctgcaatccatcccttcctcccattggcctctccttgccaaatctaaatagtttatatagggatggcagagagttcccatctcatctgtcagccacagtcatttggtactggctacctggagccttatcttctgaagggttttaaagaatggccaattagctgagaagaattatctaatcaattagtgatgtctgccatggatgcagtagaggaaagtggtggtacaagtgccatgattgattagcaatgtctgcactggatacggaaaaaagaaggtgcttgcaggtttacagtgtatatgtgggctattgaagagccctctgagctcggttgctagcaggagagcatgcccatattggcttactttgtctgccacagacacagacagagggagttgggacatgcatgctatggggaccctcttgttggacacctaattggatgcctcttcatgagaggcctccttttcttcaccttttatgctgcactcctcccctagtttacacatcttgatgctgtggctcagtttgccttcctgaatttttattgggtccctgttttctctcctaacatgctgagattctgcatccccacagcctaaactgagccagtggccaaacaaccgtgctcagcctgtttctctctgccctctagagcaaggcccaccaggtccatccaggaggctctcctgacctcaagtccaacaacagtgtccacactagtcaaggttcagcccagaaaacagaaagcactctaggaatcttaggcagaaagggattttatctaaatcactggaaaggctggaggagcagaaggcagaggccaccactggactattggtttcaatattagaccactgtagccgaatcagaggccagagagcagccactgctactgctaatgccaccactacccctgccatcactgccccacatggacaaaactggagtcgagacctaggttagattcctgcaaccacaaacatccatcagggatggccagctgccagagctgcgggaagacggatcccacctccctttcttagcagaatctaaattacagccagacctctggctgcagaggagtctgagacatgtatgattgaatgggtgccaagtgccagggggcggagtccccagcagatgcatcctggccatctgttgcgtggatgagggagtgggtctatctcagaggaaggaacaggaaacaaagaaaggaagccactgaacatcccttctctgctccacaggagtgccttagacagcctgactctccacaaaccactgttaaaacttacctgctaggaatgctagattgaatgggatgggaagagccttccctcattattgtcattcttggagagaggtgagcaaccaagggaagctcctctgattcacctagaacctgttctctgccgtctttggctcagcctacagagactagagtaggtgaagggacagaggacagggcttctaatacctgtgccatattgacagcctccatccctgtcccccatcttggtgctgaaccaacgctaagggcaccttcttagactcacctcatcgatactgcctggtaatccaaagctagaactctcaggaccccaaactccacctcttggattggccctggctgctgccacacacatatccaagagctcagggccagttctggtgggcagcagagacctgctctgccaagttgtccagcagcagagtggccctggcctgggcatcacaagccagtgatgctcctgggaagaccaggtggcaggtcgcagttgggtaccttccattcccaccacacagactctgggcctccccgcaaaatggctccagaattagagtaattatgagatggtgggaaccagagcaactcaggtgcatgatacaaggagaggttgtcatctgggtagggcagagaggagggcttgctcatctgaacaggggtgtatttcattccaggccctcagtctttggcaatggccaccctggtgttggcatattggccccactgtaacttttgggggcttcccggtctagccacaccctcggatggaaagacttgactgcataaagatgtcagttctccctgagttgattgataggcttaatggtcaccctaaaaacacccacatatgcttttcgatggaaccaggtaagttgacgctaaagttcttatggaaaaatacacacgcaatagctaggaaaacacagggaaagaagagttctgagcagggcctagtcttagccaatattaaaacatactatgaagcctctgatacttaaacagcatggcgctggtacgtaaatagaccaatgcagttaggtggctctttccaagactctggggaaaaaagtagtaaaaagctaaatgcaatcaatcagcaattgaaagctaagtgagagagccagagggcctccttggtggtaaaagagggttgcatttcttgcagccagaaggcagagaaagtgaagaccaagtccagaactgaatcctaagaaatgcaggactgcaaagaaattggtgtgtgtgtgtgtgtgtgtgtgtgtgtgtgtgtttaatttttaaaaagtttttattgagatacaagtcaataccataaagctctcacccttctaaagtgtacaattcagtggtgtgagtatattcataagatttatacttggtgtctattcataagacttatatccagcatattcataactagagccatatcacagatgcattcatcataataattccagacattttcatcaccctaaaaggaaaccctgaaacccattagcagtcattccccattcctccaacccattctctccctaatccctagaaaccaccaatctgctgtgtatttcatctattgccaacatttcatataaatggcatcatacaaaaaaaaaaaaaaaaaaaaa

SEQ ID NO: 3013 - protein, 1087 aa, Homo sapiens
MDLYSTPAAALDRFVARRLQPRKEFVEKARRALGALAAALRERGGRLGAAAPRVLKTVKGGSSGRGTALKGGCDSELVIFLDCFKSYVDQRARRAEILSEMRASLESWWQNPVPGLRLTFPEQSVPGALQFRLTSVDLEDWMDVSLVPAFNVLGQAGSGVKPKPQVYSTLLNSGCQGGEHAACFTELRRNFVNIRPAKLKNLILLVKHWYHQVCLQGLWKETLPPVYALELLTIFAWEQGCKKDAFSLAEGLRTVLGLIQQHQHLCVFWTVNYGFEDPAVGQFLQRQLKRPRPVILDPADPTWDLGNGAAWHWDLLAQEAASCYDHPCFLRGMGDPVQSWKGPGLPRAGCSGLGHPIQLDPNQKTPENSKSLNAVYPRAGSKPPSCPAPGPTGAASIVPSVPGMALDLSQIPTKELDRFIQDHLKPSPQFQEQVKKAIDIILRCLHENCVHKASRVSKGGSFGRGTDLRDGCDVELIIFLNCFTDYKDQGPRRAEILDEMRAQLESWWQDQVPSLSLQFPEQNVPEALQFQLVSTALKSWTDVSLLPAFDAVGQLSSGTKPNPQVYSRLLTSGCQEGEHKACFAELRRNFMNIRPVKLKNLILLVKHWYRQVAAQNKGKGPAPASLPPAYALELLTIFAWEQGCRQDCFNMAQGFRTVLGLVQQHQQLCVYWTVNYSTEDPAMRMHLLGQLRKPRPLVLDPADPTWNVGHGSWELLAQEAAALGMQACFLSRDGTSVQPWDVMPALLYQTPAGDLDKFISEFLQPNRQFLAQVNKAVDTICSFLKENCFRNSPIKVIKVVKGGSSAKGTALRGRSDADLVVFLSCFSQFTEQGNKRAEIISEIRAQLEACQQERQFEVKFEVSKWENPRVLSFSLTSQTMLDQSVDFDVLPAFDALGQLVSGSRPSSQVYVDLIHSYSNAGEYSTCFTELQRDFIISRPTKLKSLIRLVKHWYQQCTKISKGRGSLPPQHGLELLTVYAWEQGGKDSQFNMAEGFRTVLELVTQYRQLCIYWTINYNAKDKTVGDFLKQQLQKPRPIILDPADPTGNLGHNARWDLLAKEAAACTSALCCMGRNGIPIQPWPVKAAV

SEQ ID NO: 3014 - DNA, 2123 bp, Homo sapiens
caagagttggtaagctcgctgcagtgggtggagagaggcctctagacttcagtttcagtttcctggctctgggcagcagcaagaattcctctgcctcccatcctaccattcactgtcttgccggcagccagctgagagcaatgggaaatggggagtcccagctgtcctcggtgcctgctcagaagctgggttggtttatccaggaatacctgaagccctacgaagaatgtcagacactgatcgacgagatggtgaacaccatctgtgacgtcctgcaggaacccgaacagttccccctggtgcagggagtggccataggtggctcctatggacggaaaacagtcttaagaggcaactccgatggtacccttgtcctcttcttcagtgacttaaaacaattccaggatcagaagagaagccaacgtgacatcctcgataaaactggggataagctgaagttctgtctgttcacgaagtggttgaaaaacaatttcgagatccagaagtcccttgatgggttcaccatccaggtgttcacaaaaaatcagagaatctctttcgaggtgctggccgccttcaacgctctgagtaagcattgctgggtgtcaggagagaaaagccaaagaagcgggtgccagacagctctgtgcaacctctaggccatgagtgggatagataccactgctgctttaaaaaatgggagaccatagaccctcaggagagaagaatcccttctaccctggactcgctctcttctctggaactaacttctcccccataccctgattgtctttggagaaaatgttctggattctagaatctaaggcagagccttttaagccatactgtacacataaatcacctggaaccttgttaaaatgcagatcctgactcaggaggtctgagttagagcccaggatttcatatttctagccagctccatgatgagctgctggtccgcagatcatgcttgcaggttttgaccagagtcagtgttggttagagtaagaggatgaggcagacatctgggaaaagtccagctggggcaagcatttgaagtctgccttcctaccaggtcaaaatcaaggcaacgaccttccatagataactatcaaagcttgagggggtgccttgaacccaactcctaaatccctaagacctgcccacctcttgtgtctcctgtctcagcaaacattcccacactcttgcatattgttaaagtaacctctgcttaccaggcttctggtttaataaaagatggctagagtgactccatcttaaagcaagtagctaggcactcaaaaggaacctacaggcttaatacttgggtctgaaaatagccacagtctaagctgaccaccaattataattgcagaatatttaaggccatacaaaacatctcccactaagcctacaaaatgtccaggtgtcctaaaagttcagcccacttaaaggcagcattaatgagcaggtttaggttgaaggattaatggtcatcaataccactgttaagaagaaaattcttggccaaattgaatttaatggagtttaactgagcagacaattcacaaatctagaagcctcctgagccagagtaggttcagagagtcttgaacacagccacgtggtggaagaagatttatggacaggaaaaggaaaatgatgtactgaaaatgaaagtgaggtacagaaacagccagactggttatagctcagcattggccttatttgaacgagatttgaacagttggccacctttgattggccgaaactcagtgattggcacaagagtaggttgcagtctgtttacacatccttttaggttatagttcaccatgtacagagaaattttaggccaaacttaaaatatgtaaggaggcagctttaggctaaacttgatttaacagcaccaataccccctacctttagtgagcacatctgcacattccaattttaatgacagctccttagaatttcttatcaacgaagacactaacaaagaatggcgcattcctccttctcctttctgaggatgccctaccctgtaacaaagtcgtttctaataaatttgcttctttcaccataaaaaaaaaaaaaaaaaaaaaaaaaaaaaaaaaaaaaaa

SEQ ID NO: 3015 - protein, 172 aa, Homo sapiens
MGNGESQLSSVPAQKLGWFIQEYLKPYEECQTLIDEMVNTICDVLQEPEQFPLVQGVAIGGSYGRKTVLRGNSDGTLVLFFSDLKQFQDQKRSQRDILDKTGDKLKFCLFTKWLKNNFEIQKSLDGFTIQVFTKNQRISFEVLAAFNALSKHCWVSGEKSQRSGCQTALCNL

SEQ ID NO: 3016 - DNA, 3647 bp, Homo sapiens
caagagttggtaagctcgctgcagtgggtggagagaggcctctagacttcagtttcagtttcctggctctgggcagcagcaagaattcctctgcctcccatcctaccattcactgtcttgccggcagccagctgagagcaatgggaaatggggagtcccagctgtcctcggtgcctgctcagaagctgggttggtttatccaggaatacctgaagccctacgaagaatgtcagacactgatcgacgagatggtgaacaccatctgtgacgtcctgcaggaacccgaacagttccccctggtgcagggagtggccataggtggctcctatggacggaaaacagtcttaagaggcaactccgatggtacccttgtcctcttcttcagtgacttaaaacaattccaggatcagaagagaagccaacgtgacatcctcgataaaactggggataagctgaagttctgtctgttcacgaagtggttgaaaaacaatttcgagatccagaagtcccttgatgggttcaccatccaggtgttcacaaaaaatcagagaatctctttcgaggtgctggccgccttcaacgctctgagcttaaatgataatcccagcccctggatctatcgagagctcaaaagatccttggataagacaaatgccagtcctggtgagtttgcagtctgcttcactgaactccagcagaagttttttgacaaccgtcctggaaaactaaaggatttgatcctcttgataaagcactggcatcaacagtgccagaaaaaaatcaaggatttaccctcgctgtctccgtatgccctggagctgcttacggtgtatgcctgggaacaggggtgcagaaaagacaactttgacattgctgaaggcgtcagaaccgtactggagctgatcaaatgccaggagaagctgtgtatctattggatggtcaactacaactttgaagatgagaccatcaggaacatcctgctgcaccagctccaatcagcgaggccagtaatcttggatccagttgacccaaccaataatgtgagtggagataaaatatgctggcaatggctgaaaaaagaagctcaaacctggttgacttctcccaacctggataatgagttacctgcaccatcttggaatgttctgcctgcaccactcttcacgaccccaggccaccttctggataagttcatcaaggagtttctccagcccaacaaatgcttcctagagcagattgacagtgctgttaacatcatccgtacattccttaaagaaaactgcttccgacaatcaacagccaagatccagattgtccggggaggatcaaccgccaaaggcacagctctgaagactggctctgatgccgatctcgtcgtgttccataactcacttaaaagctacacctcccaaaaaaacgagcggcacaaaatcgtcaaggaaatccatgaacagctgaaagccttttggagggagaaggaggaggagcttgaagtcagctttgagcctcccaagtggaaggctcccagggtgctgagcttctctctgaaatccaaagtcctcaacgaaagtgtcagctttgatgtgcttcctgcctttaatgcactgggtcagctgagttctggctccacacccagccccgaggtttatgcagggctcattgatctgtataaatcctcggacctcccgggaggagagttttctacctgtttcacagtcctgcagcgaaacttcattcgctcccggcccaccaaactaaaggatttaattcgcctggtgaagcactggtacaaagagtgtgaaaggaaactgaagccaaaggggtctttgcccccaaagtatgccttggagctgctcaccatctatgcctgggagcaggggagtggagtgccggattttgacactgcagaaggtttccggacagtcctggagctggtcacacaatatcagcagctctgcatcttctggaaggtcaattacaactttgaagatgagaccgtgaggaagtttctactgagccagttgcagaaaaccaggcctgtgatcttggacccagccgaacccacaggtgacgtgggtggaggggaccgttggtgttggcatcttctggcaaaagaagcaaaggaatggttatcctctccctgcttcaaggatgggactggaaacccaataccaccttggaaagtgccggtaaaagtcatctaaaggaggcgttgtctggaaatagccctgtaacaggcttgaatcaaagaacttctcctactgtagcaacctgaaattaactcagacacaaataaaggaaacccagctcacaggagcttaaacagctggtcagccccctaagcccccactacaagtgatcctcaggcaggtaaccccagattcatgcactgtagggtgctgcgcagcatccctagtctctacccagtagatgccactagccctcctctcccagtgacaaccaaaagtcttcagacattgtcaaacgttcccctgggttcacagatctttctgcctttggcttttggctccaccctctttagctgttaatttgagtacttatggccctgaaagcggccacggtgcctccagatggcaggtttgcaatccaagcaggaagaaggaaaagatacccaaaggtcaagaacacagtgattttattagaagtttcatccgcaaattttcttccatttcattgctcagaaatgtcatgtggctacctgtaacttgaaggtggctacaaagatgactgtggacgtgggttgcactggccacccaaggatgtctgccacacctctccaaagccctccctacctaccaagatatacctgatatattccaccaggatatcctccctccagatatacttggttctctccaccaggttctttctttaaagcaggatttctcaactttgatacttactcacatttggggctagacagttctttgtttggaggctctcttgtgcattgtaggatgttgagcagcatctctggcctgtacccagtagatgccacccagttgtgacaattaaaagtgtcttgagactttatcatgtgtcttctgccctaggtgagaacccttgcactagaggaaccctacaccccaaccctggggggaatgtagggaagaggtggccaagccaaccgtggggttagctctaattattaagatatgcattataaataaataccaaaaaattgtctctggcaatagttaccttcccagatacaggtccccccttttttcccctaactcttttaagcaatgattgtaactattaggagacattgctctcccacgtatgtttttctttttagacaatgcagacaccaggaagttgtggagctaggatccatcctattgtcaatgagatgttctcatccagaagccatagaatcctgaataataattctaaaagaaacttctagagatcatctggcaatcgcttttaaagactcggctcaccgtgagaaagagtcactcacatccattcttcccttgatggtccctattcctccttcccttgcttcttggacttcttgaaatcaatcaagactgcaaaccctttcataaagtcttgccttgctgaactccctctctgcaggcagcctgcctttaaaaatagttgctgtcatccacttt

SEQ ID NO: 3017 - protein, 687 aa, Homo sapiens
MGNGESQLSSVPAQKLGWFIQEYLKPYEECQTLIDEMVNTICDVLQEPEQFPLVQGVAIGGSYGRKTVLRGNSDGTLVLFFSDLKQFQDQKRSQRDILDKTGDKLKFCLFTKWLKNNFEIQKSLDGFTIQVFTKNQRISFEVLAAFNALSLNDNPSPWIYRELKRSLDKTNASPGEFAVCFTELQQKFFDNRPGKLKDLILLIKHWHQQCQKKIKDLPSLSPYALELLTVYAWEQGCRKDNFDIAEGVRTVLELIKCQEKLCIYWMVNYNFEDETIRNILLHQLQSARPVILDPVDPTNNVSGDKICWQWLKKEAQTWLTSPNLDNELPAPSWNVLPAPLFTTPGHLLDKFIKEFLQPNKCFLEQIDSAVNIIRTFLKENCFRQSTAKIQIVRGGSTAKGTALKTGSDADLVVFHNSLKSYTSQKNERHKIVKEIHEQLKAFWREKEEELEVSFEPPKWKAPRVLSFSLKSKVLNESVSFDVLPAFNALGQLSSGSTPSPEVYAGLIDLYKSSDLPGGEFSTCFTVLQRNFIRSRPTKLKDLIRLVKHWYKECERKLKPKGSLPPKYALELLTIYAWEQGSGVPDFDTAEGFRTVLELVTQYQQLCIFWKVNYNFEDETVRKFLLSQLQKTRPVILDPAEPTGDVGGGDRWCWHLLAKEAKEWLSSPCFKDGTGNPIPPWKVPVKVI

SEQ ID NO: 3018 - DNA, 3539 bp, Homo sapiens
caagagttggtaagctcgctgcagtgggtggagagaggcctctagacttcagtttcagtttcctggctctgggcagcagcaagaattcctctgcctcccatcctaccattcactgtcttgccggcagccagctgagagcaatgggaaatggggagtcccagctgtcctcggtgcctgctcagaagctgggttggtttatccaggaatacctgaagccctacgaagaatgtcagacactgatcgacgagatggtgaacaccatctgtgacgtcctgcaggaacccgaacagttccccctggtgcagggagtggccataggtggctcctatggacggaaaacagtcttaagaggcaactccgatggtacccttgtcctcttcttcagtgacttaaaacaattccaggatcagaagagaagccaacgtgacatcctcgataaaactggggataagctgaagttctgtctgttcacgaagtggttgaaaaacaatttcgagatccagaagtcccttgatgggttcaccatccaggtgttcacaaaaaatcagagaatctctttcgaggtgctggccgccttcaacgctctgagcttaaatgataatcccagcccctggatctatcgagagctcaaaagatccttggataagacaaatgccagtcctggtgagtttgcagtctgcttcactgaactccagcagaagttttttgacaaccgtcctggaaaactaaaggatttgatcctcttgataaagcactggcatcaacagtgccagaaaaaaatcaaggatttaccctcgctgtctccgtatgccctggagctgcttacggtgtatgcctgggaacaggggtgcagaaaagacaactttgacattgctgaaggcgtcagaaccgtactggagctgatcaaatgccaggagaagctgtgtatctattggatggtcaactacaactttgaagatgagaccatcaggaacatcctgctgcaccagctccaatcagcgaggccagtaatcttggatccagttgacccaaccaataatgtgagtggagataaaatatgctggcaatggctgaaaaaagaagctcaaacctggttgacttctcccaacctggataatgagttacctgcaccatcttggaatgttctgcctgcaccactcttcacgaccccaggccaccttctggataagttcatcaaggagtttctccagcccaacaaatgcttcctagagcagattgacagtgctgttaacatcatccgtacattccttaaagaaaactgcttccgacaatcaacagccaagatccagattgtccggggaggatcaaccgccaaaggcacagctctgaagactggctctgatgccgatctcgtcgtgttccataactcacttaaaagctacacctcccaaaaaaacgagcggcacaaaatcgtcaaggaaatccatgaacagctgaaagccttttggagggagaaggaggaggagcttgaagtcagctttgagcctcccaagtggaaggctcccagggtgctgagcttctctctgaaatccaaagtcctcaacgaaagtgtcagctttgatgtgcttcctgcctttaatgcactgggtcagctgagttctggctccacacccagccccgaggtttatgcagggctcattgatctgtataaatcctcggacctcccgggaggagagttttctacctgtttcacagtcctgcagcgaaacttcattcgctcccggcccaccaaactaaaggatttaattcgcctggtgaagcactggtacaaagagtgtgaaaggaaactgaagccaaaggggtctttgcccccaaagtatgccttggagctgctcaccatctatgcctgggagcaggggagtggagtgccggattttgacactgcagaaggtttccggacagtcctggagctggtcacacaatatcagcagctctgcatcttctggaaggtcaattacaactttgaagatgagaccgtgaggaagtttctactgagccagttgcagaaaaccaggcctgtgatcttggacccagccgaacccacaggtgacgtgggtggaggggaccgttggtgttggcatcttctggcaaaagaagcaaaggaatggttatcctctccctgcttcaaggatgggactggaaacccaataccaccttggaaagtgccgacaatgcagacaccaggaagttgtggagctaggatccatcctattgtcaatgagatgttctcatccagaagccatagaatcctgaataataattctaaaagaaacttctagagatcatctggcaatcgcttttaaagactcggctcaccgtgagaaagagtcactcacatccattcttcccttgatggtccctattcctccttcccttgcttcttggacttcttgaaatcaatcaagactgcaaaccctttcataaagtcttgccttgctgaactccctctctgcaggcagcctgcctttaaaaatagttgctgtcatccactttatgtgcatcttatttctgtcaacttgtattttttttcttgtatttttccaattagctcctcctttttccttccagtctaaaaaaggaatcctctgtgtcttcaaagcaaagctctttactttccccttggttctcataactctgtgatcttgctctcggtgcttccaactcatccacgtcctgtctgtttcctctgtatacaaaaccctttctgcccctgctgacacagacatcctctatgccagcagccagccaaccctttcattagaacttcaagctctccaaaggctcagattataactgttgtcatatttatatgaggctgttgtcttttccttctgagcctgcctttctcccccccacccaggagtatcctcttgccaaatcaaaagactttttccttgggctttagccttaaagatacttgaaggtctaggtgctttaacctcacataccctcacttaaacttttatcactgttgcatataccagttgtgatacaataaagaatgtatctggattttgtgcctagttcctagcacacagcttcaaaaattctagagtttcctgataggagtgtcttttgtattcataacaagcccttttcacccatgcctgggtttatgctaacaaggttacccatggtgggcccttagtttcaaggaaggagttggccaagccagaaagaccaagcatgtggttaaagcattggaattttcagccccatcccacccccaatctccaaggaggtgatggggctggaaattgagttcaattttaacatggccagtgatttaagcaatgctgcctatgtaaagaaaccccaataaaaactctggacagtgaggcttggggagcttcctgattggcagacattccaatgtactaggaaggtagcgcatcttgattccacagggacaaaggctcctgagctctgggcccttccagtgcttgccaccctacatactctttgtctggctcttcatttgtattctttataataaaatggtgattgtaagtagagca

SEQ ID NO: 3019 - protein, 719 aa, Homo sapiens
MGNGESQLSSVPAQKLGWFIQEYLKPYEECQTLIDEMVNTICDVLQEPEQFPLVQGVAIGGSYGRKTVLRGNSDGTLVLFFSDLKQFQDQKRSQRDILDKTGDKLKFCLFTKWLKNNFEIQKSLDGFTIQVFTKNQRISFEVLAAFNALSLNDNPSPWIYRELKRSLDKTNASPGEFAVCFTELQQKFFDNRPGKLKDLILLIKHWHQQCQKKIKDLPSLSPYALELLTVYAWEQGCRKDNFDIAEGVRTVLELIKCQEKLCIYWMVNYNFEDETIRNILLHQLQSARPVILDPVDPTNNVSGDKICWQWLKKEAQTWLTSPNLDNELPAPSWNVLPAPLFTTPGHLLDKFIKEFLQPNKCFLEQIDSAVNIIRTFLKENCFRQSTAKIQIVRGGSTAKGTALKTGSDADLVVFHNSLKSYTSQKNERHKIVKEIHEQLKAFWREKEEELEVSFEPPKWKAPRVLSFSLKSKVLNESVSFDVLPAFNALGQLSSGSTPSPEVYAGLIDLYKSSDLPGGEFSTCFTVLQRNFIRSRPTKLKDLIRLVKHWYKECERKLKPKGSLPPKYALELLTIYAWEQGSGVPDFDTAEGFRTVLELVTQYQQLCIFWKVNYNFEDETVRKFLLSQLQKTRPVILDPAEPTGDVGGGDRWCWHLLAKEAKEWLSSPCFKDGTGNPIPPWKVPTMQTPGSCGARIHPIVNEMFSSRSHRILNNNSKRNF

SEQ ID NO: 3020 - DNA, 3317 bp, Homo sapiens
cgaacaggggcggctgcctcactccctacctgagccagccgagggggccaaggactttagagctgtttcctccggcataagagagacacttgctttccagggcagcaccctttatcggagaaggctctacagggaaggggtctttgcagcctggatggccatcccacattcctttaacggaggtctctaggcctcagagagaacccagagttagaaaggaggccagacggtccttgctgtccccctggggagagaggaagttgccgcctgctgccaggcccaggaggagctgggcctgcaatagtgggggacctggcccctgaggcagtggcggccatgtcacggccaggccacggtgggctgatgcctgtgaatggtctgggcttcccaccgcagaacgtggcccgggtggtggtgtgggagtggctgaatgagcacagccgctggcggccctacacggccaccgtgtgccaccacattgagaacgtgctgaaggaggacgctcgcggttccgtggtcctggggcaggtggacgcccagcttgtgccctacatcatcgacctgcagtccatgcaccagtttcgccaggacacaggcaccatgcggcccgtgcggcgcaacttctacgacccgtcgtcggcgccgggcaagggcatcgtgtgggagtgggagaacgacggcggcgcatggacggcctacgatatggacatctgcatcaccatccagaacgcctacgagaagcagcacccgtggctcgacctctcatcgctaggcttctgctacctcatctacttcaacagcatgtcgcagatgaaccgccagacgcgccggcgccgccgcctgcgccgccgcctggacctcgcctacccgctcaccgtgggctccatccctaagtcgcagtcgtggcccgtgggcgccagctcgggccagccctgctcctgccagcagtgcctgctggtcaacagcacgcgcgccgcctccaacgccatcctggcctcgcagcgccgcaaggcgccccccgcgcccccgctgccgccgccgccgccacctggagggcctccaggcgcgcttgccgtgcgccccagcgccaccttcacaggcgccgcgctctgggcagcgcccgccgccggccccgccgagcccgcgccgcctcccggggcgcccccacggagcccgggcgcccccggcggagcgcgcaccccggggcagaacaacctcaaccggcccgggccccagcgcaccaccagcgtgagcgcgcgcgcctccatcccgccgggggtccccgcactcccggtgaagaacttgaatggtactgggccggtccatccggccctggcagggatgaccgggatactgctgtgcgcggccgggctgcccgtgtgcctgacgcgggcccccaagcccatcctgcacccgccgcccgtgagcaagagcgacgtgaagcccgtgcctggcgtgcccggggtgtgccgcaagaccaagaagaagcaccttaaaaagagtaagaatcccgaggatgtggttcgaagatacatgcagaaggtgaaaaacccacctgatgaggactgcaccatctgcatggagcgactggtcacagcatcaggctacgagggcgtgcttcggcacaagggcgtgcggcctgagctcgtgggccgcctgggccgctgtggccacatgtaccacctgctgtgcctcgtggccatgtactccaatggcaacaaggatggcagcctgcagtgccccacctgcaaggccatctacggggagaagacgggtacgcagccgcctgggaagatggagttccacctcatcccccactcgctgcccggcttccctgatacccagaccatccgcatcgtctatgacatccccacaggcatccagggccctgagcaccccaaccccgggaagaagttcaccgcaagaggattccctcgccactgctatctacccaacaacgagaaaggccggaaggtgctgcggctgctcatcacggcctgggagagaagactcatcttcactatcggcacgtccaacaccacgggcgagtcggacaccgtggtgtggaacgagatccaccacaagaccgagtttggatccaacctcacgggccacggctacccggacgctagctacctagacaacgtgctggctgagctcacagcccagggcgtatccgaggctgcagccaaggcttgaggcccaaggctgcccaccttccctcctgctttgcccctggtccggcaaatgcctccttcgccaggtgtgtcctggtagcccaggttcagggctggggaggagcctgcggaaggggccgcagccattcaggggacctgcctggtggcagctgggatgaagagagatggcatgtcaggctggccccgaatcatagctccctgagagggccaagcagagagtactggaaacctccctaccaaaaagacagagacccgccccctcacacacaaacacacatgtcctgttgaactcatgcacgcacacccacgtgcctgtacttgcccccaggctggaagagaagagacagaaagaccccatgacccccccatgtggatccccatctgtgtctcagttgcatctgtacagccttgtctgcaaactggaggatgcggggcaagcccttaggggcctgccagggctcggggggcaaagagggactcgggaaactcagtgtaccccagatgcctcacccattccgtgtcatcacccatgtctgccacccactgattgggcaattgtgggcccatggggtggaagcccccagatgactgagcagttctacaaaagaatggccagcacgagcggggactagagggtcctgattttgtgtctgtgcctcttcatctctctggactctgatctccttctcccttcccatctccaggccttctgtctgtcccagataaaggcgctgttctcccatcctccctaccccatcctctccaccaaatcgctcccaattttgagagccaaaggctggcgcttctgacttcaggagcgaaaggaggaggcctagtttgggccgatgtattttaaagcagagtggacagcagagagtcaatttccctttcgttgggagtgggcagtggggtggctaattgtcttcggccaaccaggggcctgttgcccaggcaactcaccagctccgcctctgctgattggctgccacggtgggagtcagccaagatttaaagggatgccagcgattgctcttttcaaaacctaccagtcccactgtgggtggagaaataaatggtctttctcctcctcaaaaaaaaaaaaaaaaaaaaaaaaaaaaa

SEQ ID NO: 3021 - protein, 620 aa, Homo sapiens
MSRPGHGGLMPVNGLGFPPQNVARVVVWEWLNEHSRWRPYTATVCHHIENVLKEDARGSVVLGQVDAQLVPYIIDLQSMHQFRQDTGTMRPVRRNFYDPSSAPGKGIVWEWENDGGAWTAYDMDICITIQNAYEKQHPWLDLSSLGFCYLIYFNSMSQMNRQTRRRRRLRRRLDLAYPLTVGSIPKSQSWPVGASSGQPCSCQQCLLVNSTRAASNAILASQRRKAPPAPPLPPPPPPGGPPGALAVRPSATFTGAALWAAPAAGPAEPAPPPGAPPRSPGAPGGARTPGQNNLNRPGPQRTTSVSARASIPPGVPALPVKNLNGTGPVHPALAGMTGILLCAAGLPVCLTRAPKPILHPPPVSKSDVKPVPGVPGVCRKTKKKHLKKSKNPEDVVRRYMQKVKNPPDEDCTICMERLVTASGYEGVLRHKGVRPELVGRLGRCGHMYHLLCLVAMYSNGNKDGSLQCPTCKAIYGEKTGTQPPGKMEFHLIPHSLPGFPDTQTIRIVYDIPTGIQGPEHPNPGKKFTARGFPRHCYLPNNEKGRKVLRLLITAWERRLIFTIGTSNTTGESDTVVWNEIHHKTEFGSNLTGHGYPDASYLDNVLAELTAQGVSEAAAKA

SEQ ID NO: 3022 - DNA, 3148 bp, Homo sapiens
agatggaaggggatgttcaaagcccctcccttgactctgaacggacccccagggaacatgcgaccctctctctggcgacgcctcccacccaccactaatacttgctcctggaccggggggcgcggaggttggagagaggaggcaggtgtctgcatgctacccgggtctcggacaggcggcactgggaccacgaggcagggagccaggcttgaagcaggtgacatgtagacgtcccctggtccagcctcggaacctgagcgcccttctgcctggaaagtttgtggctaggcgccatggccaagagcagctccctgaatgttcgcgtggtggagggccgcgcgctgcctgccaaggacgtgtctgggagcagcgacccctactgcctagtgaaagtggacgacgaggtggtggccaggacagctactgtctggaggagcctgggccccttctggggggaggagtacacggtgcacctgcctctggatttccaccagctggccttctacgtgctggatgaggacactgtcgggcacgacgacatcatcggcaagatctcgctgagcagggaggcgattacagccgacccccgagggattgacagctggattaacttgagccgagtggacccagatgcagaagtgcagggtgagatctgcctgtcagtgcagatgctggaggatgggcagggccgctgccttcgctgccatgtgcttcacgccagggacctggctcccagagacatctctggcacatctgacccatttgcacgtgtgttttggggcagccagagcttggagacctcaaccatcaagaagactcgcttcccgcactgggatgaagtgctggagctgcgggagatgccaggtgccccgtccccactgcgggtggagctctgggactgggacatggtgggcaagaatgacttcttgggcatggtggagttctctccaaagaccctccagcagaagccacctaaaggctggttccgcctcctgccctttcccagagccgaggaggattctggggggaacctgggtgccctgcgagtgaaggtacgcctgattgaggaccgcgtcctgccctcccagtgctaccagcctctcatggagctgctcatggagtctgtgcaggggccagcagaggaggacactgctagccccttggctttgctggaagagctgaccttgggggactgccgccaggaccttgccaccaagctggtgaaactctttcttggccggggactggctgggcactttctggactatctcacccggcgtgaggtggctcggaccatggaccccaacaccctcttccgttctaactccctggcatccaagtcgatggaacagtttatgaagctcgtgggcatgccctacctgcacgaggtcctgaagcctgtgattagccgtgtctttgaggagaagaagtacatggagctggatccctgcaagatggacctgggccgcacccggaggatctccttcaaaggcgcactctcggaggagcagatgcgggagaccagcctggggctgctgacgggctacctggggcccatcgtggacgccatcgtgggctccgtggggcgctgcccgcccgccatgcgcctcgccttcaagcagctgcaccggcgagtggaggagcgcttcccccaggccgagcaccaggatgtgaagtacctggccatcagtggatttctcttcttgcgattcttcgcacctgccatccttaccccaaagctgtttgaccttcgggaccaacacgcggacccccagactagccgctcactgctgttgcttgccaaggctgtgcagagcattggaaacctgggccagcagctgggccaaggcaaggaactgtggatggcccccctgcaccccttcctgctgcagtgtgtctcacgtgtgagagacttcctggaccggctggtggatgtggatggggatgaagctggtgtcccagccagggccctgttcccgccctcggccattgttcgagaaggctatctgctgaagcgcaaggaggagcctgccggcctggccacgcgctttgccttcaagaagcgctacgtctggctcagcggggagaccctctccttctccaagagtcctgagtggcagatgtgtcactccatccccgtgtctcacatccgcgccgtggagcgcgtagacgagggcgccttccaactgccccacgtgatgcaggtggtgacgcaggacggcacgggggcgctgcacaccacctacctccagtgcaagaatgtgaatgagctcaaccagtggctctcggccttgcgcaaggccagcgcccccaacccgaacaagctggccgcctgccaccccggtgccttccgcagcgcgcgctggacctgctgcctccaggctgagcgctcagccgccggctgcagccgtacacactcagctgtcaccctgggggactggagtgacccactggatcctgatgctgaggcccagacagtgtatcggcagctgctcctggggcgggaccagctcaggctgaaattactggaggattctaacatggatacaactctggaggcagacacaggggcctgtcctgaggtcctggcccggcaaagagcagcaactgcccgcctgctggaggtgctcgcagacctggatcgtgcccacgaggagttccagcagcaggagcgagggaaggcggccctgggcccccttggcccctaaggaaatgccagagctagcccggaaggaggagcaagagccagggggccctcttcagcgcatcctgccccgggagtctcctgtctccttggacctctttgattctgtggtttggaggctcccagagacgtgcctagtcctgtgtgccttgagtccagaactcagggcatggaagccctttggcaggggccagccttgcactgagtgaaacttgccctctggcttgattcagactggagtggataggataaggaacctgacttatttgactgagactggggtctctacttcaccaaactggcctctatccataccaaggaggccagcctggccctgagctgctggatacagctggacctgaattcctgatgcccatgtgatgttgttgccccagatgggcactaaatggcctcactcctaaaaaaaaaaaaaaaaaaaaaaaa

SEQ ID NO: 3023 - protein, 804 aa, Homo sapiens
MAKSSSLNVRVVEGRALPAKDVSGSSDPYCLVKVDDEVVARTATVWRSLGPFWGEEYTVHLPLDFHQLAFYVLDEDTVGHDDIIGKISLSREAITADPRGIDSWINLSRVDPDAEVQGEICLSVQMLEDGQGRCLRCHVLHARDLAPRDISGTSDPFARVFWGSQSLETSTIKKTRFPHWDEVLELREMPGAPSPLRVELWDWDMVGKNDFLGMVEFSPKTLQQKPPKGWFRLLPFPRAEEDSGGNLGALRVKVRLIEDRVLPSQCYQPLMELLMESVQGPAEEDTASPLALLEELTLGDCRQDLATKLVKLFLGRGLAGHFLDYLTRREVARTMDPNTLFRSNSLASKSMEQFMKLVGMPYLHEVLKPVISRVFEEKKYMELDPCKMDLGRTRRISFKGALSEEQMRETSLGLLTGYLGPIVDAIVGSVGRCPPAMRLAFKQLHRRVEERFPQAEHQDVKYLAISGFLFLRFFAPAILTPKLFDLRDQHADPQTSRSLLLLAKAVQSIGNLGQQLGQGKELWMAPLHPFLLQCVSRVRDFLDRLVDVDGDEAGVPARALFPPSAIVREGYLLKRKEEPAGLATRFAFKKRYVWLSGETLSFSKSPEWQMCHSIPVSHIRAVERVDEGAFQLPHVMQVVTQDGTGALHTTYLQCKNVNELNQWLSALRKASAPNPNKLAACHPGAFRSARWTCCLQAERSAAGCSRTHSAVTLGDWSDPLDPDAEAQTVYRQLLLGRDQLRLKLLEDSNMDTTLEADTGACPEVLARQRAATARLLEVLADLDRAHEEFQQQERGKAALGPLGP

SEQ ID NO: 3024 - DNA, 918 bp, Homo sapiens
atggcggtgccctgggaggaatatttccgactggctttgcaagagaaactgtctacaaagctgccagagcaggctgaggatcatgtcccaccagtactgcgtctcctggagaagaggcaagagctggtagatgcagaccaggccctgcaggcccagaaggaggtgttccgcaccaagacggcagccctgaaacagcgttgggaacagctggaacaaaaggagcgggagctaaagggatcgttcatccgctttgacaagtttttgcaggactccgaggcccggcgcaatcgcgcgctgcggagggcggcggaggagaggcaccaggcgggccgtcgggaggtggaggcgctgcgtctgtggacccagctccaggagctacggcgggaacacgcgcggctgcagcgccggcttaagcgcctggagccctgcgcgcgcctgctggagcaagcgctggagctgctgcccgggttccaagaggttccggagctggtggcgcgcttcgacggcctggccgagacgcaggcggcgctgaggctcagggagcgcgagcagctcgcggagctggaggcggcgcgagcgcggctgcagcagctgcgggacgcctggccggacgaggtgctcgcacagggccagcggcgggcacagctgcaggagcgcctggaggctgccagggagcgtacgctgcagtgggaatccaagtggattcagattcagaacacagcagcggagaagactctgctcctgggacgcagcaggatggctgtgctcaacctgttccagctagtgtgccagcatcaggggcagcctcccaccctggacatcgaggacacggagggacagctagagcacgaccagaccatctcttttcaaaatcaactctctgcccgtcaaggagaaaggctccacggagggacatga

SEQ ID NO: 3025 - protein, 305 aa, Homo sapiens
MAVPWEEYFRLALQEKLSTKLPEQAEDHVPPVLRLLEKRQELVDADQALQAQKEVFRTKTAALKQRWEQLEQKERELKGSFIRFDKFLQDSEARRNRALRRAAEERHQAGRREVEALRLWTQLQELRREHARLQRRLKRLEPCARLLEQALELLPGFQEVPELVARFDGLAETQAALRLREREQLAELEAARARLQQLRDAWPDEVLAQGQRRAQLQERLEAARERTLQWESKWIQIQNTAAEKTLLLGRSRMAVLNLFQLVCQHQGQPPTLDIEDTEGQLEHDQTISFQNQLSARQGERLHGGT

SEQ ID NO: 3026 - DNA, 4401 bp, Homo sapiens
ccttctgcgttcccagcgcgcggcccgaatggcggccgacaagggcccggcggctggacctcggtcgcgagctgccatggcccagtggaggaagaagaaagggctccggaagcgccgaggcgcggcctcccaggcccgcggcagcgactcggaggacggcgagtttgagatccaggcggaagatgacgcccgggcccggaagctgggacctggaagacccctgcccaccttccccacctcggaatgcacctcggatgtggagccggacacccgggagatggtgcgtgcccagaacaagaagaagaagaagtctggaggcttccagtccatgggcctgagctacccggtgttcaaaggcatcatgaagaaggggtacaaggtgccaacacccatccagaggaagaccatcccggtgatcttggatggcaaggacgtggtggccatggcccggacgggcagtggcaagacagcctgcttcctcctcccaatgttcgagcggctcaagacccacagtgcccagaccggggcccgcgccctcatcctctcgccgacccgagagctggccctgcagaccctgaagttcactaaggagctaggcaagttcactggcctcaagactgccctgatcctgggtggagacaggatggaagaccagtttgcagccctgcacgaaaatcccgacataattattgccacgcccggacggttggtgcatgtggctgtggaaatgagcctgaagctgcagagtgtggaatacgtggtgttcgatgaagctgaccggctttttgaaatgggtttcgcagagcagctgcaggagatcatcgcccgcctccccgggggccaccagacggtgctgttctccgccacgctgcccaaactgctggtggaatttgcccgggctggcctcacggagcccgtgctcatccggcttgacgtggataccaagctcaacgagcagctgaagacctccttcttcctcgtgcgggaggacaccaaggctgccgtgctgctccacctgctgcacaacgtggtgcggccccaggaccagaccgtggtgtttgtggccacgaagcaccacgccgagtacctcactgagctgctgacgacccagcgggtgagctgcgcccacatctacagtgccctagacccgacagcccgcaagatcaatctcgccaaattcacgcttggcaagtgctccactctcattgtgactgacctggccgcccgaggcctggacatcccgctgctggacaatgtcatcaactacagcttccccgccaagggcaaactcttcctgcaccgcgtgggccgtgtggctcgggctggccgaagtggcacagcctactccttggtggcccctgatgaaatcccctacctgctggatctgcacctgttcctgggccgctccctcaccctcgcccgacccctcaaggagccctcaggtgtggccggtgtggatggcatgctgggtcgggtgccacagagtgtggtggacgaggaggacagtggtctgcagagcaccctggaggcatcgctggagctacggggcctggcccgcgttgctgataacgcccagcagcagtatgtgcgctcacgcccggcgccctcgcctgagtccatcaagagggccaaggagatggaccttgtggggctgggcctgcaccccctcttcagctcgcgttttgaggaggaggagctgcagcggctgaggctggtggacagcataaagaactaccgctcccgggcgactatctttgagatcaacgcctccagccgagacctgtgcagccaggtgatgcgcgccaagcggcagaaggaccgcaaggccatcgcccgcttccagcagggacagcaggggcggcaggagcagcaggagggcccagtgggcccagccccgagccgcccagcactgcaggagaagcagcctgagaaggaggaggaggaggaggcgggagagagtgtggaggacattttctcagaggtcgtgggccggaagcggcagcggtcaggacccaacaggggagccaagaggcggagggaggaggcccggcagcgggaccaggaattctacatcccctaccggcccaaggactttgacagcgagcggggcctgagcatcagcggggaagggggagcctttgagcagcaggcagctggcgctgtcctggacttgatgggggatgaagcccagaacctgacgaggggccggcagcagctcaagtgggaccgtaagaagaagcggtttgtgggacagtcaggacaggaagacaagaagaagattaagacagagagcggccgctacatcagcagctcctacaagcgagacctctatcagaagtggaaacagaaacagaaaattgatgatcgtgactcggacgaagaaggggcatctgaccggcgaggcccagagcgaagaggtgggaagcgagaccgtggccaaggtgcatcccggccccacgccccaggcacccctgcaggccgagtccgcccggaactcaagaccaagcagcagatcctgaagcagcggcgccgggcccagaagctgcacttcctgcagcgtggtggcctcaagcagctctctgcccgcaaccgccgccgcgtccaggagctgcagcagggcgccttcggccggggtgcccgctccaagaagggcaagatgcggaagaggatgtgaggaccaggacccagccccgtggctccttgattggccttagggtgggcatcagcagacgttcccgtgcaccactgtgtgcctggccctgtgctgggcactgggggcactccctgcaggagccatcatctgtgaaaaggagcactgtatggccacagaagggcagcagctgcgtcagcctaagacagagacatttgaacagggccttgaagggtgtgcaggagttcgccagcaaagccaggcaggccaagacttgagttggcaactcagctgctgctgcttccatgtgttctgggttcagaggtcatggctgcaccggtcagagccctgagtgcctcagggtttggcaatggaatttttaatgtaataaatctttattgagcactgctggtggccaggagtgcggtctacttggggaactggaatggagagacccaggtactaaaatcccagctaacgtggcagaggagttgcgggtctcctgagggtgagttctgctgccttgtccatttagcgatgaggaaagtgaagctcagagcacaaaccaggtgccagaggcgggagttggtcccccttcctcccactggacatggttgcagctgggagtgggctgggggaggggaacaggatgcccagcccagggggcaaggacacagctgctcccctctggctatgaagaggttaacgcggcccctccacacctggaggtcagaacctggcctgtcctctgtcttcttgccacccaccccctgtttgaggttctgagaaggtcaagggcagccccagcagctggattctcaggctgggcccctcacctggcagagtccatagtggagggggccttggtgatctctcatctagcatggaccctgttctgagacctgacaaagagttttttttcatgccccaaccaccctggcagggagggcctggtctgatctcattttagaggcagttgccccacacatagccccttgaccttcccatcacctcctcatcagggcctgcatttatggagtgcttgctatgtgcccctcatggcaggcccacagcactctgaacaggcacagccctcccatcttcccaatgaggaaacggattcaggaagagccactcagtccacaccccattggaaatgtgggccctcctatctcagggtctctcaggggttccctctcccgctgctcacctgtgtcagggctaggaggcaggggctgcaggctcagcctgacccaggccggccagcatggcagagaggtcctgcatgaacagcttcacctgggggggcccagcacgaagtcacatcccagccccagagtcactgtccagcccccacccctcaacacgcgggggaggccgaaaggtagggcggggactggagatcccctcattaaaagaacagtgatgatggtggttcccagaggtggtgactgagatcctaaaccgttctgggttttgaaagcctcaggccaaccttcccaactgctgcgtgagcagacaccttcacagcttcctcgctgctgtcacctgcactatccaattagtattttcatttacatcaatcagctttattttcttgtaactggatcagtcatattcattggtttgtgacctactcttatctccgtgggtggctctccttttgttttaattaacttctttatgaatatgaacttaataaataccatggatccattgtaaaaactaaaaaaaaaaaaaaaaaaaaaaaa

SEQ ID NO: 3027 - protein, 881 aa, Homo sapiens
MAADKGPAAGPRSRAAMAQWRKKKGLRKRRGAASQARGSDSEDGEFEIQAEDDARARKLGPGRPLPTFPTSECTSDVEPDTREMVRAQNKKKKKSGGFQSMGLSYPVFKGIMKKGYKVPTPIQRKTIPVILDGKDVVAMARTGSGKTACFLLPMFERLKTHSAQTGARALILSPTRELALQTLKFTKELGKFTGLKTALILGGDRMEDQFAALHENPDIIIATPGRLVHVAVEMSLKLQSVEYVVFDEADRLFEMGFAEQLQEIIARLPGGHQTVLFSATLPKLLVEFARAGLTEPVLIRLDVDTKLNEQLKTSFFLVREDTKAAVLLHLLHNVVRPQDQTVVFVATKHHAEYLTELLTTQRVSCAHIYSALDPTARKINLAKFTLGKCSTLIVTDLAARGLDIPLLDNVINYSFPAKGKLFLHRVGRVARAGRSGTAYSLVAPDEIPYLLDLHLFLGRSLTLARPLKEPSGVAGVDGMLGRVPQSVVDEEDSGLQSTLEASLELRGLARVADNAQQQYVRSRPAPSPESIKRAKEMDLVGLGLHPLFSSRFEEEELQRLRLVDSIKNYRSRATIFEINASSRDLCSQVMRAKRQKDRKAIARFQQGQQGRQEQQEGPVGPAPSRPALQEKQPEKEEEEEAGESVEDIFSEVVGRKRQRSGPNRGAKRRREEARQRDQEFYIPYRPKDFDSERGLSISGEGGAFEQQAAGAVLDLMGDEAQNLTRGRQQLKWDRKKKRFVGQSGQEDKKKIKTESGRYISSSYKRDLYQKWKQKQKIDDRDSDEEGASDRRGPERRGGKRDRGQGASRPHAPGTPAGRVRPELKTKQQILKQRRRAQKLHFLQRGGLKQLSARNRRRVQELQQGAFGRGARSKKGKMRKRM

SEQ ID NO: 3028 - DNA, 1775 bp, Homo sapiens
gtgcaaagtgctgggttctgggtttctggattcgcgggccgttcacacgtagcctgtgccggctcctcgggtgagtccgtccgcgcgcggtgccccgggacggcctaggctgccgggggtccggggccccaggcattccgggctgcagattgacggggatcccggatgcaccgcgcgcccccgcgccctcaccgacgggtccagacctggtgggaagaaggtgcggggacgggtccctgaggatcccgatgcctacgagccaagatgctcagctttataggtgtgacctacacatgtgacttcacctcagttttgtgatccgtaaaatggacaaattcgaagctacttcacagtgctgttgagaggattaaatgaaacaatgcttgtaaagctctttgcaggagggagcctcggaagcagggcctggccggcagagcacacctgctgtcaccagggaccacaggcagcatgaagacccccgtggagctggccgtcagtgggatgcagaccctcggccttcagcaccgctgccgaggtggctaccgggtcaaggccaggacgtcatatgtggatgagactctgtttggcagcccagcaggcacccggcctaccccaccggacttcgatccgccctgggtggagaaggctaacagaaccagaggcgtgggcaaggaggcatcgaaggccttgggggcaaaggggagctgtgagaccaccccctcaaggggcagcacccccaccctcacaccaaggaagaagaacaaatacagacccatcagccacaccccgtcttactgtgatgagtcgctgtttggctcccgatctgaaggcgccagcttcggggccccgcggatggcgaagggggatgccgcaaagctccgtgctctcttgtggacgccaccacctacccccaggggtagccactcgccccgccccagggaggcaccactgcgagccattcacccagctggtccctccaagacagagccggggccagcggcagactcccagaagttatctatgggtgggttacactcttcacgccccctgaagcggggactttcccattccctcacccacctgaatgtccccagcactggtcatccagccaccagtgccccccacacaaatgggcctcaggatctcaggccttccacgtcaggggtgaccttccggagccccctggtgacttccagggctcgctcagttagcatttcagtgccatctaccccacgacgaggtggggccacccagaaaccaaagcccccttggaaatgatactctttcatcagggttgcctatggggccacggcgacaggtatggccccttgccagggtaggaggacattcatcacccagggaaccccaggtattaaagaagcccctgtgggggcagacagacatagcaggggtgggcagtgcctccctttatcctgacaatctctagtcgattcttgcctttttctcccgattgcggatttgggggccacctctaagatgcctctctccagccctgtctcaaccatactccaaattagtgccaacccaggggcctggcacctcccacatcatccattgtcttgctgccaagtgcgaataaacggcgtgattgccaacctggagggtcccctcttatcccttcaagccaagcttcctgctcaggattagtttccagctaagtctgcaagccctagaggagtttttccaggctgtctgtgaagcctggggaacacaacggcaactgggagatttgtgagtgaacactgtttcatctt

SEQ ID NO: 3029 - protein, 269 aa, Homo sapiens
MKTPVELAVSGMQTLGLQHRCRGGYRVKARTSYVDETLFGSPAGTRPTPPDFDPPWVEKANRTRGVGKEASKALGAKGSCETTPSRGSTPTLTPRKKNKYRPISHTPSYCDESLFGSRSEGASFGAPRMAKGDAAKLRALLWTPPPTPRGSHSPRPREAPLRAIHPAGPSKTEPGPAADSQKLSMGGLHSSRPLKRGLSHSLTHLNVPSTGHPATSAPHTNGPQDLRPSTSGVTFRSPLVTSRARSVSISVPSTPRRGGATQKPKPPWK

SEQ ID NO: 3030 - DNA, 1363 bp, Homo sapiens
ctgagattggcgggtaacctagcaacgcagggaccgcggcggtaactgtggctagggaaacctggagcggtcagagcaggatggccagagacaataaaagcacgagacccaagtagtctaccgaagtctccatctctgtggacctacagaggcacagagggctgctcacaagatggctttagacattctcgccatggcccctttgtatcaggcccctgccatcaacagaatagggccaaagacagacccatctaaaaggccagctgatccactaaaacccttggttctctctaggaccaaactcaccaccattgaggccaaaaggatcatgtccatcctggatgaggcgatctacaaggtggagctggtgaccttgctgtcgtatgtggcatccaacagagaggatatggaggggatgctgggggaggacgtcatgagggcagtgagagagcatgaggatctctgccaggtcctccttgaaaacgtcaggtgcctgaaagagaaagaaaggcaattgcaggagcagaaagaggctgaggaggaagggtggctcagagaccgcctcctttccatagagctgcagaaatccagcctctcaccacttatgcagcagatcaaagactccaccaagaacgtccttagactcttgctcagcaacccccaggctgctaggctcctgcagatgcagacacagggtagaagtgcagaagcccagaattttattgacagcctgatagagctccgtggtttcctgtttgaaaaactactcactagtcccatggaagcgagggataaggcccagttcttacaggatatcagtagacagaatagtaataaccaacaaatcattgatactcttgaaaaggaattggcggagagaatgaagaacaggaatgcagaggaggagttggaggatctggacgctgttcacagggaggagaagatctcgctggaggagctcaggcggaggcacaaagtgctggtgggagagtttgcgcagatccgggaagagcgggagatcaactccaagaaaaggatggaggcagagcaggagatggtgcgcatggtacgggcggccacgctcatccaggccctatggaagggctatctggtgcgctccctgctcagatccaagaagaagcggggcaagggcaaagcaaaggacaaggagaagggcaagcagaaaggcaaggagaagggcaagggcaagaaatgagctctccacccagcccgctcctgacccttatcttcccagagaccaggccaggaaggcccgagatggagagcactaaattcacggctttcatgtttttatttaataaattaaaaagtatttgaagccacattgaaaaaaaaaaaaaaa

SEQ ID NO: 3031 - protein, 347 aa, Homo sapiens
MALDILAMAPLYQAPAINRIGPKTDPSKRPADPLKPLVLSRTKLTTIEAKRIMSILDEAIYKVELVTLLSYVASNREDMEGMLGEDVMRAVREHEDLCQVLLENVRCLKEKERQLQEQKEAEEEGWLRDRLLSIELQKSSLSPLMQQIKDSTKNVLRLLLSNPQAARLLQMQTQGRSAEAQNFIDSLIELRGFLFEKLLTSPMEARDKAQFLQDISRQNSNNQQIIDTLEKELAERMKNRNAEEELEDLDAVHREEKISLEELRRRHKVLVGEFAQIREEREINSKKRMEAEQEMVRMVRAATLIQALWKGYLVRSLLRSKKKRGKGKAKDKEKGKQKGKEKGKGKK

SEQ ID NO: 3032 - DNA, 2810 bp, Homo sapiens
gagctggcgcagtgccctggtggcagtggctgaagtggcggcggcttcggcggctgcggcgtctgcaacagcttcgggctcggggttttggcggcggcgccggcgggctaggctgcgcggtgcggaccccggcgcgcggtccgggttgctggggcggcgcgtaagatgcctctaatggaggagtttctgagcagcacccctggcccagtggctttgaaagggagctcaaaccagagactatttcaagccctggatatcatatcctgagggccacaggagaagagaacatggctgtgagtttggatgacgacgtgccgctcatcctgaccttggatgagggtggcagtgccccactggctccctccaacggcctgggccaagaagagctacctagcaaaaatggcggcagctatgccatccacgactcccaggcccccagtctcagctctgggggtgagagttccccctccagccccgcacacaactgggagatgaattaccaagaggcagcaatctacctccaggaaggcgagaacaacgacaagttcttcacccaccccaaggatgccaaggcgctggcggcctacctctttgcacacaatcacctcttctacctgatggagctggccacggccctgctgctgctgctgctctccctgtgcgaggcccccgccgtccccgcactccggcttggcatctatgtccacgccaccctggagctgtttgccctgatggtggtagtgtttgaactctgcatgaagttacgctggctgggcctccacaccttcatccggcacaagcggaccatggtcaagacctcggtgctggtggtgcagtttgtcgaggccatcgtggtgttggtacggcagatgtcccatgtgcgggtgacccgagcactgcgctgcattttcctggtggactgtcggtattgcggtggcgtccggcgcaacctgcggcagatcttccagtccctgccgcccttcatggacatcctcctgctgctgctgttcttcatgatcatctttgccatcctcggtttctacttgttctcccctaacccttcagacccctacttcagcaccctggagaacagcatcgtcagtctgtttgtccttctgaccacagccaatttcccagatgtgatgatgccctcctactcccggaacccctggtcctgcgtcttcttcatcgtgtacctctccatcgagctgtatttcatcatgaacctgcttctggctgtggtgttcgacaccttcaatgacattgagaaacgcaagttcaagtctttgctactgcacaagcgaaccgctatccagcatgcctaccgcctgctcatcagccagaggaggcctgccggcatctcctacaggcagtttgaaggcctcatgcgcttctacaagccccggatgagtgccagggagcgctatcttaccttcaaggccctgaatcagaacaacacacccctgctcagcctaaaggacttttacgatatctacgaagttgctgctttgaagtggaaggccaagaaaaacagagagcactggtttgatgagcttcccaggacggcgctcctcatcttcaaaggtattaatatccttgtgaagtccaaggccttccagtatttcatgtacttggtggtggcagtcaacggggtctggatcctcgtggagacatttatgctgaaaggtgggaacttcttctccaagcacgtgccctggagttacctcgtctttctaactatctatggggtggagctgttcctgaaggttgccggcctgggccctgtggagtacttgtcttccggatggaacttgtttgacttctccgtgacagtgttcgccttcctgggactgctggcgctggccctcaacatggagcccttctatttcatcgtggtcctgcgccccctccagctgctgaggttgtttaagttgaaggagcgctaccgcaacgtgctggacaccatgttcgagctgctgccccggatggccagcctgggcctcaccctgctcatcttttactactccttcgccatcgtgggcatggagttcttctgcgggatcgtcttccccaactgctgcaacacgagtacagtggcagatgcctaccgctggcgcaaccacaccgtgggcaacaggaccgtggtggaggaaggctactattatctcaataattttgacaacatcctcaacagctttgtgaccctgtttgagctcacagttgtcaacaactggtacatcatcatggaaggcgtcacctctcagacctcccactggagccgcctctacttcatgaccttttacattgtgaccatggtggtgatgacgatcattgtcgcctttatcctcgaggccttcgtcttccgaatgaactacagccgcaagaaccaggactcggaagttgatggtggcatcacccttgagaaggaaatctccaaagaagagctggttgccgtcctggagctctaccgggaggcacggggggcctcctcggatgtcaccaggctgctggagaccctctcccagatggagagataccagcaacattccatggtgtttctgggacggcgatcaaggaccaagagcgacctgagcctgaagatgtaccaggaggagatccaggagtggtatgaggagcatgccagggagcaagagcagcagcgacaactcagcagcagtgcagcccccgccgcccagcagcccccaggcagccgccagcgctcccagaccgttacctagcccagcgcccgaaagccgtctcttctatgcaataacacaatagtattactctaaaaaaaaaaaaaaaaaaaa

SEQ ID NO: 3033 - protein, 816 aa, Homo sapiens
MAVSLDDDVPLILTLDEGGSAPLAPSNGLGQEELPSKNGGSYAIHDSQAPSLSSGGESSPSSPAHNWEMNYQEAAIYLQEGENNDKFFTHPKDAKALAAYLFAHNHLFYLMELATALLLLLLSLCEAPAVPALRLGIYVHATLELFALMVVVFELCMKLRWLGLHTFIRHKRTMVKTSVLVVQFVEAIVVLVRQMSHVRVTRALRCIFLVDCRYCGGVRRNLRQIFQSLPPFMDILLLLLFFMIIFAILGFYLFSPNPSDPYFSTLENSIVSLFVLLTTANFPDVMMPSYSRNPWSCVFFIVYLSIELYFIMNLLLAVVFDTFNDIEKRKFKSLLLHKRTAIQHAYRLLISQRRPAGISYRQFEGLMRFYKPRMSARERYLTFKALNQNNTPLLSLKDFYDIYEVAALKWKAKKNREHWFDELPRTALLIFKGINILVKSKAFQYFMYLVVAVNGVWILVETFMLKGGNFFSKHVPWSYLVFLTIYGVELFLKVAGLGPVEYLSSGWNLFDFSVTVFAFLGLLALALNMEPFYFIVVLRPLQLLRLFKLKERYRNVLDTMFELLPRMASLGLTLLIFYYSFAIVGMEFFCGIVFPNCCNTSTVADAYRWRNHTVGNRTVVEEGYYYLNNFDNILNSFVTLFELTVVNNWYIIMEGVTSQTSHWSRLYFMTFYIVTMVVMTIIVAFILEAFVFRMNYSRKNQDSEVDGGITLEKEISKEELVAVLELYREARGASSDVTRLLETLSQMERYQQHSMVFLGRRSRTKSDLSLKMYQEEIQEWYEEHAREQEQQRQLSSSAAPAAQQPPGSRQRSQTVT

SEQ ID NO: 3034 - DNA, 1597 bp, Homo sapiens
agccttctgggtccgaggctcccacctgctctaagcgcttgacaccctttaaaaaaatgtatttaaagaggctggttcctatccatccgactggaggcatctcagtgcaagagcaaagctaagtcctgcacacgctcctcccctcctcctcctccttctccccccaggttttcccgaatgtatctactccggttacaactagacgcggcccctcccccacctgcctccccccttccttccctcgatcgtggagggagcgttctctgtgccttcccaagtccccgtgggggaccttctatgttggagtggggggagggggggagggtcatataacgaaggccagaaagaacaaattagataatcaaaagaattatagtaattgctttcactttcccccgcccgctcagcggattccctcccccgcccctcccctggtttttctgtctgtcgggaatactcggtctttccgaccccctcccctcccccaggttcctcctctcctctccccttgctcgcgcgttccctctcttcctccgttttctggtgtgctggaacgttcagcggaatatgatgaatgatcacctgtcacagcttgtttattataatgcaggcaatcaattacacatccccaatgctggccggcccgcaggaaatttatatgctcagcacaaaccaatgtgaaaatggaatctcatttgccaaatgtctttctccccgtacagcacgatgattacagtctgtgtttgtttcaacagtcgtgtacaactgacagtgccatcatttactgcctggctcaggtcacgttactctaaggctttatttatggtgttacgaagggcagcacaggaaaaggacaagggtgtctgtcagggatggcactgtgttaaaaagtgggcgtgcaagggccgcattcccgggcagccgctgcaacctcagcccctgggcccttacctccgcagcctctcccagcatccagctacccagactccaaggccccaggcgagagccagctctcggtacctggagctccacaggtcccagaatcggggtgggtcagagttcaaattctggttctgctactgtctaattgcgtgctgcagggactcaatctcttcatctgggaaatgggagtaataacccttggcaggaatgttgcgatcctctgggatgtcagaggtgttgatgaatgttagttcccgggacttcggaaagaggtcccgttggaagagatgtgaattggaattcacaccctatattaaaatctcctccaatcttcacctctgagacatggctgtctcaagactgttttgtttcccttcctggtggaattttgcacttttatgtcctgtgtagcagcaggtagtgtggctttgagaaaataaaatggccaccttgctccgctgttctttctttgtaaaaaaaaaaaaaaaaaaaaaaaaacggcatagcaatcttggcctttctagctgtgtgaccccaggccggtcaatccctcctcctctccaagcctcggattcctcccctgagaagtaaagaaaataactcctaaactgcctcccgaggcttgctggcaggatccaaggtgtccagagatgtt

SEQ ID NO: 3035 - protein, 143 aa, Homo sapiens
MSFSPYSTMITVCVCFNSRVQLTVPSFTAWLRSRYSKALFMVLRRAAQEKDKGVCQGWHCVKKWACKGRIPGQPLQPQPLGPYLRSLSQHPATQTPRPQARASSRYLELHRSQNRGGSEFKFWFCYCLIACCRDSISSSGKWE

SEQ ID NO: 3036 - DNA, 2490 bp, Homo sapiens
atgacggatgaacaggtgtgcgagactgtggagaaatacggagccaaccgggaggagtgtgcccgcctcaacgcctccctctcctgcctcaggaatgtccacatgtcaggaggcaacctttccaaacaagactggaccatccagtggcccaccacagagacggggaaggagaacaatcccgtgtgccccccggagcccaccccgtggatccgcacccatctctcccagagccccagggtcccgtccaagtgcgtccagcactattgtcacaccagccccactcccggggcccctgtgtacacccacgtggacaggcttaccgtggacgcctacccgggcttgtgcccgcccccgccactggagtcgggccaccgttccctgcccccatcgccccggcagcggcacgcggtccgcaccccgccgcgcacccccaacatcgtcaccaccgtgaccccgccgggcacgccgcccatgaggaagaagaacaagctgaagcccccggggaccccaccgccctcctcccgaaaactgatacacttgatcccgggattcaccgcgctgcatcggagcaaatcccacgagttccagctggggcaccgcgtggacgaggcccacacgcccaaagccaagaagaagagcaaacccttgaacctcaagatccacagcagcgtaggcagctgcgagaacatcccctctcagcagcgctccccgctgctgtccgagcgctccctccgctccttctttgtgggacacgcacctttcctgccttccacccctcctgttcacactgaggccaacttctctgcaaacacactgtcagtgccacgctggtccccgcagatccctcgcagagatctcggcaactccatcaagcacaggttttccaccaagtactggatgtctcagacgtgcacagtctgtgggaaagggatgctttttggcctcaagtgtaaaaactgcaagttaaagtgccacaacaaatgcaccaaagaagccccaccctgtcatcttctgatcatccaccgaggagatccagcaaggttagtccggacagagtccgttccgtgtgacatcaacaaccctctacggaagccacctcgctattcagacctgcacatcagtcagacgctccccaaaaccaacaaaatcaacaaggaccacatccctgtcccttaccagccagactccagcagcaacccctcctccacgacgtcctccacgccctcctcgccagcaccccccctccctcctagtgccacgccgccttctcccctacacccttccccacagtgcacacggcagcagaagaacttcaacctgccagcatcccactactacaaatacaagcagcagttcatcttcccagatgtggtgccggtgccggagacgccgacccgggcgccccaggtcatcctgcatccggtgacctcgaatccaatcttggaaggaaatccattacttcaaattgaagtggagccaacgtcggagaatgaagaggtccatgatgaggccgaagagtcagaggatgacttcgaggagatgaacctgtccctcctctcggcccggagcttcccacgcaaggccagccagaccagcatcttccttcaggagtgggacatcccctttgagcagctggagatcggcgagctcattggaaagggccgctttgggcaagtgtaccacggccgctggcatggcgaggtggccatccggctgattgacattgagagggacaacgaggaccagctcaaggccttcaagcgggaggtgatggcctacaggcagacacggcatgagaacgtggtgcttttcatgggtgcctgcatgagcccgcctcacctggccatcatcaccagcctctgtaagggacggacgctctattccgttgtgagggatgccaaaatcgttttggatgtcaacaaaaccaggcagattgctcaagaaattgtgaagggcatgggctacctccacgccaagggaatcctacacaaggacctcaagtcaaagaacgtcttctatgacaacggcaaagtggtcatcacggactttggactcttcagcatttctggggtgctgcaggctggcaggcgggaggacaaactgcgcatccagaatggctggctatgccacctggcaccagagatcatccgccagctgtcccccgacacagaggaggataagctccccttctccaagcactctgacgtctttgcccttggcacaatctggtatgaactccacgccagggaatggcctttcaagacccaaccagcagaggcaataatctggcaaatgggcacaggcatgaaacccaacctcagccagattggcatgggaaaagaaatctcggacattcttctcttctgctgggcctttgaacaagaagagagacctaccttcaccaagctcatggacatgctggagaaactgccaaagcgaaaccgtcgcctgtctcaccctggacatttctggaagtctgcagagctgtga

SEQ ID NO: 3037 - protein, 829 aa, Homo sapiens
MTDEQVCETVEKYGANREECARLNASLSCLRNVHMSGGNLSKQDWTIQWPTTETGKENNPVCPPEPTPWIRTHLSQSPRVPSKCVQHYCHTSPTPGAPVYTHVDRLTVDAYPGLCPPPPLESGHRSLPPSPRQRHAVRTPPRTPNIVTTVTPPGTPPMRKKNKLKPPGTPPPSSRKLIHLIPGFTALHRSKSHEFQLGHRVDEAHTPKAKKKSKPLNLKIHSSVGSCENIPSQQRSPLLSERSLRSFFVGHAPFLPSTPPVHTEANFSANTLSVPRWSPQIPRRDLGNSIKHRFSTKYWMSQTCTVCGKGMLFGLKCKNCKLKCHNKCTKEAPPCHLLIIHRGDPARLVRTESVPCDINNPLRKPPRYSDLHISQTLPKTNKINKDHIPVPYQPDSSSNPSSTTSSTPSSPAPPLPPSATPPSPLHPSPQCTRQQKNFNLPASHYYKYKQQFIFPDVVPVPETPTRAPQVILHPVTSNPILEGNPLLQIEVEPTSENEEVHDEAEESEDDFEEMNLSLLSARSFPRKASQTSIFLQEWDIPFEQLEIGELIGKGRFGQVYHGRWHGEVAIRLIDIERDNEDQLKAFKREVMAYRQTRHENVVLFMGACMSPPHLAIITSLCKGRTLYSVVRDAKIVLDVNKTRQIAQEIVKGMGYLHAKGILHKDLKSKNVFYDNGKVVITDFGLFSISGVLQAGRREDKLRIQNGWLCHLAPEIIRQLSPDTEEDKLPFSKHSDVFALGTIWYELHAREWPFKTQPAEAIIWQMGTGMKPNLSQIGMGKEISDILLFCWAFEQEERPTFTKLMDMLEKLPKRNRRLSHPGHFWKSAEL

SEQ ID NO: 3038 - DNA, 8192 bp, Homo sapiens
cagaaagccagccctcccttcccttcttggggcgcagaggctcagccagctcagagcgcagcctggagccgacccagaagggcgaagaaagcccagcggacgagcctcctttctctgctgcctgcccgggctggggcgtcccatcccccgccctgaactccgatctctcccaccccacccctctctgggtttcacccggacagagccgggagctgggtgtcgcccccgtttggaatccacgtttcagcactttggacagcgccccggacgccccggcccctttgggttggcgatggcgagcgttcagcaaggcgagaagcagctttttgagaagttctggcgaggaaccttcaaagcggtggccaccccccgtcccgagagcatcattgtcgccagtatcacggcccgcaagccgctgccaaggacagagccccagaataaccccgttgtcccagctcaggatggaccctcagaaaagctgggtcagcatctggccaccgagcccttgggcaccaacagttgggagagagacaagacctgtcgggaactgggtgccaccagaggacacagtgcctctcatgacaaagacttgacaccaccaccttcctccaggggaaagaagaaaaagaagaaatccactcggaagaagagaaggaggtcctcatcctatagcccatcgcctgtcaagaaaaagaagaagaaaagttccaagaaacacaagcgacgcaggtcattctccaagaagagaaggcacagctcctctagcccaaaaagcaaaagaagagatgagaagaggcacaagaaacaatctcgaagccggccccgaaagtctcaccgccaccgccatcaccgctgcccctcgcggtcccagagctcggagtcccgcccctcaagctgtgagagcaggcaccgcggccggtcccctgaggaagggcagaagtcccgccgaaggcactcccgccgctgctccaagaccctctgcaaggacagccctgaggcccagtccagtcgcccgcccagtcaacccctccagatgcttggctacctgtcagccaggggtgtaatcactgggtcggggtctgctgctgacctctttaccaaaacagccagcccgctcaccacctcgcgaggacgttcccaggagtacgactcaggaaatgacacgtcctcgccaccctccacgcaaaccagctcagccaggtctcggggccaggagaaggggagccccagtgggggcttgagcaagagccgggagctcaacagtggcaacacctctgattcagggaactccttcaccacctcctcaccccagaacaagggggccatgttggagaatctctcccccaccagcaggggcagagagtcaaggggatttcagtcaccgtgtctggaatgtgccgaagtgaagaagtccagtttggtcccatccacagcccggagctcacccatgaaagggtgttcccgcagctcctcctatgccagcacccgatcctccagtcactcgtcccgatccccaaatcccagggcttcccccaggtacacccaaagccgatccacctcttctgaaaaaaggtcctactcccgctctcccagctattcctccaagtctggcaagaggagcccgcccagcagaagctctaggtcccgccgcagccctagctactcccgctacagccccagcagggagcgggatcccaaatacagtgagaaggactcgcagcagcgggagcgcgagcgagcgcgtcggagacgtcggtcctactcgcctatgagaaagcgccggagagactccccgagccacctggaggcccggaggataaccagtgcccggaaacgccccatcccctactatcggcccagcccctcctcatccggcagcctcagcagcacctcctcctggtacagcagcagcagtagccgctcggccagccgcagctactcccggagccggagtcggagccggagccggagacggagccggacccgcacgagcagcagctctagctcccgcagccctagtccgggctcccgcagccggagccggagcaggagccggagccggagccggagcaggagccagagccggagctacagctcagcagacagctactccagcacgaggcgctaagtgcccctgagccagctgcccgtgggggccccttcgcgctgccagcctcccccaaccacctgccctccccgccttcttggtgacaaatagtgagggctcctataccttgtccttcctgcttgcctaggggaagaggagaagagggtaagggggcttcactctctagatcagcctgctaggagcctctaccagcatcatcctggggcccagctcaggcctgggcatatggaaagaaccatcatcttgtggcacaaaaaaagaagaaagaaaagaaaacttcaaggttttgtgagaagcaatgggtctgtgactcaaaaattgagccctggccaggaaaatgtggagacagttcttctcctccactgctcacaggaggcccgtggtaattctccccacctccccggatgccccactagtccaacttcatggctgcacgtggatggacccccatgtctgagaggggtgaaagaggagaccaatggcagttcaggttcaagataacggggtcaggcctttaacttcctcaaacaggcccaagcaaaggctggaagacatttgggtcctagaagaagggatatccttgaataccagatggggacgtttgacttggtgggaggtgtcaggagataggagttggttaagatgatagatagaaaaacggaagggttcagctgctgctcccaatacctcagcatggtaaggggacagagcccagcagatcccagctgtgaagaggccactgcatggctgacacaaaacacctcttggccattcacaggggccctgcaacctcacgagaaaggagatagtggaagagtcaggacaggttggtctccagccccacttcccaaatatgcctcagccccactagctggcaccaacttaattccacgggaccatctgctgaacattccccagtgccatggccagttgccaggccccagcgccagccagtctggccttaccctccggttggcgcctgccagccccctcccctctgcccaggctgccacgccctggatgccacccagtgcagcctggcacctacccacccacccttcagcttaagccactccccttgcctctcaggaattttgccaggatggggcacagcagctcaggtttgggggaaaagacccgaatccagagtgcaggggagaggggcttggatatgccatgtcttgggctcctgctggcttctgaggtttcttgtcagcttgggaaagacccacctttatttttgccctcaccccaagtcccccctggctggggctgggcagagagggtaagctgatctccgatccacaaataccaccagctgcttcatccacagaaggcgctaagaacggggaggtgaggaataagatccttaaaataaactcttgggcatccccctcaccagctgactggctttccggaggcttgtgggtgagtttcaagtttgtggtggcaacagcagcaggacagggcacggagggagcgagggagagaggaccggtcccagcttttggatattttgggttatggggaagcaagggccaaacattctttatccctcccaccccagggaaaacatttggaaaatagtcctttttcttggaagcagtgacgtctccctacccaatctttcccatcctatcaacccatggggctagagactgccatgcaaccaccaccacgacagcccttcctccatcagaagacaggagtgagggccccgggcagcagtggacgacccagcctccccataccgggcctctggcccagacctaagccctgcccacaaagactaatggatgccagtgctgtcactgcagaaggccagatggcaggtgcctgggacaggggcaggtgccccggggagggcaagtacagccactgtaaataaccctcgtccctgcccaggaacccagactggacttcagtctccctccatggagacaaaggcttcccagagccaccaaaaaccttcttagcaggacagctgtgagaggcatcagaacctcacgttcggactgccttcatcaagacaactctaggggaccattttgcctggggctcctagcaaacctttttatttattttatttatttatctatttatttatttgatgactgtctctctttctcgccattagcagtattgaattatttatttatacagaggttttgtgtgtgtgtgtgtgtgtgtgtgtgtgtgtgtgtgtgtgtgtgtgtgtgttggggggatctcctaaattatttctgtgcatctcctttttttttctgctgttttttatggatgggatttgagaggccaaaggtgagtgggctattggccttctccctgaaggctctaagcctggaacaccctggggttggcccagaaggaggcacatcagtcccaaaattcatcacttaacccagcgtccaggagggtcaggcctgtaccccagcctcctgtcccccaggaacctcacaggggtatcaaaaagatgtaaacagcccagaggcttatgagctacagtgatgaattgacacagtggagttgcaacttaggtgggggttggagtcgaaagttggcaaatggggccaaggctgcacaaagtcgaaatcccttgtgaatgtcccttagggaggcaccagattggagacagatgtgctatctcctaacagagtgatgaggcttcagttgagtacttgctgaagtagttgccttgtattttgagggccatggtggatgaaaatgatgtctggtttagtactggaattgcacttggggttgacaaggtgctcacaccatgagaatggaggcaggaattgagctgactgagggaagatgcaccttgatctcaccctcactccaaggcacatagcaggatcactccctagcttctctgagcacacctagttggtttcatgtatgttacacatgcttccactccacagtacctaatttctctctgtcccctgagatctgaaggctaccttgggaagaggcatcagccatcttgcttgagaaccaccaagccaaaagcaaaagcttttatctatgatctcttgctgtttcatcaggggaaagcacaaagctatttctgaaattaggaaaaaaaaaaaaaaggtggaaggagcagccagatgttccacaggaccccaccaagaaggtcatttccaaacccatcctggaagggcccaggatccaaaggtcatcagtcctgcttatctgaccaactggcagtgtcttctggctgctggccggagacagctcttgccctttccaaagtcactgtccactgccttgcaattgccagcttgtctggtccagctttgggtttggtgagacttttgcaacatccctggttgtttccctggcaatgtgactatccagccctaacccaaagcaagggagtgcccctttcctgggtgaagtttacaagaaggctgcttaaatgcctgcttcggggaaatctctgcctctctctctctctgtctctctctctgtctctctctctgtctctctctctctctctctctctctctctctctcagtgtatttctctactttcttttacatttcctttttttctatccaaaaacaatgtgcttgttgaggcactggtaaccctgattaaccagaacctcccattcccagtatcgctgttcctacgcccatttcaccctcattaccttctgcttccaaggaatatgacagatcaccaggatgctgctcgtcgtgaggatttatctcaaaaaccaacatccaaaatgggagggagatgtggcttgaggtcaagcgccatgcatcccaagcctttgaccttcccgctatggaagtgcactggatgacagaaactgaatacattgctccctttccctagggcaaagttcgacctctgttaagtggagggatttgtgagataaaaattcaaaatgttggcctgaggcctgagagtgtcaccaaagacagagggagcttcactgagactcagagggaaaaggaaaagagcctcaaacatttttaggaggttgtccatcatgaaagtaaaaacgaaaagcaagatttgatctcccttcagttaattaggcaaggctaagtaactcaaagccccctattagtaacattctggttcactgaggtttgatcatattcctatctgcattccttcccttctttgaaggacagctgatctttcagaagcagaataaaattaagatgttagaacaaaggtctcagtctcagagaaccgcatcacttcatttgctcagacccatcctcttttgcaaaagggtctgcttggagaggccaaaattcagggtgctctcaaaggcaaagaaagcacattgttttccttctccagtccaactttcatcttttcttctgctgttttcttttcccctcttctttttcacaaatgttcaaaatggtctcatgcgcatgtgtcttgccccactttcccctttagctgaacagaaaattttgtctcagtaaaacgaagtcaaaaaacaggattcctccaaacatgcctcctcccgcactggccagccgagtccagctgagaaacttatgctagattcaatgtcattgagcaatgctttattgaagtctcgttcttctcacttctgcaccagtgagccaatgatactgacagaaatgtcatctctcttctatctgtggttgctgtttttggagtaaaagtttctgtgtgtgtttttttagttcttttgatggctgttgttttgcattgtaaataccatgatgggggacccccatcagaacatggcttatttaataatttatttcgtatttattgagtaatattgggaaaagagaaggaccacctctttccctgaattgctattgagaattggtccatctcccagctccaggtgctgctgtctgcagcaagggcattactgcccaggtaaggagtgctagaatcaccaagcaaattgaaattggcagaaatggaggcttcagtcacacaaattagactcaaatggaactaaaacactggttatctccaggaaaacctcatttagatggaaattaatggaagaataaaatgcctacacatgaaccaacttctattaaaaagtcacaactccttgaaaaaaaaaataaagaaaaattgtaaactcttttttttttctggccaaggaaagctatgcctcatcttctaacgagccaagccaaaaagactgcaatggtattcctatgtgtttctttggcctgtgtatcagtctgaatgaaatggaatgggtctctagcctcagtcttgtcatctgtaaaatggggcttgtcctatatattatctgcaagacgtgggaaatgggggctcaagccctgatgctatggactccatactgttggatatattgtctcttgtgtcttctgctgactgcagattaaagggtgtcaaccaaggaaggaaacaaaaaagtagggcctggacttcatttgcagaatgaggtcatagtcgttgagtcccacagtcatatatgggagacctcaagttgctgtcaccttgataactcttgtatcctgggttaaagccctctgtatttagtttgaacttctctctaagccccgtggtccaaagtcatcacgggagagaccaagatgggcttaccttgccctgctctggatttaaccattgttcattgtcaggctatatttttgtacaatcattcaaataacccagtgacataggtcatattgccacttttcagaggagaaaactgaggctcaggagggggagttgacatgcccaagctcccttgagctcagatcagcttgactcaatgtccaacattcccttggtagctttttctccggggtcctgtgctataagaacttctctctgcactgtatttttttttctcccaattcttagctatttcctcaagcaatgattggccaaggacctagcataatccaccacattggccaaggggacgtggtgcaccccaaggccatttctctgcattggaggctgcgaatctcctctggaaaattcccaacccgaggacccaccatgagcccagctcagcctgaccagacagcctctgcctggagcattcacatc

SEQ ID NO: 3039 - protein, 611 aa, Homo sapiens
MASVQQGEKQLFEKFWRGTFKAVATPRPESIIVASITARKPLPRTEPQNNPVVPAQDGPSEKLGQHLATEPLGTNSWERDKTCRELGATRGHSASHDKDLTPPPSSRGKKKKKKSTRKKRRRSSSYSPSPVKKKKKKSSKKHKRRRSFSKKRRHSSSSPKSKRRDEKRHKKQSRSRPRKSHRHRHHRCPSRSQSSESRPSSCESRHRGRSPEEGQKSRRRHSRRCSKTLCKDSPEAQSSRPPSQPLQMLGYLSARGVITGSGSAADLFTKTASPLTTSRGRSQEYDSGNDTSSPPSTQTSSARSRGQEKGSPSGGLSKSRELNSGNTSDSGNSFTTSSPQNKGAMLENLSPTSRGRESRGFQSPCLECAEVKKSSLVPSTARSSPMKGCSRSSSYASTRSSSHSSRSPNPRASPRYTQSRSTSSEKRSYSRSPSYSSKSGKRSPPSRSSRSRRSPSYSRYSPSRERDPKYSEKDSQQRERERARRRRRSYSPMRKRRRDSPSHLEARRITSARKRPIPYYRPSPSSSGSLSSTSSWYSSSSSRSASRSYSRSRSRSRSRRRSRTRTSSSSSSRSPSPGSRSRSRSRSRSRSRSRSQSRSYSSADSYSSTRR

SEQ ID NO: 3040 - DNA, 2056 bp, Homo sapiens
ccacagcccagctgttccctccgcggattctccggggctggttcatcacctccgaatattcctgtgacaggagacgcttgcaaaacccgcctccagcctccagcagcaaataaatagaaggcttgcagcccagaaggagccagaagaagtttctaggcgcgcgtgccctgggtttattaagctcctggctccgctctagacctcagcggttctggctgccagcctgggcagcctgggaagcctgggaggacggtggcttgccggtctgtcgtgaggcagtgcggacggggaccctctgggattctgctggatctgccccgggggttacctttgggggctgggaccccagtcgaggggacacaaccgtccctggcagtggttggttctgcttctccctgcagaaaagcagcattttcggaagctgaagaataagctagcccagccacaccaccttgttgtgtgaccttgggcaggtggttctgtctctctgagcctctgtttctctctgagctgagcagccaccatggctgacggtcagatgcccttctcctgccactacccaagccgcctgcgccgagaccccttccgggactctcccctctcctctcgcctgctggatgatggctttggcatggaccccttcccagacgacttgacagcctcttggcccgactgggctctgcctcgtctctcctccgcctggccaggcaccctaaggtcgggcatggtgccccggggccccactgccaccgccaggtttggggtgcctgccgagggcaggacccccccacccttccctggggagccctggaaagtgtgtgtgaatgtgcacagcttcaagccagaggagttgatggtgaagaccaaagatggatacgtggaggtgtctggcaaacatgaagagaaacagcaagaaggtggcattgtttctaagaacttcacaaagaaaatccagcttcctgcagaggtggatcctgtgacagtatttgcctcactttccccagagggtctgctgatcatcgaagctccccaggtccctccttactcaacatttggagagagcagtttcaacaacgagcttccccaggacagccaggaagtcacctgtacctgagatgccagtactggcccatccttgttttgtccccaaccctagggcttctctgattccaggatacattactttagctgaactcagatttagtgcaagtaaaatgttagagggtgcgggggtgaggactgaccacagattccctggatagtgtagtggtagatttctccacaggatagcgcaattggcaaatcatgcttggttgtgttaggccaaaatactagttttgctttctttaccttttctatcttgatgaaaatgttgcacattctatagttgcaaaacacataaaaggggacttaacatttcacgttgtatcttacttgcagtgaatgcaagggttacttttctctggggacctcccccatcacccaggttcctactctgggctcccgattcccatggctcccaaaccatgccgcatggtttggttaatgaaacccagtagctaaccccactgtgcttccacatgcctggcctaaaatgggtgatatacaggtcttatatccccatatggaatttatccatcaaccacataaaaacaaacagtgccttctgccctctgcccagatgtgtccagcacgttctcaaagtttccacattagcactccctaaggacgctgggagcctgtcagtttatgatctgacctaggtcccccctttcttctgtcccctgtgtttaagtcgggatttttacagagggagctgtctccagacagctccatcaggaaccaagcaaaggccagatagcctgacagataggctagtggtattgtgtatatgggcgggacgtgtgtgtcattattatttgagttatgctgttgtttaggggtaaataacagtaaataattaataataataataataataataaaggagctgacgttcttaaaaaaaaaaaaaaaaaaaaaaaaaaaaaaaaaaaaaaaaaaaaaaaaaaaaaaa

SEQ ID NO: 3041 - protein, 196 aa, Homo sapiens
MADGQMPFSCHYPSRLRRDPFRDSPLSSRLLDDGFGMDPFPDDLTASWPDWALPRLSSAWPGTLRSGMVPRGPTATARFGVPAEGRTPPPFPGEPWKVCVNVHSFKPEELMVKTKDGYVEVSGKHEEKQQEGGIVSKNFTKKIQLPAEVDPVTVFASLSPEGLLIIEAPQVPPYSTFGESSFNNELPQDSQEVTCT

SEQ ID NO: 3042 - DNA, 2060 bp, Homo sapiens
ctggcttcggcctcagccccaccatggtgacgcttgctgaactgctggtgctcctggccgctctcctggccacggtctcgggctatttcgttagcatcgacgcccatgctgaagagtgcttctttgagcgggtcacctcgggcaccaagatgggcctcatcttcgaggtggcggagggcggcttcctggacatcgacgtggagattacaggaccagataacaaaggaatttacaaaggagacagagaatccagtgggaaatacacatttgctgctcacatggatggaacatacaaattttgttttagtaaccggatgtccaccatgactccaaaaatagtgatgttcaccattgatattggggaggctccaaaaggacaagatatggaaacagaagctcaccagaacaagctagaagaaatgatcaatgagctagcagtggcgatgacagctgtaaagcacgaacaggaatacatggaagtccgggagagaatacacagagccatcaacgacaacacaaacagcagagtggtcctttggtccttctttgaagctcttgttctagttgccatgacattgggacagatctactacctgaagagattttttgaagtccggagagttgtttaaaaagcctcttcctgatgatcccaactcagaattcactgtttaccaaacaccttggtcataataatgtcattagtttctccatttttattttctgaactgtacattcacaacttatgtttctttgagattaatagatattgggggaaaaacgcctttttaggaaaattatagtgaaaatttgacagttgattggcataatttcttgtttgaatgctgcctccattatataggtccttccaggaactcaaacactgtaagtgaaatatgggagtatagtttttattatttcttcttttccttttgttttcataatataatgcagtttgttcaggaaatcagcacaaagcctgatagtactttactaaaatgactgcattctttggattccttcagtctatggttcaagtcactaaagattcatttttgttgagtccttatgagaaacagcagtatgaatcttgacggtttctgcccgtcctaatggcagagctctctgacttgggtgtatgctgccaggctgggtactttcatactttgttttcttgttttgctttaaaactacgactcagcatacattttcccacatacatttttacattgtaccttaggactcagtcatctccacttaaattgatgacacaagcagctaataaccatttctgggtttctgcctaaccccctaattgtctgttaaagccaattctctgggtgtcccagtgagtggtggctttttttctttccacattggcacattcacttctcccactcttggcatgtaagaaataagcatttacataattggaaaaatctggatttctgatgccaaagggttaaagcttcttggatttcatttcattgatatacagccactattttatttttgatcagtggcctttgggccactgttcagggtactgaccatcagtgtcagcattagggttttggtttttgtttcttttgggtatttcttttttggcacatgtgaatcttgttttgtgtaaaatgaaattactttctcttgttctctgatgatgggtttaaaattaaaagagcatccggttttggtatggggatgatccaggattatgttgtgactgatacatattagttacttgtgctttttttttttttttttggatctttgcaagggcaaaactacaagtaacgagttttatataattaatttaaatttgttacaggttttcatgttcaggataaaccatacttccaccttgggtgagaacacttgcaacagtttattaatgaggtgactttcaccttaggacaactgttgcatgccaagttttttgtgtgtgtgaaacacttcaaaactgatttaaaagatgtaaatttaaaattggttgtatctaatatgccccaggttcggtaaataaacaattctttttaaaaaaaaaaaaaaaaaaaaaaaaa

SEQ ID NO: 3043 - protein, 201 aa, Homo sapiens
MVTLAELLVLLAALLATVSGYFVSIDAHAEECFFERVTSGTKMGLIFEVAEGGFLDIDVEITGPDNKGIYKGDRESSGKYTFAAHMDGTYKFCFSNRMSTMTPKIVMFTIDIGEAPKGQDMETEAHQNKLEEMINELAVAMTAVKHEQEYMEVRERIHRAINDNTNSRVVLWSFFEALVLVAMTLGQIYYLKRFFEVRRVV

SEQ ID NO: 3044 - DNA, 2638 bp, Homo sapiens
accgacgcggcgaaggagcgcgccatggagcatgtgacagagggctcctgggagtcgctgcctgtgccgctgcacccgcaggtgctgggcgcgctgcgggagctgggcttcccgtacatgacgccggtgcagtccgcaaccatccctctgttcatgcgaaacaaagatgtcgctgcagaagcggtcacaggtagtggcaaaacactcgcttttgtcatccccatcctggaaattcttctgagaagagaagagaagttaaaaaagagtcaggttggagccataatcatcacccccactcgagagctggccattcaaatagacgaggtcctgtcgcatttcacgaagcacttccccgagttcagccagattctttggatcggaggcaggaatcctggagaagatgttgagaggtttaagcaacaaggtgggaacatcattgtggccactccaggccgcttggaggacatgttccggaggaaggccgaaggcttggatctggccagctgtgtgcgatccctggatgtcctggtgttggatgaggcagacagacttctggacatggggtttgaggcaagcatcaacaccattctggagtttttgccaaagcagaggagaacaggccttttctctgccactcagacgcaggaagtggagaacctggtgagagcgggcctccggaaccctgtccgggtctcagtgaaggagaagggcgtggcagccagcagtgcccagaagaccccctcccgcctggaaaactactacatggtatgcaaggcagatgagaaatttaatcagctggtccattttcttcgcaatcataagcaggagaaacacctggtcttcttcagcacctgtgcctgtgtggaatactatgggaaggctctggaagtgctggtgaagggcgtgaagattatgtgcattcacggaaagatgaaatataaacgcaataagatcttcatggagttccgcaaattgcaaagtgggattttagtgtgcactgatgtgatggcccggggaattgatattcctgaagtcaactgggttttgcagtatgaccctcccagcaatgcaagtgccttcgtgcatcgctgcggtcgcacagctcgcattggccacgggggcagcgctctggtgttcctcctgcccatggaagagtcatacatcaatttccttgcaattaaccaaaaatgccccctgcaggagatgaagccccagagaaacacagcggaccttctgccaaaactcaagtccatggccctggctgacagagctgtgtttgaaaagggcatgaaagcttttgtgtcatatgtccaagcttatgcaaagcatgaatgcaacctgattttcagattaaaggatcttgattttgccagccttgctcgaggttttgccctgctgaggatgcccaagatgccagaattgagaggaaagcagtttccagattttgtgcccgtggacgttaataccgacacgattccatttaaagataaaatcagagaaaagcagaggcagaaactcctggagcaacaaagaagagagaaaacagaaaatgaagggagaagaaaattcataaaaaataaagcttggtcaaagcagaaggccaaaaaagaaaagaagaaaaaaatgaatgagaaaaggaaaagggaagagggttctgatattgaagatgaggacatggaagaacttcttaatgacacaagactcttgaaaaaacttaagaaaggcaaaataactgaagaagaatttgagaagggcttgttgacaactggcaaaagaacaatcaagacagtggatttagggatctcagatttggaagatgactgctgattccagtgccacagatgaacccacaaggacatagctgttccctaacttggtggatggctccagtttgcttttaacgaaaatcacaacttcaggagacatctgaaaagaatgatgtctctgaaagctgtcctttcagatgagggagaaatgaaggatttcacacttcagaatattttactaaaaacattccagtcttggccgggtgcggtggctcctgcctataatcccagcactttgggaggctgaggcaggaggatcacttgagcccaggagttcaagaccagcctgggaacacagcgagaccctctcattaaaaacaacaaaacaaaacaattccagtcttggagtagtctaacagaagaaaatgtaaaattatttgagtgtaaataatagatgtcagtatttatcatgatgggtcacatatagacatatgtacatattatatatatatatatatatatatatatatatatatatatatatatataagctcttttttctgaggctattttatagttatttttaaacataaagatacagaagtcttcttgacttctgattttcaaaaccattcctcagtatcttcaggcatttgacctcctgaatgtgcttggccctgggcttcagttatcctttgatgtcctgcaggggtggctaatgtgctggggtttttctgtgttaatagtcacagtattgttttattggtgaatagctgaaaaacagagggattaagtcatattccgggaaagagaattatagtttttatgcctcctgttgaataaatggtgtcctgataaaaaaaaaaaaaaaa

SEQ ID NO: 3045 - protein, 600 aa, Homo sapiens
MEHVTEGSWESLPVPLHPQVLGALRELGFPYMTPVQSATIPLFMRNKDVAAEAVTGSGKTLAFVIPILEILLRREEKLKKSQVGAIIITPTRELAIQIDEVLSHFTKHFPEFSQILWIGGRNPGEDVERFKQQGGNIIVATPGRLEDMFRRKAEGLDLASCVRSLDVLVLDEADRLLDMGFEASINTILEFLPKQRRTGLFSATQTQEVENLVRAGLRNPVRVSVKEKGVAASSAQKTPSRLENYYMVCKADEKFNQLVHFLRNHKQEKHLVFFSTCACVEYYGKALEVLVKGVKIMCIHGKMKYKRNKIFMEFRKLQSGILVCTDVMARGIDIPEVNWVLQYDPPSNASAFVHRCGRTARIGHGGSALVFLLPMEESYINFLAINQKCPLQEMKPQRNTADLLPKLKSMALADRAVFEKGMKAFVSYVQAYAKHECNLIFRLKDLDFASLARGFALLRMPKMPELRGKQFPDFVPVDVNTDTIPFKDKIREKQRQKLLEQQRREKTENEGRRKFIKNKAWSKQKAKKEKKKKMNEKRKREEGSDIEDEDMEELLNDTRLLKKLKKGKITEEEFEKGLLTTGKRTIKTVDLGISDLEDDC

SEQ ID NO: 3046 - DNA, 1794 bp, Homo sapiens
aggggtacggaagtgcgccggaagtggggtgcggaggtgtgcagcgcgctgtcagactggctcgcaggcggcgcggccggcggacccgttcgagacagcgcgggcggctcgggtcccctggggctccgcagcaggaggacgccatggacgacaaggagttaattgaatactttaagtctcagatgaaagaagatcctgacatggcctcagcagtggctgccatccggacgttgctggagttcttgaagagagataaaggggagacaatccagggtctgagggcgaatctcaccagtgccatagaaaccctgtgtggtgtggactcctctgtggcagtgtcctctggcggggagctcttcctccgcttcatcagtcttgcctccctggaatactccgattactccaaatgtaaaaagatcatgattgagcggggagaactttttctcaggagaatatcactgtcaagaaacaaaattgcagatctgtgccatactttcatcaaagatggagcgacaatattgactcacgcctactccagagtggtcctgagagtcctggaagcagccgtggcggccaagaagcgatttagtgtatacgtcacagagtcacagcctgatttgtcaggtaagaaaatggccaaagccctctgccacctcaacgtccctgtcactgtggtgctagatgctgctgtcggctacatcatggagaaagcagatcttgtcatagttggtgctgaaggagttgttgaaaacggaggaattattaacaagattggaaccaaccagatggctgtgtgtgccaaagcacagaacaaacctttctatgtggttgcagaaagtttcaagtttgtccggctctttccactaaaccagcaagacgtcccagataagtttaagtataaggcagacactctcaaggtcgcgcagactggacaagacctcaaagaggagcatccgtgggtcgactacactgccccttccttaatcactctgctgtttacagacctgggcgtgctgacaccctcagcagtcagcgatgagctcatcaagctctatctgtaacctgtgagccctttcctgccaaggtgcagcttacgtagttgaggcagggtgagtagctgcttgacaccccagtgagtcaggccaaaactgagatgtgtttaatgaagatttatggagtaaggacttaaaatcatacatcttggagaacctttcttactcatttcagtcccatctaaaaatgtgtcagctattctaaatcccaacttaaattgttcttacggtttctagaaactttccttttcagtttccagaaatacaagttagataattggctacttaactgatgaaagatgagcccaagtccacctgtcttcatcctcccctgcactccagactgatctgcctaaagcacgcgagatgcaggcgaaaagcagccacacccctctgccacaaatgaccaacagctggtcaggacgttacacgcggtgccttgtaagaggcaagaaacacttgctgaatctgcatctggcttccagtggtaagcacattcctcagcaggatcaagccaaacagtaaaaactaccaagagaacacgaggaaggcagaaacgatgtttagcaacagtattctgcatggttcactgcttaagaaaatgccttctggaatatttgtaaactgaaattctgtatgtgtaagagatgtttaaatatgtttgggtcctaaacagctttttaaaattatacttgggaataaattcagcatcttttcaaataaactctatgaaagacgctga

SEQ ID NO: 3047 - protein, 305 aa, Homo sapiens
MDDKELIEYFKSQMKEDPDMASAVAAIRTLLEFLKRDKGETIQGLRANLTSAIETLCGVDSSVAVSSGGELFLRFISLASLEYSDYSKCKKIMIERGELFLRRISLSRNKIADLCHTFIKDGATILTHAYSRVVLRVLEAAVAAKKRFSVYVTESQPDLSGKKMAKALCHLNVPVTVVLDAAVGYIMEKADLVIVGAEGVVENGGIINKIGTNQMAVCAKAQNKPFYVVAESFKFVRLFPLNQQDVPDKFKYKADTLKVAQTGQDLKEEHPWVDYTAPSLITLLFTDLGVLTPSAVSDELIKLYL

SEQ ID NO: 3048 - DNA, 1505 bp, Homo sapiens
ctctgcgctgaggtgctgggacagccatggtttcagacgaagatgaattgaatcttctggttattgtagttgatgccaacccaatttggtggggaaagcaagcattaaaggaatctcagttcactttatccaaatgcatagatgccgtgatggtgctgggaaattcgcatttattcatgaatcgttccaacaaacttgctgtgatagcaagtcacattcaagaaagccgattcttatatcctggaaagaatggcagacttggagacttcttcggagaccctggcaaccctcctgaatttaatccctctgggagtaaagatggaaaatacgaacttttaacctcagcaaatgaagttattgttgaagagattaaagatctaatgaccaaaagtgacataaagggtcaacatacagaaactttgctggcaggatccctggccaaagccctttgctacattcatagaatgaacaaggaagttaaagacaatcaggaaatgaaatcaaggatattggtgattaaggctgcagaagacagtgcgttgcagtatatgaacttcatgaatgtcatctttgcagcacagaaacagaatattttgattgatgcctgtgttttagactccgactcagggctcctccaacaggcttgtgacatcacgggaggactgtacctgaaggtgcctcagatgccttctcttctgcagtatttgctgtgggtgtttcttcccgatcaagatcagagatctcagttaatcctcccacccccagttcatgttgactacagggctgcttgcttctgtcatcgaaatctcattgaaattggttatgtctgttctgtgtgtttgtcaatattctgcaatttcagccccatttgtactacgtgcgagacagcctttaaaatttctctgcctccagtgctgaaagccaagaaaaagaaactgaaagtgtctgcctgaggataaaatattttccccatcttttagagctgttaatagaaattatatagcagattctttgttgggaagactgaaaaaaataaagataggtataggataatttttaatatggtgaccttacagaaaatatttcccaaacatccttttcatcctgtgcttctggaggactgatttgtttgagggaatcattctatgcattatatcctaaaatattctatgactggtttctgtccatgtttgtggctttcatttttttaatgggatgactattagtcaaagtcagcttgtcatgactcatcataggctttctaacctactccctgaatccgggtcctcattgtgaaatgcatgccatacgaaatttgaacgtagctttggaaaaagggactatttgtggagtaatggcattaatcaacatagaacatcttatttgaatcaacagttaacttcagtagtcatgtgaataaaattcttattgtctaaattgagacagcctcagatatttgcagatatttactttttgtctgatatcagtacatatttggacaaagt

SEQ ID NO: 3049 - protein, 308 aa, Homo sapiens
MVSDEDELNLLVIVVDANPIWWGKQALKESQFTLSKCIDAVMVLGNSHLFMNRSNKLAVIASHIQESRFLYPGKNGRLGDFFGDPGNPPEFNPSGSKDGKYELLTSANEVIVEEIKDLMTKSDIKGQHTETLLAGSLAKALCYIHRMNKEVKDNQEMKSRILVIKAAEDSALQYMNFMNVIFAAQKQNILIDACVLDSDSGLLQQACDITGGLYLKVPQMPSLLQYLLWVFLPDQDQRSQLILPPPVHVDYRAACFCHRNLIEIGYVCSVCLSIFCNFSPICTTCETAFKISLPPVLKAKKKKLKVSA

SEQ ID NO: 3050 - DNA, 2902 bp, Homo sapiens
gcggcggggcagtggctgctgcgttttcgtgtctgagtccttcctgggttctaatgagggcgcggttctgctgtgcccggcccgcgaggtctaaggcatgggcttccagcctccggccgctcttcttttgaggcttttccttctgcagggcatcctgaggcttctgtggggggacctggctttcatccctccttttatccgaatgtccggccctgcggtcagcgcgtccctggtcggagacaccgagggtgtgaccgtgtccctggcagtgctgcaggacgaggcgggaatattgccaattccgacgtgtggagtgctgaacaatgagacggaagactggagcgtgactgtgatccccggtgcgaaggtgttggaagtgacagtgaggtggaagagaggtctggactggtgttcctccaatgagacagattccttctcagagtccccctgtatcctccagacccttctggtttcagcatctcataattcatcctgttcagcacatctactcattcaagtggaaatttatgccaactcttctctgacccataatgcctcagagaacgtgactgtcattcctaaccaggtgtatcagccccttggcccttgtccttgtaatttaacagctggagcctgtgatgttcgctgctgctgtgaccaggaatgctcatcaaatttaacaacgctgttcagacggtcctgcttcaccggcgtgtttggaggagacgtcaatcctccttttgatcagctctgctctgctgggacgacgacacgtggtgtccccgattggtttccctttctgtgtgtgcagtccccccttgccaacacacccttccttggttacttctatcatggtgctgtttcccccaaacaggactcttcctttgaagtatatgtggatactgacgcaaaagactttgcagactttggttacaaacaaggagatcccattatgactgtaaagaaggcatattttactattccgcaggtgtccctggctgggcagtgtatgcagaacgccccagtggcatttcttcacaattttgatgttaaatgcgttactaatttggaactataccaagaacgagatggtattatcaatgcgaagataaagaatgttgccttaggaggcatagttacaccaaaagtgatctatgaggaagcaactgacctagacaaattcatcaccaatacagaaactcctttaaataacggatcaacccctagaattgtgaatgtggaagaacattatattttcaaatggaataataataccatcagtgaaataaatgttaaaatttttagggcagagattaatgcccaccagaaagggataatgacacagagatttgtagtaaaatttttaagctataatagtggtaatgaagaagaattatctggaaatccaggttaccaacttggcaagcctgtccgagctctaaatatcaacaggatgaataatgtcacgactttacatctttggcaatcggctggaaggggtctgtgtacatcagcaactttcaaacccattttatttggagaaaatgtactctctggatgcctgttagaagtcgggattaatgaaaattgtactcagctcagggagaatgctgttgaaagacttgattcattaatacaagcgactcacgttgcaatgagaggcaactccgattacgctgatcttagtgatggctggctcgaaataatacgtgtagatgcccctgatccaggtgcagacccgctggctagcagtgtgaacggcatgtgcctggatattcctgctcacctgagcatccgcatcctcatctcggatgctggcgcggtggaagggattactcagcaggagatactcggtgtagagacaaggttctcctcagtgaactggcagtaccagtgtgggcttacctgtgagcacaaggccgaccttctccctatcagtgcatccgtccagtttattaaaattcctgcacagttaccccaccccctgacaagattccagatcaattatacagagtatgactgcaacagaaatgaggtgtgttggccgcagcttctatatccatggactcagtattatcaaggggagctgcattctcagtgtgttgctaagggcttactgttgctgttgttcctcacattggccttgttcctcagcaacccctggaccagaatatgcaaagcctatagttagacaaccacctggcttttatttttttgagatggagttttgctcttgttgcccaggctgaagtgatctcggctcaccacaacctcctcctcttgggttcaagcgattctcctgcctcagcctccggagaactgggattacaggcatgcaccaccacgcccggctaattttgtatttttagtagagacagggttccaccgtattggccaggctgctctcgaactcctgacctcatgatccgcccatcttggcctcccaaagtgctgagattacaggcatgagccaccgcacccggccttttttttttttttttttttttgaggcggggtctctgtcacccaggctggagtgcagtgcacaatctcggctcactgcaatctctgcctcccaagcaatcctcccacctcagcctctggtgtagctgggaccacagatgctccaccatgcctggctgtatttttggtaaagacggggtttcgccttgttgcccagggtggtctgtaactcctgagctcagatgatctgcccacctcggcctcccaaagtgctgggatcacagacgtgagccactgcgtccggtccatctgacttctcaaagactttagaccttgacttcagtgatttgttgtagtcttgtatgcttctctataaaattttaataaatgaaatgtcttatttttgtagaaaattaaaaaaaaaaaaaaaaaaaaaaaa

SEQ ID NO: 3051 - protein, 697 aa, Homo sapiens
MGFQPPAALLLRLFLLQGILRLLWGDLAFIPPFIRMSGPAVSASLVGDTEGVTVSLAVLQDEAGILPIPTCGVLNNETEDWSVTVIPGAKVLEVTVRWKRGLDWCSSNETDSFSESPCILQTLLVSASHNSSCSAHLLIQVEIYANSSLTHNASENVTVIPNQVYQPLGPCPCNLTAGACDVRCCCDQECSSNLTTLFRRSCFTGVFGGDVNPPFDQLCSAGTTTRGVPDWFPFLCVQSPLANTPFLGYFYHGAVSPKQDSSFEVYVDTDAKDFADFGYKQGDPIMTVKKAYFTIPQVSLAGQCMQNAPVAFLHNFDVKCVTNLELYQERDGIINAKIKNVALGGIVTPKVIYEEATDLDKFITNTETPLNNGSTPRIVNVEEHYIFKWNNNTISEINVKIFRAEINAHQKGIMTQRFVVKFLSYNSGNEEELSGNPGYQLGKPVRALNINRMNNVTTLHLWQSAGRGLCTSATFKPILFGENVLSGCLLEVGINENCTQLRENAVERLDSLIQATHVAMRGNSDYADLSDGWLEIIRVDAPDPGADPLASSVNGMCLDIPAHLSIRILISDAGAVEGITQQEILGVETRFSSVNWQYQCGLTCEHKADLLPISASVQFIKIPAQLPHPLTRFQINYTEYDCNRNEVCWPQLLYPWTQYYQGELHSQCVAKGLLLLLFLTLALFLSNPWTRICKAYS

SEQ ID NO: 3052 - DNA, 4681 bp, Homo sapiens
gggggcggaaccggaaccggcagtggcttgggggcgggacctcgcggactgctgtggcggcagctggagcggcggccgcggtggcagaaccgggggcggccgctgcagtctggagccccatagtgcggggccgcggccaggccacaggaagagctcgaggcccgggccgcaccggctgagtgtgcgggcccgcgcggctcggagccgccgccgcccatcgagcccctccgggcgcgggtcggcccgccatggggtccctgttccggagcgagaccatgtgcctggcgcagctcttcctgcagtcgggcacggcctacgagtgcctcagcgccctgggcgagaaaggcctggtccagttccgagacctcaaccagaacgtaagttctttccaaagaaaatttgttggtgaggtgaagaggtgtgaagagctagagcgaatattggtgtatttggtacaggaaattaatagagctgatattccccttcctgaaggagaggccagccctcctgcgccacccctgaaacaggttctagaaatgcaggagcagttgcagaagctcgaggttgaactgagagaagtcactaagaacaaggagaaactgaggaaaaacttgctggaactgatagagtacactcacatgctgagagtgacaaagacctttgtgaaacgcaatgttgagtttgaacccacttatgaagaattcccttccttagagagtgattctttgttggattacagctgtatgcagaggctgggagcaaaactgggatttgtgtctggcctaattaaccaaggaaaagtggaagcatttgaaaaaatgttgtggagagtctgcaaagggtacaccatcgtgtcctatgcagaactggatgaatcccttgaagaccctgaaacaggggaagtcataaaatggtatgtctttttaatatccttttggggagagcagattggccacaaggttaagaagatatgtgattgctaccactgccacgtgtacccctatccaaacacagccgaggagcggagggagatccaggaggggctgaacacccgcatccaggatctctacactgtactgcacaaaaccgaggactatttgaggcaagtgctatgtaaagccgccgagtctgtctacagccgtgtgatccaggtgaagaaaatgaaggccatctatcacatgctgaacatgtgcagctttgacgtgaccaacaagtgcctcattgctgaggtctggtgtcccgaggcggatctgcaggacctgcgccgggcactggaggagggctcgagagagagtggtgctacaatcccctcattcatgaatataatccccacaaaagaaacaccccccactcggatccgcaccaacaaattcaccgagggatttcagaacatcgtggatgcttatggagtcggaagctacagagaagtcaatccagctctctttaccatcatcaccttcccgtttttatttgctgtgatgtttggagacttcggacatggctttgtgatgtttttatttgccctcttgttggtgttaaatgaaaatcatcccagactaaatcagtcacaagagatcatgaggatgttttttaatggccggtacatcctcctgctgatggggctgttctcagtgtacactggcctcatctacaacgactgcttttcaaagtcagtcaacctgttcggctctgggtggaacgtgtcggccatgtacagctccagccacccacccgcagagcataagaagatggtgctttggaatgacagcgtcgttagacacaacagcattttgcagctggatccaagcattcctggagtgttccgaggcccttatccccttggcattgatcctatttggaacttggccacaaatcgcctcacttttctaaactctttcaaaatgaaaatgtccgtgattttaggaatcattcatatgacttttggagtcattctgggaatatttaaccacttgcacttcaggaagaagttcaacatttacctggtttccatcccggaacttctcttcatgctctgtatctttggataccttatatttatgattttctacaagtggctggttttttcagcagaaacctccagagttgctcccagcattctgattgaatttattaacatgtttttattcccagccagtaaaacaagtggcctttacacagggcaggagtatgtccagagagtgctgctggttgtcacagcattgtctgtccctgtcctcttcttgggaaagccactgtttttgttgtggcttcacaatgggcgtagttgcttcggggtgaaccggagtggctacacacttataaggaaagatagtgaggaagaagtttcattgctgggaagccaagatatagaagagggaaatcaccaggtggaagatggatgtagagaaatggcgtgtgaagagtttaattttggagaaatattaatgacccaagtaatccattccatcgagtactgtctgggatgcatctccaacaccgcctcctacctgaggctctgggcgcttagcctggctcacgcacagttgtctgatgtcctgtgggccatgctgatgcgcgtgggcctccgcgttgacaccacctatggcgtcttgctactgctcccggttatcgcgctctttgcagttttgaccattttcatccttctgatcatggaagggctttctgcgtttcttcacgccatacgcctccactgggtagaatttcagaacaaattctacgttggtgcaggcaccaaatttgttcctttctcattcagtctactttcatcaaagttcaataacgacgacagtgtggcatgatcatattgctgtaaccaacaagctttcagatttatggagaatgaccatgttatagactttcacttatgtcagatttatgataggaaaaattccatcttcattactgccttatgacatagccaaataattctgtaagatatacctcttcctcatatgttaaatattttgtaaagtttaccaatttgagatataaaaatttcttttggttttttatgatgagcaaatataagttaatgccaaacgttatgttaaagttattttttcaaatacaggatttggggagagaagccaattttgcatggctagttgaaaatggtattagatacttatttcctttaaactttatttaaaacaaacaacagagttaatctgtcacctgaagttgccagataatattttccaacagctgaagtagggatagttttttaaaaaatttaatgatgggtaatcaaaacattcacatttattctgctggatttaaaaatatgtactttttttttttttttgagatgaagtcttgctgtgtcacgtaggctggagtgcaatggcacgatcgtgtctcattgcaacttccgcctcctggattcaggtgattctcctgtctcagcctcccgagtaactgggattacaggcatgcgccaccgtgaccagctaatttttttgtatttttgtagagatggggtttcaccatgttggccaggctggtctcgaacttctgacctcaagtgatccacctgcctcggcctccctaagtgctgggattacaggcgtgagccaccatgcctggccaaaatatgcaaatattttttatcctgtgctacctagaattacaagtagaggattgtttttacaattttgtcttgttttagtaattggggacaatgggataaaatgacatacaacaaatggttatcccacttgtatatttttttaaagactcttatcctgttacccttacataaaaccagttatgataattgtatgtttggaagataaattgtatgctgagccttaaaacccagtgtgactgtagaagatataatgcggacatgatttgaatttagtgacagcttggctgatgtcactgaaccagaagggtttatactgagtgaaggaaaggtaaaaagtagtattttgtatatttttgtaacaaaatataaatgaagatattttaccatgaagagattgcacttatccttgagaacagtctaaatataaatgaagatattttaccatgaagagattgcacttatccttgagaacagtctaatgatactttttttactttcagactgtttctagctaaagttctgataaaagtattgagttaatttaaactttcaaacactgtttagatcagttgaaaactaattcttaatagccattgttttataatctttagtttaaattcatctgtttgacatttggttttttgtgaacttgagtcagtcctattgaacattttgacctatattcttgcaaattatgttaatttttcatattttagtttgattttagacaattattttcaaaaagaaacctgactttttttcaccttcttgacattgtgagtgatacacgttaaaaggctatttgcccgcatcctcctctatcctgtttcgaggtagagagcttggcacttctgttacaagctgagagtctggaggtgctgagtttaacgtggctgtgcagctgatttcaaggcatgagctgaacagcgttgacacagccgtgacttacaattaaaccctttcaattacagtacagattctgtgtgctacttgatgagatgttacccaaggccagtttggacttactgctttttgtccctcatattaaattatcaaatgatgccgatgaaa

SEQ ID NO: 3053 - protein, 856 aa, Homo sapiens
MGSLFRSETMCLAQLFLQSGTAYECLSALGEKGLVQFRDLNQNVSSFQRKFVGEVKRCEELERILVYLVQEINRADIPLPEGEASPPAPPLKQVLEMQEQLQKLEVELREVTKNKEKLRKNLLELIEYTHMLRVTKTFVKRNVEFEPTYEEFPSLESDSLLDYSCMQRLGAKLGFVSGLINQGKVEAFEKMLWRVCKGYTIVSYAELDESLEDPETGEVIKWYVFLISFWGEQIGHKVKKICDCYHCHVYPYPNTAEERREIQEGLNTRIQDLYTVLHKTEDYLRQVLCKAAESVYSRVIQVKKMKAIYHMLNMCSFDVTNKCLIAEVWCPEADLQDLRRALEEGSRESGATIPSFMNIIPTKETPPTRIRTNKFTEGFQNIVDAYGVGSYREVNPALFTIITFPFLFAVMFGDFGHGFVMFLFALLLVLNENHPRLNQSQEIMRMFFNGRYILLLMGLFSVYTGLIYNDCFSKSVNLFGSGWNVSAMYSSSHPPAEHKKMVLWNDSVVRHNSILQLDPSIPGVFRGPYPLGIDPIWNLATNRLTFLNSFKMKMSVILGIIHMTFGVILGIFNHLHFRKKFNIYLVSIPELLFMLCIFGYLIFMIFYKWLVFSAETSRVAPSILIEFINMFLFPASKTSGLYTGQEYVQRVLLVVTALSVPVLFLGKPLFLLWLHNGRSCFGVNRSGYTLIRKDSEEEVSLLGSQDIEEGNHQVEDGCREMACEEFNFGEILMTQVIHSIEYCLGCISNTASYLRLWALSLAHAQLSDVLWAMLMRVGLRVDTTYGVLLLLPVIALFAVLTIFILLIMEGLSAFLHAIRLHWVEFQNKFYVGAGTKFVPFSFSLLSSKFNNDDSVA

SEQ ID NO: 3054 - DNA, 1814 bp, Homo sapiens
atgggccacgggcccccaccgccgcccgccgggaggaccgagcctaagagggcagccgcctgaaggaacgcgacggcggcgcccgcagtatttttcagtgctgtacaagcgtcttgaattactctggtagcttttccagaaagacccatgacttcaccacatttctcgagttacgatgaaggtcctctggatgtcagcatggcagccacaaacctggagaaccagctgcacagcgcacagaagaacctcctgttccttcagcgggagcatgccagcacgctcaaggggctgcactccgagatcaggcggctgcagcagcactgcacagatttaacatatgagctgacagtcaaaagttcggaacagacaggagacgggacttctaaaagcagtgaattaaagaaaagatgtgaagagctggaagcccaactgaaagtgaaagagaacgaaaatgctgagttgttgaaagaactggagcagaaaaacgcgatgatcacagtgctggagaacaccatcaaggagcgagagaagaagtacctggaggagctgaaggccaagagtcacaagctgaccctgctgtctagcgagctggagcagcgggccagcaccatcgcctacctgacctcccagctgcacgccgccaagaagaagctcatgagctccagcgggacctcagatgccagcccgtcagggagccccgtgctggccagctacaagccagcgccccccaaagacaagctacccgaaacgcctcgccgccgcatgaaaaagagcctctcagcccccttgcacccggaatttgaagaggtctacagattcggggcagagagcaggaaactccttttgcgggaaccagtggatgctatgcccgaccccaccccatttctgctggctagggagtccgccgaggtccacctcatcaaagagaggcccctcgtcatcccccccatcgcctccgaccgaagcggcgagcagcacagcccggcccgcgaaaagccgcacaaggcccacgtcggggtggcacatcggatccaccacgccaccccgccgcaggcccagcccgaggtgaagaccctggcggtcgaccaggtgaacggaggcaaggtggtgaggaagcactcagggacggacagaactgtgtgaagcccgccgtgccccaccccgcgctgtccatgcactgtgagcaccactgggaaatctcagccacaccttttctgtttaatcccatgcatgccaaacacttttcacacctaccgacccattctccttctgcttctcttgccctcttcttcacaccaaaatatgatcgtgtccctgccgcagaatatgtatttcctaattgctgtggccaagcgcctgtgtgccgaatcgcttgcttctgatcccgctccgtgtaacctaagtgcgctgcaggcaaagcccaggccacggctgcgtcactactgatgttcacgatgccacacagtcacacacctaattcattctcaagtcggagcaacacataccaaccttgaccttatcctcaagctccagggcagcctggccgagcagcccctgctccctcctggagacccttgtcacctcccgagctcctcctggagacccctgtcacctcctgaccaacctttcccagggcggcaccgatcaccgagcagccgtgcgtgtatctcaaggaactaaataagatgacgctactcctcatagcaccacaacctgaatgtgtgttcatatttttttgttagttttatccaaaatgtttaagatcccaacaaactttattttctaaacctgccaaaaaaaaaaaaaaaaaaaaa

SEQ ID NO: 3055 - protein, 331 aa, Homo sapiens
MTSPHFSSYDEGPLDVSMAATNLENQLHSAQKNLLFLQREHASTLKGLHSEIRRLQQHCTDLTYELTVKSSEQTGDGTSKSSELKKRCEELEAQLKVKENENAELLKELEQKNAMITVLENTIKEREKKYLEELKAKSHKLTLLSSELEQRASTIAYLTSQLHAAKKKLMSSSGTSDASPSGSPVLASYKPAPPKDKLPETPRRRMKKSLSAPLHPEFEEVYRFGAESRKLLLREPVDAMPDPTPFLLARESAEVHLIKERPLVIPPIASDRSGEQHSPAREKPHKAHVGVAHRIHHATPPQAQPEVKTLAVDQVNGGKVVRKHSGTDRTV

SEQ ID NO: 3056 - DNA, 5125 bp, Homo sapiens
ggaggcgggcggtgggggcgcgggccgggtggccgcgcatgcgtgcggcccccgctcccccggggcttccccggcctcgtgcgtgcgcacgcgcgctgtcccccggaggcgtctgggtgtgcggagcgcgcgcgcgcgcggctcggaggcgcacctgtgaggtgtccctgaggagagggaggtgggtgcgcggcgcccgcggcctggggcgctgactcccctcacttggagtgagttctcggcggccgggctgcagtctttctttctttcccggagggaggcgggggccgggggccagggagcgggctgggggtgggaaggaggtggagtggcttaaagaaaagaaaaacaacccatcccggaggatgggcctcgggatggcggggaaggtcagagcggctccgcgcagcctggcgggtcccgggctgagaagccgcccctcgggcctcgggcggtcggccgcgggcccgcagtgcgggggagcggggccggggggcgcagatggcggccggtgcgagcgagggctgggcagcgggcagggcgaggccgggcgaggcccctcgggagccggactcccgagccaggctccattgttgttggagccgagggaagggggagcgctgccgccctcgtcgcccgtggagccgcgtcttggagcccttccaggcgggtcccgggagaggcggtcatggccgcgccaggggaccggggagccgggcggctgcggaggagccggctgcatggggtgctgtgtgtttttcagggcgccctgcgtccggcagaggaggcgagcatcccgctcaggtgatgaggaacccctcgcgcacccagcgcagaaggctgctgccgccggacgcctccattgtttgaccacaacaagggccggattctcacccagcaggatcctaaggcctttgtagtccttcagccactgtgggccctgcctctgcctgttcttctggaatgtcttgggggttttgatcctgtcactgtgagtcttgctctgtcgcccaggctggagtgcagtggcacgatctcagctcattgcaacctctgtctcccaggttcaagcgattctcctgcctcagcctctggagtagctgggattacagatgggaccacctagttgcaggaaaacaagctcagggctcccactgattctacattatgacctgcaaatccaagagacacatctttggaagataagagagcttcttcaagaccaaaaaaggagacggcatgatacccatgtagggaattccccaaagcagggcttgccatacctggaccccgaggagcctgcttgctggaaaggctttcctgtctgatgtgcaggaggcagaatgccaaactgactcttcaaggggcaactgcaggggctcgagaccagccagcagtatctcatccttcgatacaggggatatactgtacagtcctttttctagaagtgagacatacaagattactctacaagaggaagattccaggggctcaaaaacgcaaaggtttgcactttgagagccccttggaatgttgacaactcaggatctaaaacaaagttctgtgttaatgagttacagaattcacgtggaagtcaatgtcactttataatcgataataatactgagtgaggaacactatgcaggaagaaaccttccgtagaaagacaggcagggaaaagcttaggctgaccttaaacttacctaatagagcaagcctgagatagactgccaaaatggccaaataagagactctatgaaataacagtcttgtaactgtagtaatcataaggaaattttctccttgaaatcacgataccaaataggaaaaatgatctacaagtgccccatgtgtagggaatttttctctgagagagcagatctttttatgcatcagaaaattcacacagctgagaagccccataaatgtgacaagtgtgataagggtttctttcatatatcagaacttcatattcattggagagaccatacaggagagaaggtctataaatgtgatgattgtggtaaggattttagcactacaacaaaacttaatagacataagaaaatccacacagtggagaagccctataaatgttacgagtgtggcaaagccttcaattggagctcccatcttcaaattcatatgagagttcatacaggtgagaaaccgtatgtctgtagtgagtgtggaaggggctttagtaatagttcaaacctttgcatgcatcagagagtccacaccggagagaagccctttaaatgtgaagagtgtgggaaggccttcaggcacacctccagcctctgcatgcatcaaagagtccacacaggagagaaaccctataaatgttatgagtgtgggaaggcgttcagtcagagttcgagcctctgcatccaccagagagtccacactggagagaaaccctatagatgttgtggatgtgggaaggccttcagtcagagttcgagcctgtgcatccaccagagagtccacacaggagagaaacctttcaaatgtgatgagtgcggaaaggccttcagtcagagtacgagcctctgcatccaccagagagtccacacaaaggagagaaaccatctcaaaatatcagttatataaaacgttttgctaagagtttaaaatcttaaaacccataagtgccactaggaaggaaaccctgtatatacctacattgactcaagaaatatttacgcaatccctagcagaacattgtttctgaggaggcatatgtgagattgatttgttggttcatgccaagtgtgttccacaggttgactttgaatgtggacctctgagcatccacgcaggatggctctcaggtcccagtcacagacgtcgcttcctgggattccagcacgatgcctccatagttgaaagactacacaaaaagccacaatcattgcccggcctcctgagtcaccttctatctatactttgcttaaaagctatcccagatactcccccttgaggagctcatgcccttccttcctctttattcgagcatactggcaatgcattggaaaacagacagctcccactaagatcacgttctggtatttctgaggttaacacttgatttagcccctacatatctttccatatatcctattatttctgaatatatgtcctcaaaatccccataaatatccatcccttcctagatggcattaactttcattttagattttaggtgactcataattcccattcacttagcctatcagaaaagtcattggcagacatatatgtccttgaaccttttttatttgtgtggattctgctcatcactgtctctgttagacttattttgtagtggctgcatcacatatttttcacttgaatttttttggaaatagctgaatgtaaatagcagggaggaagaagcaagcaaagtgagagcttttcttcatccagaattgccctctgggctcctttggtaacagatggagctccttcctagctagggagaccttatgagaagtggatggtaggaggagtcactaatgtttcaatctctatttctgtaatcttgggcaataatgcataggagttcttgataccccttcattgattactgtgtatcagttctttgttaggcatgaacgtctttattaatccatcattcttttcttcattcaacaaatatgtattgaacacctcctatatgccaggcactgtgctaggtgctgggaataccactgatgagacagacaaggtccctactcttgtggagtttacttctggtggaggagacagatgataagtaaacaaataaataatgtagtttgagatagtgattaagtgctatgaagaaaataaactagggtgatgattttagtggtggggtggggtgggggtggggtgacattagctagtggtcagggaggcctttccgcggtgggatgttgagctgaggccggaggagaagtagcagtcgctggcagagcacacaggctgctctgggggatgagctggtgcgtttaaggaacaggccagcactggcattcgcaagcagtggggaaggggagagatgccgaggtggtcagtatcctgactttcagaggcctttttttgtttgttttaatttttgctagattgatattaaaaactcatgtggaggaactcaaggaatgtttagaagaccaaaagtccccaatgacaggaacaaaagcaaccaatttttaactttctcttctcattcctgttttcattgatttcccacatgtagtccttttgctcaggaagtctttggggaaattaaggatctttgaagctctgaaataggtgatcaggttagtggtgtctgtcagctgtctaagaggttggaaaatgaactactcaagatagtcacgaaaatactgaaagtttgatttttctttccatatttgaattaattttttctgtttgactggaaggggtttttgtataactaaaacctcagcgcataaaggagatttaaaaggagcacatgatttagtgggtgggccatgaaactagagatgggatttgggggtgaatttgtcaatatctggattttaatccagacatctctgctaacaagcctttggtaagtcacttcagatacttttcctcctttttacaaagagagggctggcttagttatttgccaaagccccttccaggcctgaattccacaagtacgatttactgtagtgtcttatcactctttcatgtcacaatagcgtggagcattagagaaaagcctagacttttagttgatagccagttgaaatatcattgatagaattttagttttaggaaaaattggtttgatttctagctttattactattaggtatgtgagcttgggcaaatcgcttaatctttgagtctagttttctctcaaaatgagaacattaggctaaatgatttccgagtttccagctagtcctagagttctatatttctacatagttgaattattttatcatgctgttgctggggaatatgactaacccttttgaagctactaattttatgtcgagctttaaagtccataattgttatcttcagaaaatattatttgacctacagtatgtccaaatcaatttaataaaatcgctttataaaaaaaaaaaaaaaaaaa

SEQ ID NO: 3057 - protein, 261 aa, Homo sapiens
MIYKCPMCREFFSERADLFMHQKIHTAEKPHKCDKCDKGFFHISELHIHWRDHTGEKVYKCDDCGKDFSTTTKLNRHKKIHTVEKPYKCYECGKAFNWSSHLQIHMRVHTGEKPYVCSECGRGFSNSSNLCMHQRVHTGEKPFKCEECGKAFRHTSSLCMHQRVHTGEKPYKCYECGKAFSQSSSLCIHQRVHTGEKPYRCCGCGKAFSQSSSLCIHQRVHTGEKPFKCDECGKAFSQSTSLCIHQRVHTKERNHLKISVI

SEQ ID NO: 3058 - DNA, 2566 bp, Homo sapiens
cgtcgccgtccccgtctcctgccaggcgcggagccctgcgagccgcgggtgggccccaggcgcgcagacatgggctgctccgccaaagcgcgctgggctgccggggcgctgggcgtcgcggggctactgtgcgctgtgctgggcgctgtcatgatcgtgatggtgccgtcgctcatcaagcagcaggtccttaagaacgtgcgcatcgaccccagtagcctgtccttcaacatgtggaaggagatccctatccccttctatctctccgtctacttctttgacgtcatgaaccccagcgagatcctgaagggcgagaagccgcaggtgcgggagcgcgggccctacgtgtacagggagtccaggcacaaaagcaacatcaccttcaacaacaacgacaccgtgtccttcctcgagtaccgcaccttccagttccagccctccaagtcccacggctcggagagcgactacatcgtcatgcccaacatcctggtcttgggtgcggcggtgatgatggagaataagcccatgaccctgaagctcatcatgaccttggcattcaccaccctcggcgaacgtgccttcatgaaccgcactgtgggtgagatcatgtggggctacaaggacccccttgtgaatctcatcaacaagtactttccaggcatgttccccttcaaggacaagttcggattatttgctgagctcaacaactccgactctgggctcttcacggtgttcacgggggtccagaacatcagcaggatccacctcgtggacaagtggaacgggctgagcaaggttgacttctggcattccgatcagtgcaacatgatcaatggaacttctgggcaaatgtggccgcccttcatgactcctgagtcctcgctggagttctacagcccggaggcctgccgatccatgaagctaatgtacaaggagtcaggggtgtttgaaggcatccccacctatcgcttcgtggctcccaaaaccctgtttgccaacgggtccatctacccacccaacgaaggcttctgcccgtgcctggagtctggaattcagaacgtcagcacctgcaggttcagtgcccccttgtttctctcccatcctcacttcctcaacgccgacccggttctggcagaagcggtgactggcctgcaccctaaccaggaggcacactccttgttcctggacatccacccggtcacgggaatccccatgaactgctctgtgaaactgcagctgagcctctacatgaaatctgtcgcaggcattggacaaactgggaagattgagcctgtggtcctgccgctgctctggtttgcagagagcggggccatggagggggagactcttcacacattctacactcagctggtgttgatgcccaaggtgatgcactatgcccagtacgtcctcctggcgctgggctgcgtcctgctgctggtccctgtcatctgccaaatccggagccaagagaaatgctatttattttggagtagtagtaaaaagggctcaaaggataaggaggccattcaggcctattctgaatccctgatgacatcagctcccaagggctctgtgctgcaggaagcaaaactgtagggtcctgaggacaccgtgagccagccaggcctggccgctgggcctgaccggccccccagcccctacaccccgcttctcccggactctcccagcagacagccccccagccccacagcctgagcctcccagctgccatgtgcctgttgcacacctgcacacacgccctggcacacatacacacatgcgtgcaggcttgtgcagacactcagggatggagctgctgctgaagggacttgtagggagaggctcgtcaacaagcactgttctggaaccttctctccacgtggcccacaggctgaccacaggggctgtgggtcctgcgtccccttcctcgggtgagcctggcctgtcccgttcagccgttgggccaggcttcctcccctccaaggtgaaacactgcagtcccggtgtggtggctccccatgcaggacgggccaggctgggagtgccgccttcctgtgccaaattcagtggggactcagtgcccaggccctggcacgagctttggccttggtctacctgccaggccaggcaaagcgcctttacacaggcctcggaaaacaatggagtgagcacaagatgccctgtgcagctgcccgagggtctccgcccaccccggccggactttgatccccccgaagtcttcacaggcactgcatcgggttgtctggcgcccttttcctccagcctaaactgacatcatcctatggactgagccggccactctctggccgaagtggcgcaggctgtgcccccgagctgcccccaccccctcacagggtccctcagattataggtgcccaggctgaggtgaagaggcctgggggccctgccttccgggcgctcctggaccctggggcaaacctgtgacccttttctactggaatagaaatgagttttatcatctttgaaaaataattcactcttgaagtaataaacgtttaaaaaaatggaaaaaaaaaaaaaa

SEQ ID NO: 3059 - protein, 509 aa, Homo sapiens
MGCSAKARWAAGALGVAGLLCAVLGAVMIVMVPSLIKQQVLKNVRIDPSSLSFNMWKEIPIPFYLSVYFFDVMNPSEILKGEKPQVRERGPYVYRESRHKSNITFNNNDTVSFLEYRTFQFQPSKSHGSESDYIVMPNILVLGAAVMMENKPMTLKLIMTLAFTTLGERAFMNRTVGEIMWGYKDPLVNLINKYFPGMFPFKDKFGLFAELNNSDSGLFTVFTGVQNISRIHLVDKWNGLSKVDFWHSDQCNMINGTSGQMWPPFMTPESSLEFYSPEACRSMKLMYKESGVFEGIPTYRFVAPKTLFANGSIYPPNEGFCPCLESGIQNVSTCRFSAPLFLSHPHFLNADPVLAEAVTGLHPNQEAHSLFLDIHPVTGIPMNCSVKLQLSLYMKSVAGIGQTGKIEPVVLPLLWFAESGAMEGETLHTFYTQLVLMPKVMHYAQYVLLALGCVLLLVPVICQIRSQEKCYLFWSSSKKGSKDKEAIQAYSESLMTSAPKGSVLQEAKL

SEQ ID NO: 3060 - DNA, 2443 bp, Homo sapiens
ataccaggggtgggcactgtcaagagacccagctttgacttcaaatgccacccagagggacaactgctcactttcagagcaggagcaggaggccagaggagagtgggtccctatgatccagacctcaagagagggttcctggacctcccacagaaagggattcaagaccagctgaaactgattagagccaagatagccaaccaaatgacttcaggaagacctcaggcttcattatcatctcatttccatgctaaaaaaacccagctccctagaacaatgggaaatattgggcacttcatcaggcgagttcaggtgcatttctagagattgtccaggtgctggtaacaataatagagaaccatccatatccacaagaggcagaacctcttccagcaaaatggtgctgcctcacccaaaggtggccgaggaggccgtcggaggaccacaaagctgcaagtggctttcctgcggcctgcagggaacaggtggaggacacttggaagggcacccaccccgggtctcacaggagtctgcacccgcaggtcacactggcattagcccctcatcctctggagttcatctcatccaggcgaagacagctggctggcctcagagggtgagacgcaactcgagggtaaaaacatttttacagggcatggacacaaaagtggcctttacctctggataagcttttaaaacttcccatttacatgtaaaggtgtactttctatgtgccaccaagaaacctaaagtgagtaaaaggtgtttcactttaatcaagttccccaatgagggggcacagctctgaaaagcactgtcacaacaggagattcgagggtgcatgcaaagcaatgtttctagaaaatgccaaaggaaacagacacaactccagtgtggactcccgcttccctgcactgctgctccatcctcagggcggaggccacatcgtccagctagctgtgagaacctcatcatgctccttgattgtgtgcagcaggtgtctgctgaagtcctccacactctgcctgtctcatccgctgagcagtgcctcctcccgattcagcacgtccctggtgccgactttctgcacgtgttcactttgaggctgcattgtgggcctgcaagaaatgcaaagctggttgaggctttattcaattcaaattcaagctgttaaatcgaggctctcagactcctgctgcctggccagtggagaaattaactttcacatatggctttgggatttctctctgtcatcctggtcgacgtgttctctcatttttctgaagtctgggacctcaacacagacatctgggtgaaggccttgacagcagcgctggtgcaaaatgaattgtcacatcacacccaacgttctcaacctttagaatctgaaagtaagaaaaacacctcaaacaaaacattaaagattgaataattgaaggcactatgcttggtgctgaagaaggtctaaggaggtctacaccacagaggctgcacccactcctcagccttgctgagccacaccattctcatctctacagcatccacctctcttggctcttgtaaggattgagacatgccaccaggcttactattgattctgagtaatcagcacagatttctaaaagaaactttatgggatgctgagacatgaataaaaacaactttattcctttggaaaggacaacccacatgctaagaagatgacactacacgttgttatagcccgaaaggccctctttccacaggggagcagtgaaaagtagaggttgcccatgtggattcccaagtcagatagatgtggattcagatcccagctctgctgcttgctacccaagagaccatggactgtggactctttaggtctcagggtttttgtttgttgtctgtttttcacttccaaaaccagaaaatgagaagatattttccataagatggcggtggagaagagaacttgatggaccttgcttggacaaaatgccttcaccgctaactcagtcagctatggcgatgggtcaaggacctggtggttttacagagaagacccttggtcaaatctttgtgaatgaagcaaccattctgatgttcaataacaggaatgcaccagtttataccaaactatctgtactattgagaacagcaaaaatatctgaccaaaaacaccaaagagtgacattttaaaagacatcaaagaactctcaaggcttccagagttggaaagatcaagaaagagagaatgcaacttcattaagtgactcaactccaaataggagcatttcaagagtatgtatttcaacaaagaagtattagaagatgacagtgtccttgcagtatcttttaggggctatcagaacatgatttctgctatattctatcatcggagccttaataatgttaactataattcaagggaagatcaaataaacttcacctttcaaggaaagga

SEQ ID NO: 3061 - protein, 146 aa, Homo sapiens
MLKKPSSLEQWEILGTSSGEFRCISRDCPGAGNNNREPSISTRGRTSSSKMVLPHPKVAEEAVGGPQSCKWLSCGLQGTGGGHLEGHPPRVSQESAPAGHTGISPSSSGVHLIQAKTAGWPQRVRRNSRVKTFLQGMDTKVAFTSG

SEQ ID NO: 3062 - DNA, 2807 bp, Homo sapiens
caggttgggttctgggacaggtgacccggcggcggggcgaggcagctggcggcgtcgcatggagggctctgggggcggtgcgggcgagcgggcgccgctgctgggcgcgcggcgggcggcggcggccgcggcggcggctggggcgttcgcgggccggcgcgcggcgtgcggggccgtgctgctgacggagctgctggagcgcgccgctttctacggcatcacgtccaacctggtgctattcctgaacggggcgccgttctgctgggagggcgcgcaggccagcgaggcgctgctgctcttcatgggcctcacctacctgggctcgccgttcggaggctggctggccgacgcgcggctgggccgggcgcgcgccatcctgctgagcctggcgctctacctgctgggcatgctggccttcccgctgctggccgcgcccgccacgcgagccgcgctctgcggttccgcgcgcctgctcaactgcacggcgcctggtcccgacgccgccgcccgctgctgctcaccggccaccttcgcggggctggtgctggtgggcctgggcgtggccaccgtcaaggccaacatcacgcccttcggcgccgaccaggttaaagatcgaggtccggaagccactaggagattttttaattggttttattggagcattaacctgggagcgatcctgtcgttaggtggcattgcctatattcagcagaacgtcagctttgtcactggttatgcgatccccactgtctgcgtcggccttgcttttgtggtcttcctctgtggccagagcgttttcatcaccaagcctcctgatggcagtgccttcaccgacatgttcaagatactgacgtattcctgctgttcccagaagcgaagtggagagcgccagagtaatggtgaaggcattggagtctttcagcaatcttctaaacaaagtctgtttgattcatgtaagatgtctcatggtgggccatttacagaagagaaagtggaagatgtgaaagctctggtcaagattgtccctgttttcttggctttgataccttactggacagtgtatttccaaatgcagacaacatatgttttacagagtcttcatttgaggattccagaaatttcaaatattacaaccactcctcacacgctccctgcagcctggctgaccatgtttgatgctgtgctcatcctcctgctcatccctctgaaggacaaactggtcgatcccattttgagaagacatggcctgctcccatcctccctgaagaggatcgccgtgggcatgttctttgtcatgtgctcggcctttgctgcaggaattttggagagtaaaaggctgaaccttgttaaagagaaaaccattaatcagaccatcggcaacgtcgtctaccatgctgccgatctgtcgctgtggtggcaggtgccgcagtacttgctgattgggatcagcgagatctttgcaagtatcgcaggcctggaatttgcatactcagctgcccccaagtccatgcagagtgccataatgggcttgttctttttcttctctggcgtcgggtcgttcgtgggttctggactgctggcactggtgtctatcaaagccatcggatggatgagcagtcacacagactttggtaatattaacggctgctatttgaactattacttttttcttctggctgctattcaaggagctaccctcctgcttttcctcattatttctgtgaaatatgaccatcatcgagaccatcagcgatcaagagccaatggcgtgcccaccagcaggagggcctgaccttcctgaggccatgtgcggtttctgaggctgacatgtcagtaactgactggggtgcactgagaacaggcaagactttaaattcccataaaatgtctgacttcactgaaacttgcatgttgcctggattgatttcttctttccctctatccaaaggagcttggtaagtgccttactgcagcgtgtctcctggcacgctgggccctccgggaggagagctgcagatttcgagtatgtcgcttgtcattcaaggtctctgtgaatcctctagctgggttcccttttttacagaaactcacaaatggagattgcaaagtcttggggaactccacgtgttagttggcatcccagtttcttaaacaaatagtatcacctgcttcccatagccatatctcactgtaaaaaaaaaaaattaataaactgttacttatatttaagaaagtgaggattttttttttttaaagataaaagcatggtcagatgctgcaaggattttacataaatgccatatttatggtttccttcctgagaacagtcttgctcttgccatgttctttgatttaggctggtagtaaacacatttcatctgctgcttcaaaaagtacttactttttaaaccatcaacattacttttctttcttaaggcaaggcatgcataagagtcatttgagaccatgtgtcccatctcaagccacagagcaactcacagggtacttcacaccttacctagtcagagtgcttatatatagctttattttggtacgattgagactaaagactgatcatggttgtatgtaaggaaaacattcttttgaacagaaatagtgtaattaaaaataattgaaagtgttaaatgtgaacttgagctgtttgaccagccacatttttgtattgttactgtacgtgtatctggggcttctccgtttgttaatactttttctgtatttgttgctgtatttttggcataactttattataaaaaaaaaaaaaaaaaaaaaaaaaaaaaaaaaaaaaa

SEQ ID NO: 3063 - protein, 577 aa, Homo sapiens
MEGSGGGAGERAPLLGARRAAAAAAAAGAFAGRRAACGAVLLTELLERAAFYGITSNLVLFLNGAPFCWEGAQASEALLLFMGLTYLGSPFGGWLADARLGRARAILLSLALYLLGMLAFPLLAAPATRAALCGSARLLNCTAPGPDAAARCCSPATFAGLVLVGLGVATVKANITPFGADQVKDRGPEATRRFFNWFYWSINLGAILSLGGIAYIQQNVSFVTGYAIPTVCVGLAFVVFLCGQSVFITKPPDGSAFTDMFKILTYSCCSQKRSGERQSNGEGIGVFQQSSKQSLFDSCKMSHGGPFTEEKVEDVKALVKIVPVFLALIPYWTVYFQMQTTYVLQSLHLRIPEISNITTTPHTLPAAWLTMFDAVLILLLIPLKDKLVDPILRRHGLLPSSLKRIAVGMFFVMCSAFAAGILESKRLNLVKEKTINQTIGNVVYHAADLSLWWQVPQYLLIGISEIFASIAGLEFAYSAAPKSMQSAIMGLFFFFSGVGSFVGSGLLALVSIKAIGWMSSHTDFGNINGCYLNYYFFLLAAIQGATLLLFLIISVKYDHHRDHQRSRANGVPTSRRA

SEQ ID NO: 3064 - DNA, 2721 bp, Homo sapiens
gtcggcggcggcggggccggtcgatggcccgggcggcggcggcggcatgcggctcctgttcctggcggtgctgcggccacacaccggcaacgcggtcacggcccagcgcgttcgggcccatctagaggctgcagggcacgtgtgcgttttgaaggatgcctttgactttgaaagccgatctgagattgcaaacctcatcttggctgagaactgcgaggctgccctggctcttcatctctataggggaggcaggcttttgcaaggccaccgaatcccttttggagtcatctttggtggaactgatgtaaatgaagatgccaaccaggcggaaaaaaacacagtcatgggcagagttcttgaggaagccagatttgctgtcgctttcacagagtcaatgaaggaaatggcacaagcgcagtgggtcgatccagtgtttacaagggaagtgaaagccaaagtgaaaagagccgctggggtacgattgattggagagatgcctcaagaagatctgcacgcggtggtgaagaattgcttcgcggtggtgaatagctctgtctctgaaggcatgtcagctgcaattttggaggcaatggatttagaagtaccggtattggccaggaacatccccgggaatgctgccgtggtgaagcatgaagtcacagggctactgttttccaatcctcaggagtttgttcatctggcaaagagactggttagtgatcctgcattagaaaaggaaatcgtagtgaacggaagggaatacgtgagaatgtatcattcatggcaggtggaaagagacacctaccaacagctcatcaggaagctggaaggaagcactgaagattgagggccccgcctcatcagacacctgctctctgacacacagctctgggtgcacactcagagacagagttctggatcacgtgggcccagtgcagttcaaataaaaccagcctcagcggaatcctagaaaatgttagtcgtgagtccccagagccactgcattcatcccatatccttctgtgcgttcagatgctgtcccaggcgtgttcaccagccagtcctgatggaggtgcatgagtgactgggttgactgggacagggaaaggggaactggttttcagggaatttgggagagaatttgattacctgccttagggctttggtgtggacaatagaggcttattttcaagcagtcatggttcagactcctcccgcctgccttctgaccaacctctccccatcgttgccagtttgaaaggcaaaagcaaaacagacgtgtcagctgagccgagtcctcgcaggatttttgttgtgatctcaggactctgacaggcacgtgggtgacccgaggcttctctgaacactagaaagcgctgtgagtgagctcacgcccggcacagctcacttttcaatggtggaattgaaagttgtgctttttagaaaagtggccaggctgcccgcaggccccgcccacctcttggctgaatttgagtggaaaaccaggaaggaacaagcgccacgtcacgcatagcctgcaaatcgcccgcgtgaccctgagatggaggcctgaggctttgggtccagggtgggctcttccccttcccacatcagggacccggggatggatgtcggaagggtcaccagcctccagcctttggcaggatggagcttgggtctgcagggctttgcagccacacagcgaggtcagtccggggccagccgcgccatcatggtaatggtggcctcgccccatccatgtcatccatgtcacatgaggacgtgcagtcttccttgtcctctcctagtggaatttgcctgggagaacctccactgaatactgaaattgttgcatgcctgtggattccttacgacaatggggaacgcggtgtttcccacctcttgtgggtagaaagcagtctgctttgaggaggcgagaaggcaaagccagggcagggcgttgctgtgggaagcgttcggtgaaagcgggtttcgacgcttaggagggccgagggagaagattccaccagcattgtccttgcttcaagttttaggatgtctgaactttcagctttcatgttttcaaccatcatttttttaatggcacaacctacatcttgtttttaaaagaagtagcctcaaattaaactccttaaactctgatgccctggggatgagaacaactagcttggatctcgtgccgtgtaattcaatgtttcattccgctgcctccatcatgtaatagaatcgctttccagaaaggcagttaactggaagcagcagaggctcccagccgtgagaggactgctcaacaatgccccccatcgccgcccccccacccctcgcaccccttgtgttttccctctgaggggcccaagggttatggctttcatgtctaggtgtggggacagaggagggagaggcagatcctgggccgggagaggatggcctggtctgaatctggagtaattaatgccacccaaagaaaaggccctgccaggtccaatgttgtcttagatctgatgatgctgctatttacaaaacactgatcgtccgaaagcttgaatctgttcctcctcgaatgaccctgtagatgcctgacctccaccgtacctccacatcactattcatgtccttctaggaaaatgtgcacatgcctcacgcactatgtgggaagggcgtgtttttaaattaataaagtgtgtcaccattagccatacg

SEQ ID NO: 3065 - protein, 266 aa, Homo sapiens
MRLLFLAVLRPHTGNAVTAQRVRAHLEAAGHVCVLKDAFDFESRSEIANLILAENCEAALALHLYRGGRLLQGHRIPFGVIFGGTDVNEDANQAEKNTVMGRVLEEARFAVAFTESMKEMAQAQWVDPVFTREVKAKVKRAAGVRLIGEMPQEDLHAVVKNCFAVVNSSVSEGMSAAILEAMDLEVPVLARNIPGNAAVVKHEVTGLLFSNPQEFVHLAKRLVSDPALEKEIVVNGREYVRMYHSWQVERDTYQQLIRKLEGSTED

SEQ ID NO: 3066 - DNA, 5815 bp, Homo sapiens
ggccactcttcgctcgggtaaacaggaaaggaaataccccttgtggattaaaatttaaaaaaaattctgttggggtcgaaggagggaggtggggtttgcctgcgcgcgtgttggactccggagagcaactcaggagcccgcgcggtcgtcgcctcccggcctggccatggactggcgggaagagggagcagggcgcccgggctgctcgggcccctagccgggcgctccctcgccaccggccccgctgcgggcctctaggggactgagacggtctcttgttcgcctggacggcgccggggagcggaggatctgcgctccgggtctccaggatgtgcccgtctgagatggggacgctgtggcaccactggtcgccggtactcatcagcctggccgccctgttttccaaagtgacggaaggtcgagggatccttgagagcatccagaggttttccttgctgcccacctacctccccgtgacctaccacatcaacaacgcggacgtctccttcttcctgaaggaggccaaccaggatatcatgaggaactccagcctgcagtcccgggtggagtcatttctgatttacaaatccaggaggctgcctgtcctcaatgccagctacgggcctttctccatcgagcaagtggtgccccaggatttaatgctaccttccaacccatttggattcaccaacaaattttctcttaactggaaactaaaagcccacatcctgcgggacaaagtctacctgagccggcccaaagtgcaggttctgttccacatcatgggcagagactgggacgaccgcagcgccggggagaagctgccgtgcctgagggtctttgctttccgagagacccgagaggtgcggggcagctgccggctgcagggggacctggggctgtgcgtggccgagctggagctcctgtccagctggttcagcccccccacggtggttgccgggaggaggaagtccgtggaccagccggaggggacccccgtggagctctactacaccgtgcacccagggggtgagagaggggactgcgtcagggaagacgcgaggagaagcaatgggatccggacaggccacagtgacatcgatgagtccgggccccccttgcagaggatcgggagcatcttcctttatcagacacacaggaaaccctccctgagagaactgcgtctggacaacagcgtggccatccactatataccaaagaccgtgaggaaaggagacgtgctgacttttcctgtttccatctccagaaattccactgaagatcgcttcacgttgagggcaaaggtgaagaaaggcgtgaacatcatcggcgtgcgagccagcagcccttccatttgggatgtcaaggagcgcacggattatactggaaagtatgcaccagctgtcatcgtttgtcagaagaaagcagctggctcagaaaacagtgcggatggcgcctcctacgaggtcatgcagatcgatgtggaggtggaagagcctggtgacctgccagccacacagctggtcacgtggcaggtcgagtaccccggagagatcacgtctgacttgggagtgtccaagatctatgtgagcccaaaggacttgattggagttgtgccgctggctatggaggcagaaatcctgaacacagccatcctcacggggaagacggtggccgtcccggtgaaagtggtctccgtggaggacgacggcacagtgacagagctgctggagtctgtggagtgtagatcgtctgatgaagacgtgattaaggtttctgacagatgtgactacgtctttgtcaatgggaaagaaatgaaaggcaaggtcaacgtggtggtgaacttcacctaccagcacctgagcagccccctggagatgacggtgtgggtgccccggcttccgctgcagatcgaggtctccgacaccgagctcaatcagatcaagggttggagagtgcccatcgtctccagcaggaggcctgccggggacagtgaagaggaggaggatgatgagcggaggggccgcggctgcaccctgcagtaccagcacgccatggtgcgggtcctgacgcagtttgtggctgaagcggccggccctgggggacacctggcccacctgctgggctcagactggcaagtggacatcacggagctgataaatgacttcatgcaggtggaggagcccaggatcgccaagctgcaaggcggacagattctgatggggcaggagcttgggatgaccaccattcagatcctgtctcctctgtcagacaccatcctcgctgaaaagaccatcactgtgctggacgagaaggtgaccatcacagacctcggggtgcagctggtgacagggctgtcactctccttgcagctcagcccaggaagcaacagggccatctttgccactgcagtgactcaggaacttctgcagaggccaaaacaggaagcagccatcagttgctgggtccagttcagtgatggctcagtcacgcccttggatatttacgatgggaaagacttctccttgatggccacatctttggatgagaaggtagtctccatccaccaagaccccaaattcaagtggcctatcattgctgcggaaacagaaggacaaggcaccctggtcaaggtggaaatggttattagtgaatcctgccagaaatccaagcggaagagtgtgttagctgttggaacggcaaacatcaaagttaaatttggccaaaacgatgctaaccccaacaccagtgacagcagacacacaggggcaggggttcacatggaaaacaatgtcagtgacagaaggcccaaaaaaccctcgcaggaatgggggagtcaggaaggacagtactatggcagttcttctatgggactcatggagggacggggcaccacgacagacaggtccatcctgcagaagaagaaaggccaggaaagccttttagatgacaacagccacttgcagaccatccccagcgacctcaccagcttcccagcccaggtggacctccccagaagcaatggggaaatggatgggaatgaccttatgcaggcatccaaagggctgagcgacttagaaattgggatgtatgctttgttgggagtcttctgtttggccattttggtcttcttgataaactgtgtgacctttgcattaaaatacagacacaaacaggttcccttcgaggagcaggaagggatgagtcactctcatgactgggttgggttaagcaaccggacagagctgttggagaatcacatcaactttgcctcctcgcaagatgagcaaatcactgccattgacaggggcatggatttcgaggaaagtaaatatctcctcagcacaaactcccaaaaaagcatcaatgggcagctgttcaaacctttgggacccatcatcattgatgggaaagatcagaaaagtgagcccccaacatcccctacctcaaaaaggaaaagggtaaaatttaccaccttcaccgccgtctcctcagacgacgagtaccccaccaggaactccatcgtgatgagtagcgaggatgacattaagtgggtctgccaggatctggaccctggggactgcaaagagctgcacaactacatggagaggttacatgaaaatgtgtaagccagacacacacagacattggttctcactcacctttcagcctttaattccaggatgtgtagcaacggtgcccccggaagagaaacaaagcagcaggacaaaataaggatgacactatccatacagcctcagccaatgaccccggctcggcggcgaggcctggagtccgcatcgacgcacacattccagagtacagtgtcttgcttaagaggtttatcatgcatggcaagatttttaagacttgaaacaaaaacgagttctgaatcactgagcgtctgagagcgtccaggaaagaacagcctctctctctcgaatcaaagcaatttggatattgtaaaatccacatggctccaatattcaatattgcagactatggaagaaaagtacaactcaggtggagcatccatggatcgcatccatggatcgcatccatggatcaatgggaggaagcgtgtcatcgaaactggagcagcacatcttgctgtgagcgcgatcacaggcagtccagtgccgccgtcagctgtgggaggcatgattgtgagtcactgtctctcaaaggctgggccagagctgtctcagatcatggacaggccaaggaagtggctgacaaggactgaaagggaacatgtgggctaacaggccacaaatacctttgtaactacatgccaaggacaaacacatggacgcaaatcctctgagcccttcagggtacttctttatttgtaaactaaggatactgggcatagaatttgaatcaggttcaaagaaccacgctcttttgattcatatcaagttcacaatgtatccatttctattcctccactgcattgccatcctccccaaagccgttggtcacctgtgggtgggggagggagagggcagtttgtagtatttgctgggtcttttttctccccctgggttttgtgtcaactcccaagtgacattctgtagagaagctccccccgcaacctgggcatatgccccacgccgtccgtctttgaagaggctggtctctaggcatgggcggtagtcacggtgaattccataccaggggatatacattcccttgctttactagaaagaaaacagggccacttgggatgggtctttcactgttcatggcagatctcctgtccaaagatgtggcctcgaggctgttgagacaaatcggggtgcctgtgtggaacgtgcagggcgtgtggagttgggggggttctgggtgtgaaagtggtggatccagcaggaagcccagcctcacacacaccggacagcacagaaaccttcttcatcttggaggtgcgaagggataaggggcatcagtgcatgtggtgaagatgcaggtttgcaagcacttggtcctgcagtcagccccgaaaggttcagcattgcttaagaccagccatgactctggatatccctgaatcccttcacttatgaagcctatgaagatgggggcaaggatacatcagagaattcctgcctcatctcacgctcactccaaggtagagaatggtgtgttgggtgattgccagccagataggatcctgcgaaagatggtcgggggcagcgggtggtgggcagaagaggccgtgctgttgaattgatcttctatttttccctctggtcattttctctctctctctgctcttcagttgtctgttttccagtctctctgtgtgtctgtctctgtatctctctcctcctttgaacctatcttctccctgcttcctctccatctcatctctgtaattttgagtgtgtgtctttactccttcttcctctccatagaattgaattctctttagatcatgtgtgtgtaaatttcaccagtttaccctcccaaccttagccctctcccctgcaactgtggtgctcttgagactgaggtttctgcagccagtaagtcacctgctcctgtccgcaagcttacctaccttgtttggttgggtgattaagctgtcaccccttttcaatgagaatcctttgctttcagtaacgtcctcatatttctttccattcttacctgtgtcatgttctgttgaatactgcagccgctgcccgcttccaaatccatctgcgtgtagaatgtactgtagattgtaagaatgtaatatatatttataaacttactgactgtaaatataaagtttgcattcagtgacaaaaaaaaaaaaaaaaaaaaaaaa

SEQ ID NO: 3067 - protein, 1099 aa, Homo sapiens
MCPSEMGTLWHHWSPVLISLAALFSKVTEGRGILESIQRFSLLPTYLPVTYHINNADVSFFLKEANQDIMRNSSLQSRVESFLIYKSRRLPVLNASYGPFSIEQVVPQDLMLPSNPFGFTNKFSLNWKLKAHILRDKVYLSRPKVQVLFHIMGRDWDDRSAGEKLPCLRVFAFRETREVRGSCRLQGDLGLCVAELELLSSWFSPPTVVAGRRKSVDQPEGTPVELYYTVHPGGERGDCVREDARRSNGIRTGHSDIDESGPPLQRIGSIFLYQTHRKPSLRELRLDNSVAIHYIPKTVRKGDVLTFPVSISRNSTEDRFTLRAKVKKGVNIIGVRASSPSIWDVKERTDYTGKYAPAVIVCQKKAAGSENSADGASYEVMQIDVEVEEPGDLPATQLVTWQVEYPGEITSDLGVSKIYVSPKDLIGVVPLAMEAEILNTAILTGKTVAVPVKVVSVEDDGTVTELLESVECRSSDEDVIKVSDRCDYVFVNGKEMKGKVNVVVNFTYQHLSSPLEMTVWVPRLPLQIEVSDTELNQIKGWRVPIVSSRRPAGDSEEEEDDERRGRGCTLQYQHAMVRVLTQFVAEAAGPGGHLAHLLGSDWQVDITELINDFMQVEEPRIAKLQGGQILMGQELGMTTIQILSPLSDTILAEKTITVLDEKVTITDLGVQLVTGLSLSLQLSPGSNRAIFATAVTQELLQRPKQEAAISCWVQFSDGSVTPLDIYDGKDFSLMATSLDEKVVSIHQDPKFKWPIIAAETEGQGTLVKVEMVISESCQKSKRKSVLAVGTANIKVKFGQNDANPNTSDSRHTGAGVHMENNVSDRRPKKPSQEWGSQEGQYYGSSSMGLMEGRGTTTDRSILQKKKGQESLLDDNSHLQTIPSDLTSFPAQVDLPRSNGEMDGNDLMQASKGLSDLEIGMYALLGVFCLAILVFLINCVTFALKYRHKQVPFEEQEGMSHSHDWVGLSNRTELLENHINFASSQDEQITAIDRGMDFEESKYLLSTNSQKSINGQLFKPLGPIIIDGKDQKSEPPTSPTSKRKRVKFTTFTAVSSDDEYPTRNSIVMSSEDDIKWVCQDLDPGDCKELHNYMERLHENV

SEQ ID NO: 3068 - DNA, 501 bp, Homo sapiens
cccaccgcctccttctggatggcaggtgtccctctcggctgagcaggtgtctgggaccatgacatccaacctgggctctcctggcccccagagaagagctgcccagtgcatgtgctggctgcaccgtgacgtcccctatgaacgaggcccacaggcagtggctggctggggggatgcccctgccctgagctggagtctccccaggtggctgcttcttccccaccccgagggtcacagcccagcccaagctccaagggaatggagcagctgcctgcaccaagcttccctcctctggagaaagcacctcctcttctccctcacgtgctccctgatgaccgccaggctccttgacatggttcccaggaccagcctctcccagggtccctactcccagtaccccagtcctcaccatttgtgacccttcagcccctgctgaaccctgccagccccaggacaggccacagctgtcatgccacctcccagccatgatgaatggggaac

SEQ ID NO: 3069 - protein, 119 aa, Homo sapiens
MTSNLGSPGPQRRAAQCMCWLHRDVPYERGPQAVAGWGDAPALSWSLPRWLLLPHPEGHSPAQAPREWSSCLHQASLLWRKHLLFSLTCSLMTARLLDMVPRTSLSQGPYSQYPSPHHL

SEQ ID NO: 3070 - DNA, 1630 bp, Homo sapiens
gttgctgaagcttcatcctttgctctcattctgtaagtcatagaaaagtttgaaacattctgtctgtggtagagctcgggccagctgtagttcattcgccagtgtgcttttcttaatatctaagatggtgcgtgagcagtacactacagccacagaaggcatctgcatagagaggccagagaatcagtatgtctacaaaattggcatttatggctggagaaagcgctgtctctacttgtttgttcttcttttactcatcatcctcgttgtgaatttagctcttacaatttggattcttaaagtgatgtggttttctccagcaggaatgggccacttgtgtgtaacaaaagatggactgcgcttggaaggggaatcagaatttttattcccattgtatgccaaagaaatacactccagagtggactcatctctgctgctacaatcaacccagaatgtgactgtaaatgcgcgcaactcagaaggggaggtcacaggcaggttaaaagtcggtcccaaaatggtagaagtccagaatcaacagtttcagatcaactccaacgacggcaagccactatttactgtagatgagaaggaagttgtggttggtacagataaacttcgagtaactgggcctgaaggggctctttttgaacattcagtggagacaccccttgtcagagccgacccgtttcaagaccttagattagaatcccccactcggagtctaagcatggatgccccaaggggtgtgcatattcaagctcacgctgggaaaattgaggcgctttctcaaatggatattctttttcatagtagtgatggaatgcttgtgcttgatgctgaaactgtgtgcttacccaagctggtgcaggggacgtggggtccctctggcagctcacagagcctctacgaaatctgtgtgtgtccagatgggaagctgtacctgtctgtggccggtgtgagcaccacgtgccaggagcacagccacatctgcctctgagctgcctgcgtcctctcggtgagctgtgcagtgccggccccagatcctcacacccagggagcagctgcacatcgtgaaagactgaggcagcgtggatgggaagtaaacgcttccagaggaactcagaaaaaattatgtgccagtgaaagtgtttggacaaaaactacatgatctcaaaatgcacgtggatgtgagacacaaaagttgacaaaatggaaaagcaatgtgtttttccactggattaattttcaccggaacaattgcgaattctctctgcctcgcctccccctatcttgtccgtgtgggcacacactgagtgttgagttgccgtgtggagttaatgtatgacgctccactgtggatatctaatgccctgttgagagtagccttgctcagtactaaaatgccccaaagttctatacagcatttcctttatagcattcaaacctcacatcctcccttcagtttaatgcaagtaagtcaggtttcacaagaaaattttcaagttttgaagggaatttgaggttgatctggttttcaagatgtagttaaaggaataaatcactcaaaattaaactttctgtatatagtcaataagcaataaaaacctcatttttcagagttaaaaaa

SEQ ID NO: 3071 - protein, 291 aa, Homo sapiens
MVREQYTTATEGICIERPENQYVYKIGIYGWRKRCLYLFVLLLLIILVVNLALTIWILKVMWFSPAGMGHLCVTKDGLRLEGESEFLFPLYAKEIHSRVDSSLLLQSTQNVTVNARNSEGEVTGRLKVGPKMVEVQNQQFQINSNDGKPLFTVDEKEVVVGTDKLRVTGPEGALFEHSVETPLVRADPFQDLRLESPTRSLSMDAPRGVHIQAHAGKIEALSQMDILFHSSDGMLVLDAETVCLPKLVQGTWGPSGSSQSLYEICVCPDGKLYLSVAGVSTTCQEHSHICL

SEQ ID NO: 3072 - DNA, 8192 bp, Homo sapiens
gtcgatttggtcagacaacgccaccacttgttgattttctcaaggacattttgagaagatatccagaaggaggacagattcttaaggaattaattcagaatgcagaagatgctggggcgacagaagttaaatttttatatgatgaaactcaatacggaacagagactctttggtcaaaagatatggcgccatatcaggggccagctctctatgtgtacaacaacgcggttttcaccccagaggactggcacggcattcaagaaatagcaagaagcaggaaaaaggatgatcctctgaaggtcggaagatttggaattgggtttaattctgtctatcatataacagatgttccttgtatctttagtggtgaccaaatcgggatgctagatcctcatcaaacactttttggcccacatgaatcaggccaatgttggaatctcaaagatgacagcaaagaaattagtgaactttcagaccagtttgcaccatttgttggcatttttggaagcaccaaggaaacatttataaacggcaattttccaggaacatttttccgtttccctcttcgcctacaaccttcacaacttagtagtaacctctacaataagcagaaggttcttgagttgtttgagtcttttagggcagatgcagacacagtgctgctctttctgaaaagtgtgcaggatgtttccttatatgtccgagaggctgacggaacagagaaactggtgtttagagtgacttcgagtgagagtaaggcactgaaacatgagcggccgaattctataaagattctgggaactgctataagtaactattgtaaaaagactccaagcaataacatcacctgtgtaacatatcacgtaaatattgttttagaagaggagagtactaaggatgcacagaaaacatcttggttggtgtgtaacagtgtgggtgggcgagggatcagtagtaagcttgactctttagctgatgaactgaaatttgtcccaatcattggaatagccatgcctttatcaagcagagatgatgaagcaaaaggagcaacgtctgatttctcaggaaaagcattttgtttccttcctttaccacctggtgaggaaagcagcacaggcctcccagttcacatcagtgggttctttggccttactgataaccgcaggagcataaaatggagagagctggaccagtggagagacccggcagccttatggaatgagtttcttgtcatgaatgttgtccccaaagcttatgctactctgatcttagattcaataaaacgtctggagatggaaaagagctctgatttccccttgtcagttgatgttatctataagctttggccggaggcgagcaaagtcaaggtgcactggcaaccggtgttagagcctctattcagcgagctgttgcagaatgcagtgatttattcaattagctgtgactgggtcaggttggagcaggtgtacttctcagaacttgatgaaaatttagaatacacaaaaactgtgctcaactacctccagagctcagggaagcagattgccaaggtaccagggaatgtggatgctgctgttcagctcacagctgcctctggcacaacacctgtgaggaaggtgacgcccgcgtgggtgcggcaggtgctgcggaagtgtgcacacctgggctgtgctgaagaaaagcttcaccttctagaatttgtgctttctgaccaagcctacagtgagctgcttgggctggagctgctccctttacaaaatggcaattttgtccccttctcctcatctgtatcagaccaagatgtcatttatattacctcagcagaatatccaaggtcccttttcccaagtcttgaaggaagatttattttggataacttgaaacctcaccttgtggctgctttaaaggaagctgcccaaacccgaggaagaccatgtactcagctgcagcttctaaatccagaacgatttgcacgtcttatcaaggaagtaatgaatacattctggcctggcagagaattgattgttcaatggtatccatttgatgaaaacagaaatcacccatctgtttcatggcttaagatggtttggaaaaatctttatatacatttttcagaggatttgactttatttgatgagatgccacttatccccagaactatactagaggaaggtcagacatgtgtggaactcattagactcaggattccatcgttagtcattttagacgatgaatctgaagcacagcttccagaatttttagcagacattgtacaaaaacttggagggtttgtccttaaaaaattagatgcatctatacaacatccgcttattaaaaaatatattcattcaccattaccaagtgctgttttgcagataatggagaagatgccattgcagaaattgtgtaatcaaataacttcgctacttccaacacacaaagatgccctgaggaagttcttggctagtttaaccgatagcagtgagaaagagaaaagaattattcaagaattggcaatattcaagcgcattaaccattcttctgatcagggaatttcctcttatacaaaattgaaaggttgtaaagtcttacaccatactgccaaactcccagcagatctgcgactttctatttcagtaatagacagtagtgatgaagctactattcgtctggcaaacatgttgaaaatagaacagttaaagaccactagctgcttaaagcttgttttaaaagatattgaaaatgcattttattcacatgaagaggtaacacagcttatgttatgggtccttgagaatctatcttctcttaaaaatgagaatccaaatgtgcttgagtggttaacaccattaaaattcatccagatatcacaggaacagatggtatcagctggtgaactctttgaccctgatatagaagtactaaaggatctcttttgtaatgaagaaggaacctatttcccaccctcagtttttacctcaccagatattcttcactccttaagacagattggtttaaaaaacgaagccagtctcaaagaaaaggatgttgtgcaagtggcaaaaaaaattgaagccttacaggtcggtgcttgtcctgatcaagatgttcttctgaagaaagccaaaaccctcttactggttttaaataagaatcacacactgttgcaatcatctgaaggaaagatgacattgaagaaaataaaatgggttccagcctgcaaggaaaggcctccaaattatccaggctctttggtctggaaaggagatctctgtaatctctgtgcaccaccagatatgtgtgatgtaggccatgcaattctcattggctcctcacttcctcttgttgaaagtatccatgtaaacctggaaaaagcattagggatcttcacaaaacctagccttagtgctgtcttaaaacactttaaaattgttgttgattggtattcttcaaaaacctttagtgatgaagactactatcaattccagcatattttgcttgagatttacggattcatgcatgatcatctaaatgaagggaaagattcttttagagccttaaaatttccatgggtttggactggcaaaaagttttgtccacttgcccaggctgtgattaaaccaatccatgatcttgaccttcagccttatttgcataatgtacctaaaaccatggcaaaattccaccaactatttaaggtctgtggttcaatagaggagttgacatcagatcatatttccatggttattcagaagatatatctcaaaagtgaccaagatctcagtgaacaagaaagcaaacaaaatcttcatcttatgttgaatattatcagatggctgtatagcaatcagattccagcaagccccaacacaccagttcctatacatcatagcaaaaatccttctaaacttatcatgaagccaattcacgaatgctgttattgtgacattaaagttgatgaccttaatgacttacttgaagattctgtggaaccaatcattttggtgcatgaggacatacccatgaaaactgcagaatggctaaaagttccatgccttagtacaagactgataaatcctgaaaacatgggatttgagcagtcaggacaaagagagccacttactgtaagaattaaaaatattctggaagaatacccttcagtgtcagatatttttaaagaactacttcaaaacgctgatgatgcaaatgcaacagaatgcagtttcttgattgatatgagaagaaatatggacataagagagaatctcctagacccagggatggcagcttgtcatggacctgctttgtggtcattcaacaattctcaattctcagattcagattttgtgaacataactaggttaggagaatctttaaaaaggggagaagttgacaaagttggaaaatttggtcttggatttaattctgtgtaccatatcactgacattcccatcattatgagtcgggaattcatgataatgttcgatccaaacataaatcatatcagtaaacacattaaagacaaatccaatcctgggatcaaaattaattggagtaaacaacagaaaagacttagaaaatttcctaatcagttcaaaccatttatagatgtatttggctgtcagttacctttgactgtagaagcaccttacagctataatggaacccttttccgactgtcctttagaactcaacaggaagcaaaagtgagtgaagttagtagtacgtgctacaatacagcagatatttattctcttgtggatgaatttagtctctgtggacacaggcttatcattttcactcagagtgtaaagtcaatgtatttgaagtacttgaaaattgaggaaaccaaccccagtttagcacaagatacagtaataattaaaaaaaaatcctgctcttccaaagcattgaacacacctgtcttaagtgttttaaaagaggctgctaagctcatgaagacttgcagcagcagtaataaaaagcttcccagtgatgaaccaaagtcatcttgcattcttcagatcacagtggaagaatttcaccatgtgttcagaaggattgctgatttacagtcgccactttttagaggtccagatgatgacccagctgctctctttgaaatggctaagtctggccaatcaaaaaagccatcagatgagttgtcacagaaaacagtagagtgtaccacgtggcttctgtgtacttgcatggacacaggagaggctctgaagttttccctgagtgagagtggaagaagactaggactggttccatgtggggcagtaggagttcagctgtcagaaatccaggaccagaagtggacagtgaaaccacacattggagaggtgttttgctatttacctttacgaataaaaacaggcttgccagttcatatcaatgggtgctttgctgttacatcaaataggaaagaaatctggaaaacagatacaaaaggacgatggaataccacgttcatgagacatgttattgtgaaagcttacttacaggtactgagtgtcttacgggacctggccactagtggggagctaatggattatacttactatgcagtatggcccgatcctgatttagttcatgatgatttttctgtaatttgccaaggattttatgaagatatagctcatggaaaagggaaagaactgaccaaagtcttctctgatggatctacttgggtttccatgaagaacgtaagatttctagatgactctatacttaaaagaagagatgttggttcagcagccttcaagatatttttgaaatacctcaagaagactgggtccaaaaacctttgtgctgttgaacttccttcttcggtaaaattaggatttgaagaagctggctgcaaacagatactacttgaaaacacattttcagagaaacagtttttttctgaagtgttttttccaaatattcaagaaattgaagcagaacttagagatcctttaatgatctttgttctaaatgaaaaagttgatgagttctcgggagttcttcgtgttactccatgtattccttgttccttggaggggcatcctttggttttgccatcaagattgatccaccccgaaggacgagttgcaaagttatttgatattaaagatgggagattcccttatggttctactcaggattatctcaatcctattattttgattaaactagttcagttaggtatggcaaaagatgatattttatgggatgatatgctagaacgtgcagtgtcagtagctgaaattaataaaagtgatcatgttgctgcatgcctaagaagtagtatcttattgagtcttatcgatgagaaactaaaaataagggatcctagagcaaaggattttgctgcaaaatatcaaacaatccgcttccttccatttctgacaaaaccagcaggtttttctttggactggaaaggcaacagttttaagcctgaaaccatgtttgcagcaactgacctttatacagctgaacatcaagatatagtttgtcttttgcaaccaattctaaatgaaaattcccattcttttagaggttgtggttcagtgtcattggctgttaaagagtttttgggattactcaagaagccaacagttgatctggttataaaccaattgaaagaagtagcaaaatcagttgatgatggaattacactgtaccaggagaatatcaccaatgcttgctacaaataccttcatgaagccttgatgcaaaatgaaatcactaagatgtcaattattgataagttaaaaccctttagcttcattctagttgagaatgcatatgttgactcagaaaaggtttcttttcatttaaattttgaggcggcaccatacctttatcagttgcctaataagtataaaaataatttccgcgaactttttgaaaccgtgggtgtgaggcagtcatgcactgttgaagattttgctcttgttttggaatctattgatcaagaaagaggaacaaagcaaataacagaagagaattttcagctttgccgacgaataatcagtgaaggaatatggagtctcattagagaaaagaaacaagaattttgtgagaaaaattatggcaagatattattgccagatactaatcttatgcttctccctgctaaatcgttatgctacaatgattgcccttggataaaagtaaaggataccactgtaaaatattgtcatgctgacatacccagggaagtagcagtaaaactaggagcagtcccaaagcgacacaaagccttagaaagatatgcatccaatgtctgttttacaacacttggcacagaatttgggcagaaagaaaaattgaccagcagaattaagagcatccttaatgcatatccttctgaaaaggaaatgttgaaagagcttcttcaaaatgctgatgatgcaaaggcgacagaaatctgttttgtgtttgatcctagacagcatccagttgatagaatatttgatgataagtgggccccattgcaagggccagcactttgtgtgtacaacaaccagccatttacagaagatgatgttagaggaattcagaatcttggaaaaggcacgaaagagggaaatccttataaaactggacagtatggaataggattcaattctgtgtatcatatcacagactgcccatcttttatttctggcaatgacatcctgtgtatttttgatcctcatgccagatatgcaccaggggccacatccattagtcccggacgcatgtttagagatttggatgcagattttaggacacagttctcagatgttctggatctttatctgggaacccattttaaactggataattgcacaatgttcagatttcctcttcgtaatgcagaaatggcaaaagtttcggaaatttcgtctgttccagcatcagacagaatggtccagaatcttttggacaaactgcgctcagatggggcagaacttctaatgtttcttaatcacatggaaaaaatttctatttgtgaaatagataagagtactggagctctaaatgtgctgtattcagtaaagggcaaaatcacagatggagacagattgaaaaggaaacaatttcatgcatctgtaattgatagtgttactaaaaagaggcagctcaaagacataccagttcaacaaataacctatactatggatactgaggactctgaaggaaatcttactacg

SEQ ID NO: 3073 - protein, 4432 aa, Homo sapiens
MAPYQGPALYVYNNAVFTPEDWHGIQEIARSRKKDDPLKVGRFGIGFNSVYHITDVPCIFSGDQIGMLDPHQTLFGPHESGQCWNLKDDSKEISELSDQFAPFVGIFGSTKETFINGNFPGTFFRFPLRLQPSQLSSNLYNKQKVLELFESFRADADTVLLFLKSVQDVSLYVREADGTEKLVFRVTSSESKALKHERPNSIKILGTAISNYCKKTPSNNITCVTYHVNIVLEEESTKDAQKTSWLVCNSVGGRGISSKLDSLADELKFVPIIGIAMPLSSRDDEAKGATSDFSGKAFCFLPLPPGEESSTGLPVHISGFFGLTDNRRSIKWRELDQWRDPAALWNEFLVMNVVPKAYATLILDSIKRLEMEKSSDFPLSVDVIYKLWPEASKVKVHWQPVLEPLFSELLQNAVIYSISCDWVRLEQVYFSELDENLEYTKTVLNYLQSSGKQIAKVPGNVDAAVQLTAASGTTPVRKVTPAWVRQVLRKCAHLGCAEEKLHLLEFVLSDQAYSELLGLELLPLQNGNFVPFSSSVSDQDVIYITSAEYPRSLFPSLEGRFILDNLKPHLVAALKEAAQTRGRPCTQLQLLNPERFARLIKEVMNTFWPGRELIVQWYPFDENRNHPSVSWLKMVWKNLYIHFSEDLTLFDEMPLIPRTILEEGQTCVELIRLRIPSLVILDDESEAQLPEFLADIVQKLGGFVLKKLDASIQHPLIKKYIHSPLPSAVLQIMEKMPLQKLCNQITSLLPTHKDALRKFLASLTDSSEKEKRIIQELAIFKRINHSSDQGISSYTKLKGCKVLHHTAKLPADLRLSISVIDSSDEATIRLANMLKIEQLKTTSCLKLVLKDIENAFYSHEEVTQLMLWVLENLSSLKNENPNVLEWLTPLKFIQISQEQMVSAGELFDPDIEVLKDLFCNEEGTYFPPSVFTSPDILHSLRQIGLKNEASLKEKDVVQVAKKIEALQVGACPDQDVLLKKAKTLLLVLNKNHTLLQSSEGKMTLKKIKWVPACKERPPNYPGSLVWKGDLCNLCAPPDMCDVGHAILIGSSLPLVESIHVNLEKALGIFTKPSLSAVLKHFKIVVDWYSSKTFSDEDYYQFQHILLEIYGFMHDHLNEGKDSFRALKFPWVWTGKKFCPLAQAVIKPIHDLDLQPYLHNVPKTMAKFHQLFKVCGSIEELTSDHISMVIQKIYLKSDQDLSEQESKQNLHLMLNIIRWLYSNQIPASPNTPVPIHHSKNPSKLIMKPIHECCYCDIKVDDLNDLLEDSVEPIILVHEDIPMKTAEWLKVPCLSTRLINPENMGFEQSGQREPLTVRIKNILEEYPSVSDIFKELLQNADDANATECSFLIDMRRNMDIRENLLDPGMAACHGPALWSFNNSQFSDSDFVNITRLGESLKRGEVDKVGKFGLGFNSVYHITDIPIIMSREFMIMFDPNINHISKHIKDKSNPGIKINWSKQQKRLRKFPNQFKPFIDVFGCQLPLTVEAPYSYNGTLFRLSFRTQQEAKVSEVSSTCYNTADIYSLVDEFSLCGHRLIIFTQSVKSMYLKYLKIEETNPSLAQDTVIIKKKSCSSKALNTPVLSVLKEAAKLMKTCSSSNKKLPSDEPKSSCILQITVEEFHHVFRRIADLQSPLFRGPDDDPAALFEMAKSGQSKKPSDELSQKTVECTTWLLCTCMDTGEALKFSLSESGRRLGLVPCGAVGVQLSEIQDQKWTVKPHIGEVFCYLPLRIKTGLPVHINGCFAVTSNRKEIWKTDTKGRWNTTFMRHVIVKAYLQVLSVLRDLATSGELMDYTYYAVWPDPDLVHDDFSVICQGFYEDIAHGKGKELTKVFSDGSTWVSMKNVRFLDDSILKRRDVGSAAFKIFLKYLKKTGSKNLCAVELPSSVKLGFEEAGCKQILLENTFSEKQFFSEVFFPNIQEIEAELRDPLMIFVLNEKVDEFSGVLRVTPCIPCSLEGHPLVLPSRLIHPEGRVAKLFDIKDGRFPYGSTQDYLNPIILIKLVQLGMAKDDILWDDMLERAVSVAEINKSDHVAACLRSSILLSLIDEKLKIRDPRAKDFAAKYQTIRFLPFLTKPAGFSLDWKGNSFKPETMFAATDLYTAEHQDIVCLLQPILNENSHSFRGCGSVSLAVKEFLGLLKKPTVDLVINQLKEVAKSVDDGITLYQENITNACYKYLHEALMQNEITKMSIIDKLKPFSFILVENAYVDSEKVSFHLNFEAAPYLYQLPNKYKNNFRELFETVGVRQSCTVEDFALVLESIDQERGTKQITEENFQLCRRIISEGIWSLIREKKQEFCEKNYGKILLPDTNLMLLPAKSLCYNDCPWIKVKDTTVKYCHADIPREVAVKLGAVPKRHKALERYASNVCFTTLGTEFGQKEKLTSRIKSILNAYPSEKEMLKELLQNADDAKATEICFVFDPRQHPVDRIFDDKWAPLQGPALCVYNNQPFTEDDVRGIQNLGKGTKEGNPYKTGQYGIGFNSVYHITDCPSFISGNDILCIFDPHARYAPGATSISPGRMFRDLDADFRTQFSDVLDLYLGTHFKLDNCTMFRFPLRNAEMAKVSEISSVPASDRMVQNLLDKLRSDGAELLMFLNHMEKISICEIDKSTGALNVLYSVKGKITDGDRLKRKQFHASVIDSVTKKRQLKDIPVQQITYTMDTEDSEGNLTTWLICNRSGFSSMEKVSKSVISAHKNQDITLFPRGGVAACITHNYKKPHRAFCFLPLSLETGLPFHVNGHFALDSARRNLWRDDNGVGVRSDWNNSLMTALIAPAYVELLIQLKKRYFPGSDPTLSVLQNTPIHVVKDTLKKFLSFFPVNRLDLQPDLYCLVKALYNCIHEDMKRLLPVVRAPNIDGSDLHSAVIITWINMSTSNKTRPFFDNLLQDELQHLKNADYNITTRKTVAENVYRLKHLLLEIGFNLVYNCDETANLYHCLIDADIPVSYVTPADIRSFLMTFSSPDTNCHIGKLPCRLQQTNLKLFHSLKLLVDYCFKDAEENEIEVEGLPLLITLDSVLQTFDAKRPKFLTTYHELIPSRKDLFMNTLYLKYSNILLNCKVAKVFDISSFADLLSSVLPREYKTKSCTKWKDNFASESWLKNAWHFISESVSVKEDQEETKPTFDIVVDTLKDWALLPGTKFTVSANQLVVPEGDVLLPLSLMHIAVFPNAQSDKVFHALMKAGCIQLALNKICSKDSAFVPLLSCHTANIESPTSILKALHYMVQTSTFRAEKLVENDFEALLMYFNCNLNHLMSQDDIKILKSLPCYKSISGRYVSIGKFGTCYVLTKSIPSAEVEKWTQSSSSAFLEEKIHLKELYEVIGCVPVDDLEVYLKHLLPKIENLSYDAKLEHLIYLKNRLSSAEELSEIKEQLFEKLESLLIIHDANSRLKQAKHFYDRTVRVFEVMLPEKLFIPNDFFKKLEQLIKPKNHVTFMTSWVEFLRNIGLKYILSQQQLLQFAKEISVRANTENWSKETLQNTVDILLHHIFQERMDLLSGNFLKELSLIPFLCPERAPAEFIRFHPQYQEVNGTLPLIKFNGAQVNPKFKQCDVLQLLWTSCPILPEKATPLSIKEQEGSDLGPQEQLEQVLNMLNVNLDPPLDKVINNCRNICNITTLDEEMVKTRAKVLRSIYEFLSAEKREFRFQLRGVAFVMVEDGWKLLKPEEVVINLEYESDFKPYLYKLPLELGTFHQLFKHLGTEDIISTKQYVEVLSRIFKNSEGKQLDPNEMRTVKRVVSGLFRSLQNDSVKVRSDLENVRDLALYLPSQDGRLVKSSILVFDDAPHYKSRIQGNIGVQMLVDLSQCYLGKDHGFHTKLIMLFPQKLRPRLLSSILEEQLDEETPKVCQFGALCSLQGRLQLLLSSEQFITGLIRIMKHENDNAFLANEEKAIRLCKALREGLKVSCFEKLQTTLRVKGFNPIPHSRSETFAFLKRFGNAVILLYIQHSDSKDINFLLALAMTLKSATDNLISDTSYLIAMLGCNDIYRIGEKLDSLGVKYDSSEPSKLELPMPGTPIPAEIHYTLLMDPMNVFYPGEYVGYLVDAEGGDIYGSYQPTYTYAIIVQEVEREDADNSSFLGKIYQIDIGYSEYKIVSSLDLYKFSRPEESSQSRDSAPSTPTSPTEFLTPGLRSIPPLFSGRESHKTSSKHQSPKKLKVNSLPEILKEVTSVVEQAWKLPESERKKIIRRLYLKWHPDKNPENHDIANEVFKHLQNEINRLEKQAFLDQNADRASRRTFSTSASRFQSDKYSFQRFYTSWNQEATSHKSERQQQNKEKCPPSAGQTYSQRFFVPPTFKSVGNPVEARRWLRQARANFSAARNDLHKNANEWVCFKCYLSTKLALIAADYAVRGKSDKDVKPTALAQKIEEYSQQLEGLTNDVHTLEAYGVDSLKTRYPDLLPFPQIPNDRFTSEVAMRVMECTACIIIKLENFMQQKV

SEQ ID NO: 3074 - DNA, 1485 bp, Homo sapiens
ggacctgcagcctcccaggtggctgggaagaactctccaacaataaatacatttgataagaaagatggctttaaaagtgctactagaacaagagaaaacgtttttcactcttttagtattactaggctatttgtcatgtaaagtgacttgtgaatcaggagactgtagacagcaagaattcagggatcggtctggaaactgtgttccctgcaaccagtgtgggccaggcatggagttgtctaaggaatgtggcttcggctatggggaggatgcacagtgtgtgacgtgccggctgcacaggttcaaggaggactggggcttccagaaatgcaagccctgtctggactgcgcagtggtgaaccgctttcagaaggcaaattgttcagccaccagtgatgccatctgcggggactgcttgccaggattttataggaagacgaaacttgtcggctttcaagacatggagtgtgtgccttgtggagaccctcctcctccttacgaaccgcactgtgccagcaaggtcaacctcgtgaagatcgcgtccacggcctccagcccacgggacacggcgctggctgccgttatctgcagcgctctggccaccgtcctgctggccctgctcatcctctgtgtcatctattgtaagagacagtttatggagaagaaacccagctggtctctgcggtcacaggacattcagtacaacggctctgagctgtcgtgttttgacagacctcagctccacgaatatgcccacagagcctgctgccagtgccgccgtgactcagtgcagacctgcgggccggtgcgcttgctcccatccatgtgctgtgaggaggcctgcagccccaacccggcgactcttggttgtggggtgcattctgcagccagtcttcaggcaagaaacgcaggcccagccggggagatggtgccgactttcttcggatccctcacgcagtccatctgtggcgagttttcagatgcctggcctctgatgcagaatcccatgggtggtgacaacatctctttttgtgactcttatcctgaactcactggagaagacattcattctctcaatccagaacttgaaagctcaacgtctttggattcaaatagcagtcaagatttggttggtggggctgttccagtccagtctcattctgaaaactttacagcagctactgatttatctagatataacaacacactggtagaatcagcatcaactcaggatgcactaactatgagaagccagctagatcaggagagtggtgctgtcatccacccagccactcagacgtccctccaggtaaggcagcgactgggttccctgtgaacacagcactgacttacagtagatcagaactctgttcccagcataagatttgggggaacctgatgagttttttttttgcatctttaataatttcttgtatgttgtagagtatgttttaaaataaatttcaagtatttttttaaaaaact

SEQ ID NO: 3075 - protein, 423 aa, Homo sapiens
MALKVLLEQEKTFFTLLVLLGYLSCKVTCESGDCRQQEFRDRSGNCVPCNQCGPGMELSKECGFGYGEDAQCVTCRLHRFKEDWGFQKCKPCLDCAVVNRFQKANCSATSDAICGDCLPGFYRKTKLVGFQDMECVPCGDPPPPYEPHCASKVNLVKIASTASSPRDTALAAVICSALATVLLALLILCVIYCKRQFMEKKPSWSLRSQDIQYNGSELSCFDRPQLHEYAHRACCQCRRDSVQTCGPVRLLPSMCCEEACSPNPATLGCGVHSAASLQARNAGPAGEMVPTFFGSLTQSICGEFSDAWPLMQNPMGGDNISFCDSYPELTGEDIHSLNPELESSTSLDSNSSQDLVGGAVPVQSHSENFTAATDLSRYNNTLVESASTQDALTMRSQLDQESGAVIHPATQTSLQVRQRLGSL

SEQ ID NO: 3076 - DNA, 4283 bp, Homo sapiens
gggagggtaactacctgctgaaagtgaactttctttgatatccatgcatatatataaactcagccctgcctttgatgttcagcaactgattcactgatcagattacaggcatttcatctccctgctcgtctgcctttgatctgcatggttaattttattttcctggatttgaagtttcgtctgggcttgtgctgacatacatttttgggaaggtagaagcatttggcacagaagtgctgccaggagaaactaagttgctgaacggaactctccaacaataaatacatttgataagaaagatggctttaaaagtgctactagaacaagagaaaacgtttttcactcttttagtattactaggctatttgtcatgtaaagtgacttgtgaatcaggagactgtagacagcaagaattcagggatcggtctggaaactgtgttccctgcaaccagtgtgggccaggcatggagttgtctaaggaatgtggcttcggctatggggaggatgcacagtgtgtgacgtgccggctgcacaggttcaaggaggactggggcttccagaaatgcaagccctgtctggactgcgcagtggtgaaccgctttcagaaggcaaattgttcagccaccagtgatgccatctgcggggactgcttgccaggattttataggaagacgaaacttgtcggctttcaagacatggagtgtgtgccttgtggagaccctcctcctccttacgaaccgcactgtgccagcaaggtcaacctcgtgaagatcgcgtccacggcctccagcccacgggacacggcgctggctgccgttatctgcagcgctctggccaccgtcctgctggccctgctcatcctctgtgtcatctattgtaagagacagtttatggagaagaaacccagctggtctctgcggtcacaggacattcagtacaacggctctgagctgtcgtgttttgacagacctcagctccacgaatatgcccacagagcctgctgccagtgccgccgtgactcagtgcagacctgcgggccggtgcgcttgctcccatccatgtgctgtgaggaggcctgcagccccaacccggcgactcttggttgtggggtgcattctgcagccagtcttcaggcaagaaacgcaggcccagccggggagatggtgccgactttcttcggatccctcacgcagtccatctgtggcgagttttcagatgcctggcctctgatgcagaatcccatgggtggtgacaacatctctttttgtgactcttatcctgaactcactggagaagacattcattctctcaatccagaacttgaaagctcaacgtctttggattcaaatagcagtcaagatttggttggtggggctgttccagtccagtctcattctgaaaactttacagcagctactgatttatctagatataacaacacactggtagaatcagcatcaactcaggatgcactaactatgagaagccagctagatcaggagagtggtgctgtcatccacccagccactcagacgtccctccaggaagcttaaagaacctgcttctttctgcagtagaagcgtgtgctggaacccaaagagtactcctttgttaggcttatggactgagcagtctggaccttgcatggcttctggggcaaaaataaatctgaaccaaactgacggcatttgaagcctttcagccagttgcttctgagccagaccagctgtaagctgaaacctcaatgaataacaagaaaagactccaggccgactcatgatactctgcatctttcctacatgagaagcttctctgccacaaaagtgacttcaaagacggatgggttgagctggcagcctatgagattgtggacatataacaagaaacagaaatgccctcatgcttattttcatggtgattgtggttttacaagactgaagacccagagtatactttttctttccagaaataatttcataccgcctatgaaatatcagataaattaccttagcttttatgtagaatgggttcaaaagtgagtgtttctatttgagaaggacactttttcatcatctaaactgattcgcataggtggttagaatggccctcatattgcctgcctaaatcttgggtttattagatgaagtttactgaatcagaggaatcagacagaggaggatagctctttccagaatccacacttctgacctcagcctcggtctcatgaacacccgctgatctcaggagaacacctgggctagggaatgtggtcgagaaagggcagcccattgcccagaattaacacatattgtagagacttgtatgcaaaggttggcatatttatatgaaaattagttgctatagaaacatttgttgcatctgtccctctgcctgagcttagaaggttatagaaaaagggtatttataaacataaatgaccttttacttgcattgtatcttatactaaaggctttagaaattacaacatatcaggttcccctactactgaagtagccttccgtgagaacacaccacatgttaggactagaagaaaatgcacaatttgtaggggtttggatgaagcagctgtaactgccctagtgtagtttgaccaggacattgtcgtgctccttccaattgtgtaagattagttagcacatcatctcctactttagccatccggtgttggatttaagaggacggtgcttctttctattaaagtgctccatcccctaccatctacacattagcattgtctctagagctaagacagaaattaaccccgttcagtcacaaagcagggaatggttcatttactcttaatctttatgccctggagaagacctacttgaacagggcatattttttagacttctgaacatcagtatgttcgagggtactatgatattttggtttggaattgccctgcccaagtcactgtcttttaacttttaaactgaatattaaaatgtatctgtctttcctagtatgtttttatcttctcatgtattatccatggttttctctgtttgtgacagattagtaaaatttaatgagccctctttcttgtggccgtttctccatagttttaggttttgatatgtgtttactagcttgcctgtgtctggtacatctcatgacctcaattccctcacctgaaataggaaatgagaatgtttcattgtagccccaagcggtcatgtcaacctagtgcctagtcataattaattgacttttcctgtattacttctttttttaagtataaaccaatgatcctttggtagtcaagaactcttaggaacattgccttttggacatgtaaaatatttaggatttgaccacacaatggctatgaaaatgcaagtagtttcctcgcgtgacctcaccatgattcacatacgtgccactgtttgaaatctggtctgtttgcatttctgttatgacagagagatgatgtttgcatttctgttatgacagagagatgatgaaagtaggcagggctgtgttcctttgtgtagcctgtatatattttccatatgtagagccctgattaacttcaaggacaaacactggctggagaaagccagactgatgggaatgagactttggccaaaaatcccaaaacatcattttcaatcagtagagaagtgcttagggttgaaaattgatttcatttgctactgaatttggtaaatcctgggtaacttttatcaagatgaagacattttaccctacctactctagaaatatacaacaatgttatattttacactccttggaaacatttgaggaaaaaaatgcaatttgcacttcactttgttggaatatcccatagcactcaataaactcagctgctagagtgccgatgtcaggagggctgtgtcgggtaatgcgtgtggctgaatgggcataaccactgtggcttcttgtgctgcagaagctcgttgacaagactgaggaggatttcaagagcaaccaagtaaagtcatgaattttctaattttgtgtatatggaatatatttttaaatagagatttttctactttagataatgtgttaatattgctattacctaggttaagcactattgtctgtgctagtaagaaaaagaaaggaaaaccatcattgctttatagtagcttatatcaatttagatttcatcattactattttgcatactggaatttataaatgtgtaaattatcattttcttagttttgtaataccttttttatttgtgaataaaattatcacctggtattcttaaaaaaaaaaaaaaaaaa

SEQ ID NO: 3077 - protein, 417 aa, Homo sapiens
MALKVLLEQEKTFFTLLVLLGYLSCKVTCESGDCRQQEFRDRSGNCVPCNQCGPGMELSKECGFGYGEDAQCVTCRLHRFKEDWGFQKCKPCLDCAVVNRFQKANCSATSDAICGDCLPGFYRKTKLVGFQDMECVPCGDPPPPYEPHCASKVNLVKIASTASSPRDTALAAVICSALATVLLALLILCVIYCKRQFMEKKPSWSLRSQDIQYNGSELSCFDRPQLHEYAHRACCQCRRDSVQTCGPVRLLPSMCCEEACSPNPATLGCGVHSAASLQARNAGPAGEMVPTFFGSLTQSICGEFSDAWPLMQNPMGGDNISFCDSYPELTGEDIHSLNPELESSTSLDSNSSQDLVGGAVPVQSHSENFTAATDLSRYNNTLVESASTQDALTMRSQLDQESGAVIHPATQTSLQEA

SEQ ID NO: 3078 - DNA, 2727 bp, Homo sapiens
cattgccagagagctagtgtgatcctttggtagtgtcactacattcagatttctcatggtgctagaattcttgtgtgggtccttctcatctggagatgctagcacttctaatttgtgtaattatttttgtttgggtaggattttttctttttctttccttttctataatattattgttatttttttcttctttccctttccctcctccctaggggtgtggctgtagagcatgctgggtagggtcttttggctttgcttctgtagccctaatgcacttctgccagcaggttttatattgggtgtgtggtttgacctacaagccagtagatggcgccatgggtaagagctggctgttgccagtgctgctggctgtgtacttgatccttgtttattgggaggagctttctgctgccccaggaatgggctgatttcctgagtacacattaatctgagctccctcagccctaggggtagggggattgggggcacaagatgggtggagccagatagggaagattcccccagtgttgtcctgctcccagtccaggtttgggacaatgccagcagcgtttccctgtgtctttcccccacaaagtctccaagtctctcctcaaatgagctccaaggcttgggagaaacaatctcttcctctgcccgggttgcgtggatctccagtggaaaggtgagacagagggatgctgtctgcctctctcacttactgaggcttcactcacttctatcagtcgaatgctgtcctgagggctgcttgcctgcaatgtcctccgcaagatctgggatgtccttcataattccggggaattgccatttcctttcttgaattaaagctcacagagttggtctttatgtacttgcttgctatttccaaatgactgaggcatgctaaaagcctgtaatctgccatcttggaaaaaacatccttgcatccttaagagaaatggcacttggtgttgatacatggtgtttctacattgctgaattcactttgaaaatatatgtatattttaaaatctacatttatatgtgagactggtgtaaaaatatcttttattctactgtatttgtgcaattttggaatcagttatattaatatactaaatgagttggcaatttttcttttttactattatccaaaaaaattataaaagacataattgttgctttcttatagatttagtaaaaacctcatcgtgtccttttgtggagcgatggtgagagatatttttactgtaaatgtaacttgcgtatttttcacctgtgaggcagaggttgcaatgagccaagattgtgccactgcactccagcctgcgtgacacagcaagaccctgtctcaaaaaaaagaaagaaaatcaacttaaaatgcactccttgaatatttctgagtgtatttttataccacgtatgttccttgaactaacttcttttcttttctaggaagaaccggaactatgatttgtgccttccttattgcctccgaaatatttttaactgcagaggaaagcctgtattattttggagaaaggcgaacagataaaacgcacagcagtaaatttcagggactagaaactccttctcagtagagacaaggtttcaccctgttggcgaggctggtctcaaactcctgacgcccagtgatctgcccacctcggcctcccaatgtgctgggattacaggcgggagccaccatgatggccaacttttgaattctgaaccagttgattgagtaccagagctcttcaataccttgaagaaagattcaggggagagccgttgtgaacagcttgccccagggaaaggacaaggctgagagaattccagggcttccttgagaaaacagaattgaggaaatgcaaagtgaagaattctagcatcaggaacaagagaagaatgatggaaaacctgctactgagatatgttggatattttgcacaagtgaaacatctctacaactggaatctccctccaagacggatactctttataataagattcattatttattcgattcgtggtgttggaacaggcgatgtatgtgatctaaaattccaaatagtaatggagaaaaagatactgcatgacattgaaacagctggtgtattaactaatgtatatgacagtccatctctgtacgatgatgtgaaagtgcagtttttctcttcaaatcttcctaaatactatgacaattgttcatttttcttctggttcaacacatcttttattcaaaataacagagagaaatttagatattttattaaacttggaagtcattaatgccatataaagcaatgctaagagagtcagcatgtgttactgatgtgttgctgaagattaaagtatttttaagtctcaccaaaaaggtggaaggagccaactgagacacaaaaaaggggctgaggttctattcacggctttatctaccaagaaatgaattggataatccacatcaacaaaaagcatggaaaatttatccaccagaatttgccgtggagatactttttggcgagaaatgacttccaatgacgtagctggatccgattaagtatagtttccccttccccttctgggaaagaattaatgttctttccaacccctgccatgtgcatgttcatatgtcctaagtcttccttgatgatgtatctatatttatatatgtttatatatgttcttcataaatctattaaatatatatagataaaaaaaaaaaaaaaa

SEQ ID NO: 3079 - DNA, 3565 bp, Homo sapiens
ccggtgcagcggctggcgatcggccgcggaggtgcgtgcagggcccgcgccgccgccggtatctccaccgccaacacctcagccactgccactgccacagccacacgaggccccccaccgtgcgctccgccgctgcggtcccggatccgcgctccacgcccgcagcccgcggcgccaccagcccagcatgcaccagaaaaccccagaaatttactccgtggagctcagcggaactaaggacatcgtgaaaacagacaagggggatggcaaggagaagtataggggtctgaagaacaactgcctggaactcaaaaagaaaaatcacaaagaggagtttcagaaagaactccatctggatgaccacaaactcagcaatagggaattggaagagaaatatggcacagacatcattatgggtctctccagcaccagagctgccgagctcctggcccgggatgggcccaactccctcacccctcccaagcagacgcctgagatcgtcaagttcctcaagcagatggtgggggggttctctatcctcctgtgggtgggcgcctttctctgttggattgcatatgggattcagtactccagcgacaagtctgcatccctgaacaacgtgtacttgggctgtgtgcttggtctggtggtcattttaacggggatctttgcttattaccaagaggcaaaaagcaccaacatcatgtccagcttcaataagatgatccctcagcaagctctcgtcatccgagattccgagaagaagaccatcccttcagagcagctggtggtgggggacattgtggaggtcaaaggaggagaccagatccctgcagacatcagggtgctgtcttctcaggggtgtcgggtggataactcatctctcacgggggagtctgagccccagccccgctcctctgagtttacccatgaaaaccccctggaaacaaagaacatctgcttctattccacaacgtgtctggaaggcactgtcaccggcatggttatcaacacgggtgaccgcaccatcattggccatattgcctcattggcctcaggagttggaaatgagaagacgcccattgccattgagatcgagcactttgttcacattgtggcaggagtggctgtctccatcggcatccttttcttcatcatcgctgtgtccctgaagtatcaagtcctggactccatcatcttcctcattggcatcattgtggccaatgtgcccgagggcctcctggccactgtcactgtgaccctgtcgctgacagcaaaacggatggccaagaagaactgcctggtgaagaacctggaggctgtggagaccctcggctccacctccatcatctgctcggacaagactgggacactgacccagaacaggatgacagtggcccatctgtggttcgacaatcagatctttgtggctgacaccagtgaggaccattcaaaccaagtctttgaccaaagctctaggacttgggcctccttatccaagataataacattgtgtaaccgagcagagttcaagccaggacaggaaaatgtccccatcatgaagaaagctgtgattggagatgcctcagaaactgctcttttaaaattctcagaggtcattttgggtgatgtgatggaaattagaaaaagaaaccgcaaagtagctgaaatcccttttaactctactaataaatttcagctctccatccacgagatggatgacccccacggcaagcgcttcctcatggtgatgaagggggcccctgagcgcattctagagaaatgcagcaccatcatgatcaacggcgaggagcacccactggacaagagcactgccaagaccttccacacagcctacatggagctgggcgggttgggcgagcgtgtgctgggtttctgtcatctctacctgccagcagacgagtttccagaaacctactcatttgacatagacgctatgaactttccgacctccaacctctgttttgtgggactcttgtcaatgatcgatccccctcggtccaccgtgccagatgcagtcaccaaatgccggagtgcagggatcaaggttattatggttactggtgatcatcccatcacagccaaagctattgccaagagtgtggggatcatttcagccaacagtgaaacagtggaagacattgcacatcgcctcaacattgctgtggagcaagttaacaaacgggatgccaaggccgctgtggtgactggcatggagctgaaggacatgagctcagaacagctggatgagatcttagccaactaccaggagattgtctttgcccggacatccccccagcagaagctgatcattgtggagggctgtcagaggcaggatgctgttgttgctgtgaccggggatggagttaatgactctccggctctaaagaaggcagacattgggattgccatggggatagcaggttctgatgcagccaaaaatgcagccgacatggtcttgctggacgacaacttcgcatccatcgtcacaggggtggaggaaggtcgcctgatctttgacaacctcaagaagactattgcttattccctgaccaagaacattgccgagctgtgcccctttctgatctacatcattgtcgggctccccctgcccattggcaccatcaccattctgttcattgacttggggacagacattatcccctccattgccttggcgtacgagaaagctgaaagtgacatcatgaacaggaagcctcgccacaagaataaggacaggctggtgaaccagccgctcgctgtgtactcatacctgcacattggcctcatgcaagccctgggagctttccttgtgtatttcaccgtctatgcacaagagggctttctgccccgcactctcattaacctgcgggtagaatgggagaaggactacgtgaatgacttgaaagacagctatgggcaggaatggacaaggtaccagagggaatacctagaatggacgggctacacggctttctttgttggcatcctagtccagcaaatagcagatctgatcatcaggaaaacccggaggaattccatcttccagcagggtctcttcagaaataaagtcatctgggtggggatcacctcacagatcatcattggtctgatcctctcctatggcctcggaagtgtcacagccttgagtttcaccatgcttagggctcagtactggtttgtggctgtgccgcacgccatcctgatctgggtgtatgatgaggtgcggaagctcttcatcaggctctaccctggaagctggtgggataagaacatgtattattaagaccacctcccttcctatgtctctcagcagcacgttggggcacacttgttcatcttctgaccgtttgctgggctattcccctgcagtgcagacatcgtcaaaattcagacaagaggaaattttcatgcagaaagctgtatgcaggatgctcactgatgttttgcactttaaaactgaaattcaactctttatataggattttcttttctatctccatctcctcattaaaaaatacgtacatttcgaggtaatggtata

SEQ ID NO: 3080 - protein, 1039 aa, Homo sapiens
MHQKTPEIYSVELSGTKDIVKTDKGDGKEKYRGLKNNCLELKKKNHKEEFQKELHLDDHKLSNRELEEKYGTDIIMGLSSTRAAELLARDGPNSLTPPKQTPEIVKFLKQMVGGFSILLWVGAFLCWIAYGIQYSSDKSASLNNVYLGCVLGLVVILTGIFAYYQEAKSTNIMSSFNKMIPQQALVIRDSEKKTIPSEQLVVGDIVEVKGGDQIPADIRVLSSQGCRVDNSSLTGESEPQPRSSEFTHENPLETKNICFYSTTCLEGTVTGMVINTGDRTIIGHIASLASGVGNEKTPIAIEIEHFVHIVAGVAVSIGILFFIIAVSLKYQVLDSIIFLIGIIVANVPEGLLATVTVTLSLTAKRMAKKNCLVKNLEAVETLGSTSIICSDKTGTLTQNRMTVAHLWFDNQIFVADTSEDHSNQVFDQSSRTWASLSKIITLCNRAEFKPGQENVPIMKKAVIGDASETALLKFSEVILGDVMEIRKRNRKVAEIPFNSTNKFQLSIHEMDDPHGKRFLMVMKGAPERILEKCSTIMINGEEHPLDKSTAKTFHTAYMELGGLGERVLGFCHLYLPADEFPETYSFDIDAMNFPTSNLCFVGLLSMIDPPRSTVPDAVTKCRSAGIKVIMVTGDHPITAKAIAKSVGIISANSETVEDIAHRLNIAVEQVNKRDAKAAVVTGMELKDMSSEQLDEILANYQEIVFARTSPQQKLIIVEGCQRQDAVVAVTGDGVNDSPALKKADIGIAMGIAGSDAAKNAADMVLLDDNFASIVTGVEEGRLIFDNLKKTIAYSLTKNIAELCPFLIYIIVGLPLPIGTITILFIDLGTDIIPSIALAYEKAESDIMNRKPRHKNKDRLVNQPLAVYSYLHIGLMQALGAFLVYFTVYAQEGFLPRTLINLRVEWEKDYVNDLKDSYGQEWTRYQREYLEWTGYTAFFVGILVQQIADLIIRKTRRNSIFQQGLFRNKVIWVGITSQIIIGLILSYGLGSVTALSFTMLRAQYWFVAVPHAILIWVYDEVRKLFIRLYPGSWWDKNMYY

SEQ ID NO: 3081 - DNA, 1206 bp, Homo sapiens
atgcgtttaccgcagcataaacgcgcactgcgagctggccatacccagcgagaggcgcagagtgcgctgaaggggggcgggagcggcgccgcgggcgcggtccagcatgcccccaagcccgttccctccccggggcgaaagccaacagcacccactggtcgcctgcgggctgcgagggcggctttcaccgctgcgcggcgcatccagccttgggacgaggcccctctcggcaaggaatctgaagaggtccagtgttgggacgggggacacgtggtaggggcgcccaggggctcaggtctcctgtccccgcctccccgctctccccacgcgcaggcaggcccgcgggtggagcgcagctctctgggagagcacgagggccttcgcctggctttgcaaattcaggaaggagaagacccagggctcgaggccactgccgcgcgcccttccctgcccatgatgatcctcacgacagtccccaccaccttcgccaacgcccgccggcccctcaaggagaacgcggtgacgtggggagcgcacagcaaggaccaggaggacggaggccttttcagcagcgacactgagggcgaccccgagaaggcagagattgacccggaggagcatccatctccacaagaccaacacgcaccatggcgaccacagcccattctccctgcgcacccccacacctcgccaggcctctctaatctcagccggggtccaagtgaacttggcatcaggagctgcgcctgggaacgcgcggagctgcgggccggggcctggtctcggtctccgcggagcgcccctgaccaccgcgacgggcggctgcggtggtggtggcgcaggaaggggaggcctcgggaagccacacagtgggacagggatcccggagcgaggaaggccccctccgtccagctggagcccttgccggcgtggcggcagtgcagtccgtggctgcgcgggaaagccggctgtggcggaggcgcgggctggggaccctgcgcgccggggtggcccacgggcagcggcgtaagcaaagcggtgggcgggccctgcgggcgcgaggctgccctaggcagccaccagatcttggacttccccgcgtggctcaccctgcaggccgcccgctgcagcgctggggctaaccggcgcctgcagccaggctctgggacctccttggccagacccaagagcgagccttggggttga

SEQ ID NO: 3082 - protein, 401 aa, Homo sapiens [sequence omitted]

SEQ ID NO: 3083 - DNA, 1206 bp, Homo sapiens
atgcgtttaccgcagcataaacgcgcactgcgagctggccatacccagcgagaggcgcagagtgcgctgaaggggggcgggagcggcgccgcgggcgcggtccagcatgcccccaagcccgttccctccccggggcgaaagccaacagcacccactggtcgcctgcgggctgcgagggcggctttcaccgctgcgcggcgcatccagccttgggacgaggcccctctcggcaaggaatctgaagaggtccagtgttgggacgggggacacgtggtaggggcgcccaggggctcaggtctcctgtccccgcctccccgctctccccacgcgcaggcaggcccgcgggtggagcgcagctctctgggagagcacgagggccttcgcctggctttgcaaattcaggaaggagaagacccagggctcgaggccactgccgcgcgcccttccctgcccatgatgatcctcacgacagtccccaccaccttcgccaacgcccgccggcccctcaaggagaacgcggtgacgtggggagcgcacagcaaggaccaggaggacggaggccttttcagcagcgacactgagggcgaccccgagaaggcagagattgacccggaggagcatccatctccacaagaccaacacgcaccatggcgaccacagcccattctccctgcgcacccccacacctcgccaggcctctctaatctcagccggggtccaagtgaacttggcatcaggagctgcgcctgggaacgcgcggagctgcgggccggggcctggtctcggtctccgcggagcgcccctgaccaccgcgacgggcggctgcggtggtggtggcgcaggaaggggaggcctcgggaagccacacagtgggagagggatcccggagcgaggaaggccccctccgtccagctggagcccttgccggcgtggcggcagtgcagtccgtggctgcgcgggaaagccggctgtggcggaggcgcgggctggggaccctgcgcgccggggtggcccacgggcagcggcgtaagcaaagcggtgggcgggccctgcgggcgcgaggctgccctaggcagccaccagatcttggacttccccgcgtggctcaccctgcaggccgcccgctgcagcgctggggctaaccggcgcctgcagccaggctctgggacctccttggccagacccaagagcgagccttggggttga

SEQ ID NO: 3084 - protein, 401 aa, Homo sapiens
MRLPQHKRALRAGHTQREAQSALKGGGSGAAGAVQHAPKPVPSPGRKPTAPTGRLRAARAAFTAARRIQPWDEAPLGKESEEVQCWDGGHVVGAPRGSGLLSPPPRSPHAQAGPRVERSSLGEHEGLRLALQIQEGEDPGLEATAARPSLPMMILTTVPTTFANARRPLKENAVTWGAHSKDQEDGGLFSSDTEGDPEKAEIDPEEHPSPQDQHAPWRPQPILPAHPHTSPGLSNLSRGPSELGIRSCAWERAELRAGAWSRSPRSAPDHRDGRLRWWWRRKGRPREATQWERDPGARKAPSVQLEPLPAWRQCSPWLRGKAGCGGGAGWGPCAPGWPTGSGVSKAVGGPCGREAALGSHQILDFPAWLTLQAARCSAGANRRLQPGSGTSLARPKSEPWG

SEQ ID NO: 3085 - DNA, 5120 bp, Homo sapiens
ggactcgcactcggcggttgttccagaagaaagagacagcgatggcggcagaggcttcgaagactgggccttctaggtcttcctaccagcgaatggggaggaagagtcagccctggggtgccgctgaaatccagtgcaccaggtgtggaaggagggtatccagatcatccggtcaccattgtgaacttcaatgtggacatgctttttgtgaactatgcttgttaatgactgaagaatgcaccacaattatatgccctgattgtgaggttgctacagctgtaaatactagacaacgctactacccaatggctggatatattaaggaagactccataatggaaaaactgcagcctaagacgataaagaattgttctcaggactttaagaagactgctgatcagctaactactggtttagaacgttcagcctccacagacaagactcttttgaactcatcagctgtaatgttggacactaatactgcagaagaaattgatgaagcattgaatacagcacaccatagtttcgaacagttaagcattgctggaaaagcacttgaacacatgcagaagcaaacgatagaggaaagagaaagagttatagaagttgtggagaaacagtttgaccaacttttggctttttttgattccaggaaaaagaacctgtgtgaagaatttgcaagaactactgatgattatctatcaaatttaataaaggctaaaagctacattgaagagaaaaaaaataatttgaatgcagctatgaacatagcaagagcattacaattatcgccttctctaagaacatactgtgacctgaatcagattatccggactttgcagttaacttcagatagtgaattagcacaagttagttctccacaactaaggaaccctcccaggttgagtgtgaattgcagtgagatcatctgtatgttcaacaatatgggaaagattgaatttagggactcaacaaaatgttatccccaagaaaatgaaattagacagaatgttcaaaagaaatataataacaaaaaggaactttcttgttacgatacatacccaccgctagaaaagaaaaaggttgacatgtctgtcctaaccagtgaagcaccaccacctcctttgcaacctgagacaaatgatgtacatttagaagcaaaaaacttccagccacagaaagacgttgcaacagcatcccctaaaaccattgctgtgttacctcagatgggatctagccctgatgtgataattgaagaaattattgaagacaacgtggaaagttctgcagagctagtttttgtaagccatgtaatagatccttgccatttctacattcggaagtattcacaaataaaagacgccaaagtactggagaagaaggtgaatgaattttgcaataggagttcacaccttgatccttcagacattttggaactaggtgcaagaatatttgtcagcagtattaaaaatggaatgtggtgtcgaggaactatcacagaattaattccaatagagggtagaaataccagaaaaccttgtagtccaaccagattatttgtccatgaagttgcactaatacaaatattcatggtagattttggaaattctgaagtcctgattgtcactggagttgttgatacccatgtgagaccagaacactctgctaagcaacatattgcactaaatgatttatgtctggttctaaggaaatctgaaccatatactgaagggctgctaaaagacatccagccattagcacaaccatgctcattgaaagacattgttccacagaattcaaatgaaggctgggaagaggaagctaaagtggaatttttgaaaatggtaaataacaaggctgtttcaatgaaagtttttagagaagaagatggtgtgcttattgtagatctgcaaaaaccaccaccgaataaaataagcagtgatatgcctgtgtctcttagagatgcgctagtttttatggaactagcaaagtttaagtcacaatcactaagaagtcactttgaaaaaaatactactttacactatcatccacctattttgcctaaagaaatgacagatgtttcagtaacggtttgtcatataaatagtcctggagatttctatcttcagttgatagagggcctggatattttatttctattaaagacaatcgaggaattctataaaagtgaagatggagaaaatctggaaatcctctgtccagttcaagatcaagcctgtgtagctaaatttgaagatggaatttggtaccgagcaaaagttatcggattgcctggacatcaggaagttgaagttaaatatgtggactttggtaatactgcaaaaataacaatcaaagacgtgcgtaaaataaaggatgagtttctgaatgccccagagaaggcaattaaatgtaagttggcctatattgaaccatataaaaggacaatgcagtggtccaaagaagctaaagaaaaatttgaagaaaaggctcaagataaatttatgacatgttcagttatcaaaattctggaagataatgtgctcttagttgagcttttcgattctcttggtgctcctgaaatgactactactagtattaatgaccagctagttaaagagggcctagcatcttatgaaataggatacatcctcaaagataattctcaaaagcatattgaagtttgggatccttctccagaagaaattatttcaaatgaagtacacaacttaaatcctgtgtctgcaaaatctctacctaatgagaattttcagtcactttataataaggaattgcctgtgcatatctgtaatgtaatatctcctgagaagatttatgttcagtggttgttaactgaaaacttacttaatagtttagaagaaaagatgatagctgcttatgaaaactcaaaatgggaacctgttaaatgggaaaatgatatgcactgtgctgttaagatccaagataaaaatcagtggcgaagaggccagatcatcagaatggttacagacacattggtagaggtcttgctgtatgatgtgggtgttgaactagtagtgaatgttgactgtttaagaaaacttgaagaaaatctaaagacaatgggaagactctctttggaatgttctctggttgacataagaccagctggtgggagtgacaagtggacagcaacagcttgtgactgtctttcattgtacctgactggagctgtagcaactataatcttacaggtggatagtgaggaaaacaacacaacatggccattacctgtgaaaattttctgcagagatgaaaaaggagagcgtgttgatgtttctaaatatttgattaaaaagggtttggctttgagagaaaggagaattaataacttagataacagccattcattatctgagaagtctctggaagtccccctggaacaggaagattcagtagttactaactgtattaaaactaactttgaccctgacaagaaaactgctgacataatcagtgaacagaaagtgtctgaatttcaggagaaaattctagaaccaagaaccactagagggtataagccaccagctattcctaacatgaacgtatttgaggcaacagtcagctgtgttggtgatgatggaactatatttgtagtacctaaactatcagaatttgagctaataaaaatgacaaatgaaattcaaagtaatttaaaatgccttggtcttttggagccttatttctggaaaaaaggagaagcatgtgcagtaagaggatccgatactctgtggtatcgtggcaaggtgatggaggttgtaggtggcgctgtcagagtacaatatttagatcatggattcactgaaaagattccgcagtgccatctttaccctattttgctgtatcctgatataccccagttttgtattccttgtcagctccataataccacacctgttgggaatgtctggcaaccagatgcaatagaagttcttcaacaactgctttcaaagagacaggtggacattcacattatggagttacctaaaaatccatgggagaaattgtctattcacctctattttgatggaatgtcactttcttattttatggcatactataaatactgtacttctgaacatactgaggagatgttgaaagaaaaaccaagatcagatcatgataaaaagtatgaagaggaacaatgggaaataaggtttgaggaattgctttcggctgaaacagacactcctcttttaccaccatatttgtcttcatctctgccttccccaggagaactctatgctgttcaagttaagcacgttgtctcacctaatgaagtgtatatttgccttgattctatagaaacttctaaccagtctaaccagcatagtgacacagatgatagtggagtcagcggggaatcagaatccgagagccttgatgaagcactgcagagggttaataagaaggtagaggcgcttcctcctctgacggattttagaacagaaatgccttgccttgcagaatatgatgatggcttatggtatagagcgaagattgttgccattaaagaatttaatcctttatctatcttagtacaatttgttgattatggatcaactgcaaagctgacattaaacagactgtgccaaattccttctcatcttatgcggtatccagctcgagccataaaggttctcttggcagggtttaaacctcccttaagggatctaggggagacaagaataccatattgtcccaaatggagcatggaggcactgtgggctatgatagactgtcttcaaggaaaacaactctatgctgtgtccatggctccagcaccagaacagatagtgacattatatgacgatgaacagcatccagttcatatgccgttggtagaaatggggcttgcagataaagatgaataagtgcctaagtgtatacagtgagagcatctatagaagcctagaagaattctgttatgtttagactatgtcttatctttagactatttcaggcttaattttcctaacttgttcagcactagtgctttacctctcatttttaattgaactgttaggaattgtgtggggaaaaaaagtaaataaatgttcgcttccaaaaaaaaaaaaaaa

SEQ ID NO: 3086 - protein, 1623 aa, Homo sapiens
MAAEASKTGPSRSSYQRMGRKSQPWGAAEIQCTRCGRRVSRSSGHHCELQCGHAFCELCLLMTEECTTIICPDCEVATAVNTRQRYYPMAGYIKEDSIMEKLQPKTIKNCSQDFKKTADQLTTGLERSASTDKTLLNSSAVMLDTNTAEEIDEALNTAHHSFEQLSIAGKALEHMQKQTIEERERVIEVVEKQFDQLLAFFDSRKKNLCEEFARTTDDYLSNLIKAKSYIEEKKNNLNAAMNIARALQLSPSLRTYCDLNQIIRTLQLTSDSELAQVSSPQLRNPPRLSVNCSEIICMFNNMGKIEFRDSTKCYPQENEIRQNVQKKYNNKKELSCYDTYPPLEKKKVDMSVLTSEAPPPPLQPETNDVHLEAKNFQPQKDVATASPKTIAVLPQMGSSPDVIIEEIIEDNVESSAELVFVSHVIDPCHFYIRKYSQIKDAKVLEKKVNEFCNRSSHLDPSDILELGARIFVSSIKNGMWCRGTITELIPIEGRNTRKPCSPTRLFVHEVALIQIFMVDFGNSEVLIVTGVVDTHVRPEHSAKQHIALNDLCLVLRKSEPYTEGLLKDIQPLAQPCSLKDIVPQNSNEGWEEEAKVEFLKMVNNKAVSMKVFREEDGVLIVDLQKPPPNKISSDMPVSLRDALVFMELAKFKSQSLRSHFEKNTTLHYHPPILPKEMTDVSVTVCHINSPGDFYLQLIEGLDILFLLKTIEEFYKSEDGENLEILCPVQDQACVAKFEDGIWYRAKVIGLPGHQEVEVKYVDFGNTAKITIKDVRKIKDEFLNAPEKAIKCKLAYIEPYKRTMQWSKEAKEKFEEKAQDKFMTCSVIKILEDNVLLVELFDSLGAPEMTTTSINDQLVKEGLASYEIGYILKDNSQKHIEVWDPSPEEIISNEVHNLNPVSAKSLPNENFQSLYNKELPVHICNVISPEKIYVQWLLTENLLNSLEEKMIAAYENSKWEPVKWENDMHCAVKIQDKNQWRRGQIIRMVTDTLVEVLLYDVGVELVVNVDCLRKLEENLKTMGRLSLECSLVDIRPAGGSDKWTATACDCLSLYLTGAVATIILQVDSEENNTTWPLPVKIFCRDEKGERVDVSKYLIKKGLALRERRINNLDNSHSLSEKSLEVPLEQEDSVVTNCIKTNFDPDKKTADIISEQKVSEFQEKILEPRTTRGYKPPAIPNMNVFEATVSCVGDDGTIFVVPKLSEFELIKMTNEIQSNLKCLGLLEPYFWKKGEACAVRGSDTLWYRGKVMEVVGGAVRVQYLDHGFTEKIPQCHLYPILLYPDIPQFCIPCQLHNTTPVGNVWQPDAIEVLQQLLSKRQVDIHIMELPKNPWEKLSIHLYFDGMSLSYFMAYYKYCTSEHTEEMLKEKPRSDHDKKYEEEQWEIRFEELLSAETDTPLLPPYLSSSLPSPGELYAVQVKHVVSPNEVYICLDSIETSNQSNQHSDTDDSGVSGESESESLDEALQRVNKKVEALPPLTDFRTEMPCLAEYDDGLWYRAKIVAIKEFNPLSILVQFVDYGSTAKLTLNRLCQIPSHLMRYPARAIKVLLAGFKPPLRDLGETRIPYCPKWSMEALWAMIDCLQGKQLYAVSMAPAPEQIVTLYDDEQHPVHMPLVEMGLADKDE

SEQ ID NO: 3087 - DNA, 4387 bp, Homo sapiens
cggcccgaggtcctgtgggaagtgaggatctcaggacgggggcggggctccgacagaggcggcgattgtggcggcccatttgtaaatgctgcggagattgaggtgtcggttcgtgctgctgagctgcccaggcttcacggagcggtgttggtaatcaatagctcttctagcctttgcattgtttaaatataatagtgtcattggactaagatgttcctgatgccaacctcttcagagttaaacagtgggcagaacttcctaacccagtggatgaccaatccttctcgggctggggtcatattaaatcgtggatttcctattttggaagcagacaaagagaagcgagcagctgtggacatttctaccagctttcctattaaaggcacacatttttctgatagcttcagctttataaatgaagaagattcacttcttgaagaacagaagttggagtcaaacaacccttacaaaccacagtcagataaatctgaaacccatacagcctttccttgcattaaaaagggaccacaggtagcggcatgtcacagtgctcctggacaccaggaagaaaacaaaaatgacttcatcccagatcgtgcgagtgaattcaaagaaggggcttataaagacccactttttaaaaaacttgaacagctgaaagaagtacaacagaagaagcaggaacaattgaagaggcaacagttggagcaactacagagactcatggaagaacaagagaagctgctcaccatggtgtctgggcagtgcacacttccaggtttgagtttactgcctgatgatcagagccagaagcacaggtctccaggaaataccaccactggagagagagccacatgctgcttcccatcatatgtctacccggacccaacccaggaagaaacatacccgtccaacattttatcccatgagcaaagcaacttctgtagaactgctcatggagattttgtcttaacttcaaaacgtgcgtctcctaatttattttctgaggcacagtatcaagaagcacctgtggaaaaaaataatttaaaagaagaaaaccgtaaccatcctacaggagaaagtatcttatgttgggagaaagtgacagaacagattcaggaagcaaatgataagaacttacaaaaacatgatgattcctcagaagtggctaatattgaagaaaggcccattaaagctgctattggagaaaggaaacagacctttgaagattacttagaagaacaaattcagttggaagagcaagaactgaagcaaaaacagctgaaggaagcagaaggaccattgccaatcaaagcaaaaccaaaacaaccatttttaaaacgaggagaaggtttagctagatttactaatgccaaatctaagtttcaaaaaggcaaagaaagtaaactagtgactaaccagagcacttccgaggaccagccgctgtttaaaatggatagacagcaactccagcggaaaaccgctcttaaaaataaagagctgtgtgcagacaaccctatccttaaaaaggacagtaaagctagaaccaagagtggttctgtcaccctcagtcagaagccgaaaatgctgaagtgtagtaacaggaaaagtctttctccgtcaggattgaaaatacagacggggaagaaatgtgatgggcagtttagagaccagatcaaatttgaaaacaaagtcacatctaataataaagaaaatgtaactgagtgtccaaaaccttgcgatactggctgcacagggtggaataagacacaaggtaaagacagacttcctctttcaacagggccggccagccggctggctgctaagagccccataagggagaccatgaaagagtctgaatcttctcttgacgtttctcttcagaaaaagttagagacttgggaacgagaaaaggaaaaggaaaatttggaattagatgaatttttgtttttagaacaagctgctgatgaaatatcattttctagtaattcctcatttgtactgaaaatcttagaaagggatcaacagatctgcaaaggtcaccggatgtcttccacccctgtcaaagctgtgccacagaagacaaatccggcagatcccattagtcattgtaaccgcagtgaggatttggaccacactgcacgtgagaaggagagtgagtgtgaagtcgcacccaaacaacttcattcattgtcctcagctgatgaattgagggaacagccttgtaaaatcaggaaagccgtccaaaagagcacttctgaaaatcagactgaatggaatgcacgtgacgatgaaggtgttccaaatagtgacagtagcactgactctgaggaacagcttgatgttaccataaaaccatcgactgaggatagagagaggggcatcagcagcagagaggatagcccacaagtctgtgatgataaggggccttttaaggacaccaggacccaagaagataaaaggagagatgttgatctggatttgtctgataaagattacagtagcgatgagtctatcatggaaagcataaaacataaagtgtctgagccctcgagatcctcatccctaagtctgagtaaaatggactttgatgatgaaagaacttggactgaccttgaagagaatttgtgtaaccatgatgttgttcttgggaatgaatccacttatgggacgccgcagacatgctaccctaataatgaaataggtatcctggacaaaacaataaaaaggaagattgcaccagtcaagaggggagaagacttgagcaagtccaggaggagcagaagtcctcctacatcggagctgatgatgaaattctttccttctttgaaaccaaaaccaaagtcagattcacacttgggaaatgaactcaagttaaacataagtcaagaccaaccacctggtgacaatgctcgatcccaggttttgagagagaaaattattgaattggaaacagaaatagaaaagtttaaagctgagaacgcatctttagctaaacttcgcattgaacgagaaagtgccttggaaaaactcaggaaagaaattgcagacttcgaacaacagaaagcaaaagaattagctcgaatagaagagtttaaaaaggaggagatgaggaagctacaaaaggaacgtaaagtttttgaaaagtatactacagctgcaagaacttttccagataaaaaggaacgtgaagaaatacagactttaaaacagcaaatagcagatttacgggaagatttgaaaagaaaggagaccaaatggtcaagtacacacagccgtctcagaagccagatacaaatgttagtcagagagaacacagacctccgggaagaaataaaagtgatggaaagattccgactggatgcctggaagagagcagaagccatagagagcagcctcgaggtggagaagaaggacaagcttgcgaacacatctgttcgatttcaaaacagtcagatttcttcaggaacccaggtagaaaaatacaagaaaaattatcttccaatgcaaggcaatccacctcgaagatccaagtctgcacctcctcgtgatttaggcaatttggataagggacaagctgcctctcccagggagccacttgaaccactgaacttcccagatcctgaatataaagaggaggaggaagaccaagacatacagggagaaatcagtcatcctgatggaaaggtggaaaaggtttataagaatgggtgccgtgttatactgtttcccaatggaactcgaaaggaagtgagtgcagatgggaagaccatcactgtcactttctttaatggtgacgtgaagcaggtcatgccagaccaaagagtgatttactactatgcagctgcccagaccactcacacgacatacccggagggactggaagttttacatttttcaagtggacaaatagaaaaacattacccagatggaaggaaagaaatcacgtttcctgaccagactgttaaaaacttatttcctgatggacaagaagaaagcattttcccagatggtacaattgtcagagtacaacgtgatggcaacaaactcatagagtttaataatggccaaagagaactacatactgcccagttcaagagacgggaatacccagatggcactgttaaaaccgtatatgcaaacggtcatcaagaaacgaagtacagatccggtcggataagagttaaggacaaggagggtaatgtgtcaatggacacggagctgtgacgatcctcatgtgatcatgaagtaacagtaactgactttttatgttaaaaaatgtacatttactgtggattctgtttaatttattgtgtatgtgtggggaaaagattggattttaaaataaaagtttaccctgtggcattttcaaaaaaaaaaaaaaaaa

SEQ ID NO: 3088 - protein, 1338 aa, Homo sapiens
MFLMPTSSELNSGQNFLTQWMTNPSRAGVILNRGFPILEADKEKRAAVDISTSFPIKGTHFSDSFSFINEEDSLLEEQKLESNNPYKPQSDKSETHTAFPCIKKGPQVAACHSAPGHQEENKNDFIPDRASEFKEGAYKDPLFKKLEQLKEVQQKKQEQLKRQQLEQLQRLMEEQEKLLTMVSGQCTLPGLSLLPDDQSQKHRSPGNTTTGERATCCFPSYVYPDPTQEETYPSNILSHEQSNFCRTAHGDFVLTSKRASPNLFSEAQYQEAPVEKNNLKEENRNHPTGESILCWEKVTEQIQEANDKNLQKHDDSSEVANIEERPIKAAIGERKQTFEDYLEEQIQLEEQELKQKQLKEAEGPLPIKAKPKQPFLKRGEGLARFTNAKSKFQKGKESKLVTNQSTSEDQPLFKMDRQQLQRKTALKNKELCADNPILKKDSKARTKSGSVTLSQKPKMLKCSNRKSLSPSGLKIQTGKKCDGQFRDQIKFENKVTSNNKENVTECPKPCDTGCTGWNKTQGKDRLPLSTGPASRLAAKSPIRETMKESESSLDVSLQKKLETWEREKEKENLELDEFLFLEQAADEISFSSNSSFVLKILERDQQICKGHRMSSTPVKAVPQKTNPADPISHCNRSEDLDHTAREKESECEVAPKQLHSLSSADELREQPCKIRKAVQKSTSENQTEWNARDDEGVPNSDSSTDSEEQLDVTIKPSTEDRERGISSREDSPQVCDDKGPFKDTRTQEDKRRDVDLDLSDKDYSSDESIMESIKHKVSEPSRSSSLSLSKMDFDDERTWTDLEENLCNHDVVLGNESTYGTPQTCYPNNEIGILDKTIKRKIAPVKRGEDLSKSRRSRSPPTSELMMKFFPSLKPKPKSDSHLGNELKLNISQDQPPGDNARSQVLREKIIELETEIEKFKAENASLAKLRIERESALEKLRKEIADFEQQKAKELARIEEFKKEEMRKLQKERKVFEKYTTAARTFPDKKEREEIQTLKQQIADLREDLKRKETKWSSTHSRLRSQIQMLVRENTDLREEIKVMERFRLDAWKRAEAIESSLEVEKKDKLANTSVRFQNSQISSGTQVEKYKKNYLPMQGNPPRRSKSAPPRDLGNLDKGQAASPREPLEPLNFPDPEYKEEEEDQDIQGEISHPDGKVEKVYKNGCRVILFPNGTRKEVSADGKTITVTFFNGDVKQVMPDQRVIYYYAAAQTTHTTYPEGLEVLHFSSGQIEKHYPDGRKEITFPDQTVKNLFPDGQEESIFPDGTIVRVQRDGNKLIEFNNGQRELHTAQFKRREYPDGTVKTVYANGHQETKYRSGRIRVKDKEGNVSMDTEL

SEQ ID NO: 3089 - DNA, 894 bp, Homo sapiens
atgtctggcaagtcgcagagtggctgggtgtgtgggaaccatgcccgtgaccggtcctcggggatgctgctgctgcagtcgctgagggtcctagttgctgggcgctacacctgcacggctgacccagggtctccatggcctgtcactgtgccagctgcccgagagaggaaagcacgcttgatcccgtcacgaacacatttagtacgcatggaaccactacaggccctgcggacatgtttctttgttttggacaatctcctaagaactttaggtcttacagcacgaacccctcaaagtctgcctgggcacacgctacatgcagattttggtgctttcccaaccttcttgaagaaacactataatgatgtcaaaaaatttagcacacggcgcgggcgcaggcgcggagaggcgcacaggagacctcaggcccaggctccactccccagctgtgaaaggaccgctggccggacccccaagctagcccgccaggcctccatagagctgcccagcatggccgtggccagtaccaagagtcggtgggagacgggtgaggtacaggctcagtctgcgaccaagactccgtcctgcaaggcccagattgccttcctacagggagaaaggaaggaccaagaaaatttgaagaaggatcttgtgaggaagatcaaaatgttggagtatgctcttaaacagaaaagagccaaataccacaagttgaaatatgggagagaattgaatcagggagatatgaagcctccaagctatgactctgattccacattaacaaaacagccagttaatgtgaaaacaaggtcgacaactactcagacaaaggtagttcagtttctccagattaccacagaagacagctctgtggatcctcctcagatgagatga

SEQ ID NO: 3090 - DNA, 2430 bp, Homo sapiens
gcgctctactcctgtaacggaaaggtcgcggcttgtgtgcctgcgggcagccgtgccgagaatgaaccccagcacccccagctacccaacggcctcgctctacgtgggggacctccaccccgacgtgactgaggcgatgctctacgagaagttcagcccggcagggcccatcctctccatccggatctgcagggacttgatcaccagcggctcctccaactacgcgtatgtgaacttccagcatacgaaggacgcggagcatgctctggacaccatgaattttgatgttataaagggcaagccagtacgcatcatgtggtctcagcgtgatccatcacttcgaaaaagtggagtgggcaacatattcgttaaaaatctggataagtccattaataataaagcactgtatgatacagtttctgcttttggtaacatcctttcgtgtaacgtggtttgtgatgaaaatggttccaagggttatggatttgtacactttgagacacacgaagcagctgaaagagctattaaaaaaatgaacggaatgctcctaaatggtcgcaaagtatttgttggacaatttaagtctcgtaaagaacgagaagctgaacttggagctagggcaaaagagttccccaatgtttacatcaagaattttggagaagacatggatgatgagcgccttaaggatctctttggcaagttcgggcccgccttaagtgtgaaagtaatgaccgatgaaagtggaaaatccaaaggatttggatttgtaagctttgaaaggcatgaagatgcacagaaagctgtagatgagatgaatggaaaggagctcaatggaaaacaaatttacgttggtcgagctcagaaaaaagtggaacggcagacggaacttaagcgcacatttgaacagatgaagcaagataggatcaccagataccaggttgttaatctttatgtgaaaaatcttgatgatggtattgatgatgaacgtctccggaaagcgttttctccatttggtacaatcactagtgcaaaggttatgatggaaggtggtcgcagcaaagggtttggttttgtatgtttctcctccccagaagaagccactaaagcagttacagaaatgaacggtagaattgtggccacaaagccattgtatgtagctttagctcagcgcaaagaagagcgccaggcttacctcactaacgagtatatgcagagaatggcaagtgtacgagctgtgcccaaccagcgagcacctccttcaggttacttcatgacagctgtcccacagactcagaaccatgctgcatactatcctcctagccaaattgctcgactaagaccaagtcctcgctggactgctcagggtgccagacctcatccattccaaaataagcccagtgctatccgcccaggtgctcctagagtaccatttagtactatgagaccagcttcttcacaggttccacgagtcatgtcaacgcagcgtgttgctaacacatcaacacagacagtgggtccacgtcctgcagctgctgctgctgctgcagctacccctgctgtgcgcacggttccacggtataaatatgctgcgggagttcgcaatcctcagcaacatcgtaatgcacagccacaagttacaatgcaacagcttgctgttcatgtacaaggtcaggaaactttgactgcctccaggttggcatctgcccctcctcaaaagcaaaagcaaatgttaggtgaacggctctttcctcttattcaagccatgcaccctactcttgctgggaaaatcactggcatgttgttggagattgataattcagaacttctttatatgctcgagtctccagagtcactccgttctaaggttgatgaagctgtagctgtactacaagcccaccaagctaaagaggctacccagaaagcagttaacagtgctaccggtgttccaactgtttaaaattgatcagagaccacgaaaagaaatttgtgcttcaccgaagaaaaatatctaaacatcgagaaactatgggaaaaaaaattgcaaaatctaaaataaaaaatgcaaaatctaaaataaaaaatggaaaggaaactttgaaccttatgtaccgagcaaatgcaaggtctagcaaatataatgctagtcctagattacttattgatttaaaaacaaaaaaaagattacttaattttgatttaaaaacaaaaaatcgtaaaatacaaaaaccagttaatgttttgtagaccctgggaaaagaattttcagcaaagtacaaaaatttaaagcattcctttaattttttaattctttactgtggaatagctcaaaatgtccattctgttttaagtaacagaattgataactgagcaaggaaacatggtttggattataaaattcttgctttaataaaaatttcttaaacagtgaaa

SEQ ID NO: 3091 - protein, 631 aa, Homo sapiens
MNPSTPSYPTASLYVGDLHPDVTEAMLYEKFSPAGPILSIRICRDLITSGSSNYAYVNFQHTKDAEHALDTMNFDVIKGKPVRIMWSQRDPSLRKSGVGNIFVKNLDKSINNKALYDTVSAFGNILSCNVVCDENGSKGYGFVHFETHEAAERAIKKMNGMLLNGRKVFVGQFKSRKEREAELGARAKEFPNVYIKNFGEDMDDERLKDLFGKFGPALSVKVMTDESGKSKGFGFVSFERHEDAQKAVDEMNGKELNGKQIYVGRAQKKVERQTELKRTFEQMKQDRITRYQVVNLYVKNLDDGIDDERLRKAFSPFGTITSAKVMMEGGRSKGFGFVCFSSPEEATKAVTEMNGRIVATKPLYVALAQRKEERQAYLTNEYMQRMASVRAVPNQRAPPSGYFMTAVPQTQNHAAYYPPSQIARLRPSPRWTAQGARPHPFQNKPSAIRPGAPRVPFSTMRPASSQVPRVMSTQRVANTSTQTVGPRPAAAAAAAATPAVRTVPRYKYAAGVRNPQQHRNAQPQVTMQQLAVHVQGQETLTASRLASAPPQKQKQMLGERLFPLIQAMHPTLAGKITGMLLEIDNSELLYMLESPESLRSKVDEAVAVLQAHQAKEATQKAVNSATGVPTV

SEQ ID NO: 3092 - DNA, 4877 bp, Homo sapiens
atggatggaggtgctttaactgatacaagtctcacagattcctattttagcaccagctttattggagtcaatggatttggaagccctgtagaaacaaaatatcccctgatgcagagaatgactaatagtagcagctccccaagccttctaaatgacagtgccaagccatattcagcccatgatcctctaacatcacctgcttcatccttgtttaatgactttggtgccctcaacatctctcagagacgaaagacaccaaatcctactgcaagcgagtttattcctaaaggaggatcaacctccaggctgagtaacgtgtcccagtcaaatatgtctgccttctctcaagttttctctcacccatccatgggaagccctgctactgctggattagcgccaggaatgtcgttgtctgctgggtcttcccctcttcattcccccaagattactccacatacttctcctgctcccagaagaagaagtcacactccaaatccagcaagttacatggtgccttctagtgcctctacatctgttaataatcctgtttctcagactccgtcttctggtcaggtgatccaaaaggaaactgttggtgggacgacttacttctatacagacacaactccagcacctttgactggaatggtgtttccaaactatcatatttatcctccaactgcacctcacgttgcttatatgcaaccgaaagcaaacgcaccttccttcttcatggctgatgaactccgacaggagctgatcaacagacatttaataacaatggctcaaattgatcaagcagatatgccagcagttcctacagaggttgacagctaccatagcctattccctctagaaccactgccacctcccaaccggatacagaaatcaagtaattttggatatattacatcttgctacaaagctgtaaacagcaaagatgatctgccatattgccttcggaggatacatggttttcgtcttgttaacacaaagtgcatggtgttggtcgacatgtggaagaaaattcaacactcaaatatcgtaactttgcgtgaagtatttaccactaaagcatttgctgagccctctcttgtgtttgcatatgatttccatgctggaggagaaactatgatgagcagacactttaatgaccctaatgctgatgcctacttcaccaagagaaagtggggtcagcacgagggaccattgcccaggcagcatgctggattattgccagaatctcttatttgggcatatattgtccaactaagttctgcattgcgtaccattcatacagcaggtttggcatgtcgagttatggatccaacaaagattctgataactggcaaaacaaggttgcgagtaaattgtgttggagtttttgatgttttaacatttgataacagtcaaaataataatccattggcattaatggcccagtaccagcaagcagatctgatatcattaggaaaagttgtgttggctttggcttgcaactctttggcaggaattcagcgagagaatttacagaaagccatggaactggtgacaatcaactattcctctgacctgaagaatctgattttgtatttgttgactgaccaaaacaggatgcgaagtgtaaatgacatcatgcccatgattggtgctcgattttatactcaattggatgctgctcaaatgagaaatgatgtcatagaggaagaccttgcaaaggaggttcaaaatggaagactgtttaggctcctagcaaaattgggaacaatcaatgagaggccggagtttcagaaggatcccacttggtcagagactggagaccgttatctgttgaaactctttagggatcatctttttcatcaggtgacagaagcaggtgctccctggattgacctcagtcatataatttcttgtcttaacaagctagatgctggtgtgccagaaaaaataagcctgatttccagagatgagaagagtgtacttgtggtgacctacagtgacttaaagcgctgctttgaaaatacttttcaagaactgattgcagctgcaaatggtcagttgtagtatttgctaaaaaagcacgcaggacatggctaaagaccttaaccaatagcaaattgcactacagctgaacttttcatcatctcattcacatttgggaaacgaacaggagatgagcaaagctgcttgcacttcagtcaggtacactgttacttgaaaggaagaatgtttcacttacccaagagctatggctgccattggaggctgttatctgtgaagaatttattttagatttaggagcaccatcaggtgaatgatgttcctgcttttgttttttccacttgtatatgcactaattttaattttttaaagactttttctgatctttgaacttttgccacattgtatacttataatgggaaactttgcaaggacatttttgggaagcaatgctgggcagcgtttttgccattgagggttgcagaatttgctctttttgggatgggttgccctgaataacattacggaccaggtaaataatttcatagaagttcagtatagtacgtaattcttgtaagagtatcgtatgcaagctctctgtatgccacccactgttagttcaaattgagatttttgttttgttttgttcttaagaacataccaagaaaataccagtgaattgttggatatgaattccctgttagttgatttaaatcctttctgaataaagatcagataaacagtaactgaaggagcatgtatagctctttccttcaaattcaactagagcctttttaaaaagacatttgcctgctagtcagatacatttacatttatgcaaattttttaaataggagaaaattaagaaattgtgttaaaggcctaaagttcaggagtgtattactttaggttctttccagtttgctggtttttttttttttttttttttttttttttgggcgggggggaggtttatgaagttttgctctttgaaccacagctttattatggtcctttacactggagacagacacagagacactgttcagaagatgaactaaactcagcagtggtctggtatcaagagctttctgatgttttacagcctgaatttggagggataacgatctgctgtgcctttgcagtcactgcttagcccaaagtaatagtacttttgataataactcactctgtgcgatattcctgaataagtccatctcaaaagtttgggattttcctcctcttaactttcttaatatttggacatgcagttgtcgccaaacttgggtattcatggaatttctagtaaatgaaatacctatactttgatactgaagactgccaaatacataggaattttctttcttaaaaaacagtaatgaagactatatctcctttcccagcactgaatgttttactagcactgggtgctcaccatgcaactgaagaaaatgtggaaactcaaaaggtcaggacagacttccaagcacttgcaactgatgttactgtcttcaattttaataattacacatatttgtatatttcagagaagtttttaatatttctctgtccactttttataagctttaaaatgattttctctgccttgagatttgcatcaagaaaaagcacctctcttcacctgaaagctttgaagactagagacacgctttacacgttttaacaagtatattgagtccacgtttggtagcatcagttgttgagttaaaaagaaaattattgcatttgatctggatggattttaaaagaatataatgttcaatattaaaaggataattcacatttgccaccataatgttcttttttatgtaaaaagaagaacttggagacattaacatgaaaaagtcttttatcattagctcatgtatttgaggaagagcagctgtctttttatatgttttttgacaaatcatattgtattcttttgtacaaaaaagaactacttgtattctagaagaaatatgaaatgcttaatttataagcgggctggagattttttccaatattgttttctttgaaaatgaaaggggatcatctattttagttttggggtctgggaactttttgaaaatttaatttgtggaccaatgttttgtgaaagctaaagagggcaggggttaaaatagggcttgaatttctcattctgtatagaccagcaaacttccctgtgcaaggcaagtttacatcacaaatccaagaatgtttgcatcctaaatgctagtttgcttcagcccctagttaacctcaggacttggtttgcatataaaaggtagacagctgatatgttttcatgaataaatattgtcagccagaaaaggttggtgtcaggtaatgcatatttttttaagctttgttttatatttatttttcatttagtttttattgggaatggttttcaaagaactctcagttctgcctaggtgtttttgggggagccctgttttccatagtgtaattccatttaagaggttgtctaaaagtctttttaattaatagaaagattttaatatccaagagtagtcaaattaaggatataaactttccacaccttcctgtcgtgacagataaaagcacagaaaggacaacccttgaaatcatgtaacgttggtcatttcaatattttgtacctgttttaaattctgttagtgtatttacttcattgtaaatatttttgagggtacctttgtattttgcttttgaccttggttctgtgatttggatgtcaacaacttccctaaaaagcaccagtgtgttaggttctaatgtcatgacccaatttgtgttattcatctttaatcctgttttcagtctctatgtgtacagcagtatttttaataaagaattacagagataaa

SEQ ID NO: 3093 - protein, 687 aa, Homo sapiens
MDGGALTDTSLTDSYFSTSFIGVNGFGSPVETKYPLMQRMTNSSSSPSLLNDSAKPYSAHDPLTSPASSLFNDFGALNISQRRKTPNPTASEFIPKGGSTSRLSNVSQSNMSAFSQVFSHPSMGSPATAGLAPGMSLSAGSSPLHSPKITPHTSPAPRRRSHTPNPASYMVPSSASTSVNNPVSQTPSSGQVIQKETVGGTTYFYTDTTPAPLTGMVFPNYHIYPPTAPHVAYMQPKANAPSFFMADELRQELINRHLITMAQIDQADMPAVPTEVDSYHSLFPLEPLPPPNRIQKSSNFGYITSCYKAVNSKDDLPYCLRRIHGFRLVNTKCMVLVDMWKKIQHSNIVTLREVFTTKAFAEPSLVFAYDFHAGGETMMSRHFNDPNADAYFTKRKWGQHEGPLPRQHAGLLPESLIWAYIVQLSSALRTIHTAGLACRVMDPTKILITGKTRLRVNCVGVFDVLTFDNSQNNNPLALMAQYQQADLISLGKVVLALACNSLAGIQRENLQKAMELVTINYSSDLKNLILYLLTDQNRMRSVNDIMPMIGARFYTQLDAAQMRNDVIEEDLAKEVQNGRLFRLLAKLGTINERPEFQKDPTWSETGDRYLLKLFRDHLFHQVTEAGAPWIDLSHIISCLNKLDAGVPEKISLISRDEKSVLVVTYSDLKRCFENTFQELIAAANGQL

SEQ ID NO: 3094 - DNA, 5777 bp, Homo sapiens
gcggacactcctctcggctcctccccggcagcggcggcggctcggagcgggctccggggctcgggtgcagcggccagcgggcctggcggcgaggattacccggggaagtggttgtctcctggctggagccgcgagacgggcgctcagggcgcggggccggcggcggcgaacgagaggacggactctggcggccgggtcgttggccgggggagcgcgggcaccgggcgagcaggccgcgtcgcgctcaccatggtcagctactgggacaccggggtcctgctgtgcgcgctgctcagctgtctgcttctcacaggatctagttcaggttcaaaattaaaagatcctgaactgagtttaaaaggcacccagcacatcatgcaagcaggccagacactgcatctccaatgcaggggggaagcagcccataaatggtctttgcctgaaatggtgagtaaggaaagcgaaaggctgagcataactaaatctgcctgtggaagaaatggcaaacaattctgcagtactttaaccttgaacacagctcaagcaaaccacactggcttctacagctgcaaatatctagctgtacctacttcaaagaagaaggaaacagaatctgcaatctatatatttattagtgatacaggtagacctttcgtagagatgtacagtgaaatccccgaaattatacacatgactgaaggaagggagctcgtcattccctgccgggttacgtcacctaacatcactgttactttaaaaaagtttccacttgacactttgatccctgatggaaaacgcataatctgggacagtagaaagggcttcatcatatcaaatgcaacgtacaaagaaatagggcttctgacctgtgaagcaacagtcaatgggcatttgtataagacaaactatctcacacatcgacaaaccaatacaatcatagatgtccaaataagcacaccacgcccagtcaaattacttagaggccatactcttgtcctcaattgtactgctaccactcccttgaacacgagagttcaaatgacctggagttaccctgatgaaaaaaataagagagcttccgtaaggcgacgaattgaccaaagcaattcccatgccaacatattctacagtgttcttactattgacaaaatgcagaacaaagacaaaggactttatacttgtcgtgtaaggagtggaccatcattcaaatctgttaacacctcagtgcatatatatgataaagcattcatcactgtgaaacatcgaaaacagcaggtgcttgaaaccgtagctggcaagcggtcttaccggctctctatgaaagtgaaggcatttccctcgccggaagttgtatggttaaaagatgggttacctgcgactgagaaatctgctcgctatttgactcgtggctactcgttaattatcaaggacgtaactgaagaggatgcagggaattatacaatcttgctgagcataaaacagtcaaatgtgtttaaaaacctcactgccactctaattgtcaatgtgaaaccccagatttacgaaaaggccgtgtcatcgtttccagacccggctctctacccactgggcagcagacaaatcctgacttgtaccgcatatggtatccctcaacctacaatcaagtggttctggcacccctgtaaccataatcattccgaagcaaggtgtgacttttgttccaataatgaagagtcctttatcctggatgctgacagcaacatgggaaacagaattgagagcatcactcagcgcatggcaataatagaaggaaagaataagatggctagcaccttggttgtggctgactctagaatttctggaatctacatttgcatagcttccaataaagttgggactgtgggaagaaacataagcttttatatcacagatgtgccaaatgggtttcatgttaacttggaaaaaatgccgacggaaggagaggacctgaaactgtcttgcacagttaacaagttcttatacagagacgttacttggattttactgcggacagttaataacagaacaatgcactacagtattagcaagcaaaaaatggccatcactaaggagcactccatcactcttaatcttaccatcatgaatgtttccctgcaagattcaggcacctatgcctgcagagccaggaatgtatacacaggggaagaaatcctccagaagaaagaaattacaatcagagatcaggaagcaccatacctcctgcgaaacctcagtgatcacacagtggccatcagcagttccaccactttagactgtcatgctaatggtgtccccgagcctcagatcacttggtttaaaaacaaccacaaaatacaacaagagcctggaattattttaggaccaggaagcagcacgctgtttattgaaagagtcacagaagaggatgaaggtgtctatcactgcaaagccaccaaccagaagggctctgtggaaagttcagcatacctcactgttcaaggaacctcggacaagtctaatctggagctgatcactctaacatgcacctgtgtggctgcgactctcttctggctcctattaaccctccttatccgaaaaatgaaaaggtcttcttctgaaataaagactgactacctatcaattataatggacccagatgaagttcctttggatgagcagtgtgagcggctcccttatgatgccagcaagtgggagtttgcccgggagagacttaaactgggcaaatcacttggaagaggggcttttggaaaagtggttcaagcatcagcatttggcattaagaaatcacctacgtgccggactgtggctgtgaaaatgctgaaagagggggccacggccagcgagtacaaagctctgatgactgagctaaaaatcttgacccacattggccaccatctgaacgtggttaacctgctgggagcctgcaccaagcaaggagggcctctgatggtgattgttgaatactgcaaatatggaaatctctccaactacctcaagagcaaacgtgacttattttttctcaacaaggatgcagcactacacatggagcctaagaaagaaaaaatggagccaggcctggaacaaggcaagaaaccaagactagatagcgtcaccagcagcgaaagctttgcgagctccggctttcaggaagataaaagtctgagtgatgttgaggaagaggaggattctgacggtttctacaaggagcccatcactatggaagatctgatttcttacagttttcaagtggccagaggcatggagttcctgtcttccagaaagtgcattcatcgggacctggcagcgagaaacattcttttatctgagaacaacgtggtgaagatttgtgattttggccttgcccgggatatttataagaaccccgattatgtgagaaaaggagatactcgacttcctctgaaatggatggctcccgaatctatctttgacaaaatctacagcaccaagagcgacgtgtggtcttacggagtattgctgtgggaaatcttctccttaggtgggtctccatacccaggagtacaaatggatgaggacttttgcagtcgcctgagggaaggcatgaggatgagagctcctgagtactctactcctgaaatctatcagatcatgctggactgctggcacagagacccaaaagaaaggccaagatttgcagaacttgtggaaaaactaggtgatttgcttcaagcaaatgtacaacaggatggtaaagactacatcccaatcaatgccatactgacaggaaatagtgggtttacatactcaactcctgccttctctgaggacttcttcaaggaaagtatttcagctccgaagtttaattcaggaagctctgatgatgtcagatatgtaaatgctttcaagttcatgagcctggaaagaatcaaaacctttgaagaacttttaccgaatgccacctccatgtttgatgactaccagggcgacagcagcactctgttggcctctcccatgctgaagcgcttcacctggactgacagcaaacccaaggcctcgctcaagattgacttgagagtaaccagtaaaagtaaggagtcggggctgtctgatgtcagcaggcccagtttctgccattccagctgtgggcacgtcagcgaaggcaagcgcaggttcacctacgaccacgctgagctggaaaggaaaatcgcgtgctgctccccgcccccagactacaactcggtggtcctgtactccaccccacccatctagagtttgacacgaagccttatttctagaagcacatgtgtatttatacccccaggaaactagcttttgccagtattatgcatatataagtttacacctttatctttccatgggagccagctgctttttgtgatttttttaatagtgctttttttttttgactaacaagaatgtaactccagatagagaaatagtgacaagtgaagaacactactgctaaatcctcatgttactcagtgttagagaaatccttcctaaacccaatgacttccctgctccaacccccgccacctcagggcacgcaggaccagtttgattgaggagctgcactgatcacccaatgcatcacgtaccccactgggccagccctgcagcccaaaacccagggcaacaagcccgttagccccaggggatcactggctggcctgagcaacatctcgggagtcctctagcaggcctaagacatgtgaggaggaaaaggaaaaaaagcaaaaagcaagggagaaaagagaaaccgggagaaggcatgagaaagaatttgagacgcaccatgtgggcacggagggggacggggctcagcaatgccatttcagtggcttcccagctctgacccttctacatttgagggcccagccaggagcagatggacagcgatgaggggacattttctggattctgggaggcaagaaaaggacaaatatcttttttggaactaaagcaaattttagacctttacctatggaagtggttctatgtccattctcattcgtggcatgttttgatttgtagcactgagggtggcactcaactctgagcccatacttttggctcctctagtaagatgcactgaaaacttagccagagttaggttgtctccaggccatgatggccttacactgaaaatgtcacattctattttgggtattaatatatagtccagacacttaactcaatttcttggtattattctgttttgcacagttagttgtgaaagaaagctgagaagaatgaaaatgcagtcctgaggagagttttctccatatcaaaacgagggctgatggaggaaaaaggtcaataaggtcaagggaagaccccgtctctataccaaccaaaccaattcaccaacacagttgggacccaaaacacaggaagtcagtcacgtttccttttcatttaatggggattccactatctcacactaatctgaaaggatgtggaagagcattagctggcgcatattaagcactttaagctccttgagtaaaaaggtggtatgtaatttatgcaaggtatttctccagttgggactcaggatattagttaatgagccatcactagaagaaaagcccattttcaactgctttgaaacttgcctggggtctgagcatgatgggaatagggagacagggtaggaaagggcgcctactcttcagggtctaaagatcaagtgggccttggatcgctaagctggctctgtttgatgctatttatgcaagttagggtctatgtattta

SEQ ID NO: 3095 - protein, 1338 aa, Homo sapiens
MVSYWDTGVLLCALLSCLLLTGSSSGSKLKDPELSLKGTQHIMQAGQTLHLQCRGEAAHKWSLPEMVSKESERLSITKSACGRNGKQFCSTLTLNTAQANHTGFYSCKYLAVPTSKKKETESAIYIFISDTGRPFVEMYSEIPEIIHMTEGRELVIPCRVTSPNITVTLKKFPLDTLIPDGKRIIWDSRKGFIISNATYKEIGLLTCEATVNGHLYKTNYLTHRQTNTIIDVQISTPRPVKLLRGHTLVLNCTATTPLNTRVQMTWSYPDEKNKRASVRRRIDQSNSHANIFYSVLTIDKMQNKDKGLYTCRVRSGPSFKSVNTSVHIYDKAFITVKHRKQQVLETVAGKRSYRLSMKVKAFPSPEVVWLKDGLPATEKSARYLTRGYSLIIKDVTEEDAGNYTILLSIKQSNVFKNLTATLIVNVKPQIYEKAVSSFPDPALYPLGSRQILTCTAYGIPQPTIKWFWHPCNHNHSEARCDFCSNNEESFILDADSNMGNRIESITQRMAIIEGKNKMASTLVVADSRISGIYICIASNKVGTVGRNISFYITDVPNGFHVNLEKMPTEGEDLKLSCTVNKFLYRDVTWILLRTVNNRTMHYSISKQKMAITKEHSITLNLTIMNVSLQDSGTYACRARNVYTGEEILQKKEITIRDQEAPYLLRNLSDHTVAISSSTTLDCHANGVPEPQITWFKNNHKIQQEPGIILGPGSSTLFIERVTEEDEGVYHCKATNQKGSVESSAYLTVQGTSDKSNLELITLTCTCVAATLFWLLLTLLIRKMKRSSSEIKTDYLSIIMDPDEVPLDEQCERLPYDASKWEFARERLKLGKSLGRGAFGKVVQASAFGIKKSPTCRTVAVKMLKEGATASEYKALMTELKILTHIGHHLNVVNLLGACTKQGGPLMVIVEYCKYGNLSNYLKSKRDLFFLNKDAALHMEPKKEKMEPGLEQGKKPRLDSVTSSESFASSGFQEDKSLSDVEEEEDSDGFYKEPITMEDLISYSFQVARGMEFLSSRKCIHRDLAARNILLSENNVVKICDFGLARDIYKNPDYVRKGDTRLPLKWMAPESIFDKIYSTKSDVWSYGVLLWEIFSLGGSPYPGVQMDEDFCSRLREGMRMRAPEYSTPEIYQIMLDCWHRDPKERPRFAELVEKLGDLLQANVQQDGKDYIPINAILTGNSGFTYSTPAFSEDFFKESISAPKFNSGSSDDVRYVNAFKFMSLERIKTFEELLPNATSMFDDYQGDSSTLLASPMLKRFTWTDSKPKASLKIDLRVTSKSKESGLSDVSRPSFCHSSCGHVSEGKRRFTYDHAELERKIACCSPPPDYNSVVLYSTPPI

SEQ ID NO: 3096 - DNA, 1352 bp, Homo sapiens
ggggggaaacggaagtgagcggcggggtcgactgacggtaacggggcagagaggctgttcgcagagctgcggaagatgaatgccagaggacttggatctgagctaaaggacagtattccagttactgaactttcagcaagtggaccttttgaaagtcatgatcttcttcggaaaggtttttcttgtgtgaaaaatgaacttttgcctagtcatccccttgaattatcagaaaaaaatttccagctcaaccaagataaaatgaatttttccacactgagaaacattcagggtctatttgctccgctaaaattacagatggaattcaaggcagtgcagcaggttcagcgtcttccatttctttcaagctcaaatctttcactggatgttttgaggggtaatgatgagactattggatttgaggatattcttaatgatccatcacaaagcgaagtcatgggagagccacacttgatggtggaatataaacttggtttactgtaatagtgtgctgttcatggaaaccgagggctgcatcttgtttatagtcatctttgtactgtaatttgatgtacacaacattaaaagtactgacacctgagaatttctgctcaagtagtatcagtgatcatttaaaatttggaggggtctttggtttacagccatgtgacaattaaaagcactaaagggagatcatgttaaagctcttaatttatattaaaacagtagcctttgtctttaaaaaagttgttgctcatgaatattataaaatgatctacaggtttcaattcaacctgtttctaggtttttttgtaaatttagttttgattaagcattataagcatttgagtctataaactttatagtagcatctttcagaataaacatttttaattgatttcagtggcaactctcaaattgattacaatatgagatatatcagtgtcgtccattaacactcataagaataatatttactgtgtcagtgctattttaggattatagttattgtttgattatttcaggttgaaaagtagaagttccaaggttttgattttggtctggtctttaagtgaaaaattaaagcaaccagtagatgtaggttaaacttttacttcatagacttaatatgtgattaatatattgccaagcaacactgttaaagaaaagtaaaactcattttttcttgttcttaatttatatattacaagatactgtaaggtattctttatgaagttgatatataaaaatttacatttttagaacattagtgaatggatcatcttttacaattaaaagtatattttgattatcagtttcttagcaaaaaaaaaaaaaaaaaaaaaaaaaaaaaa

SEQ ID NO: 3097 - protein, 141 aa, Homo sapiens
MNARGLGSELKDSIPVTELSASGPFESHDLLRKGFSCVKNELLPSHPLELSEKNFQLNQDKMNFSTLRNIQGLFAPLKLQMEFKAVQQVQRLPFLSSSNLSLDVLRGNDETIGFEDILNDPSQSEVMGEPHLMVEYKLGLL

SEQ ID NO: 3098 - DNA, 3467 bp, Homo sapiens
ggcagggcggcggcggcagcggcgcagctccgctccccgcgcgtctcccttccccgcgcccaggtagggcgctcagcctccgccgccaggatgcggccgcccgcctgctggtggctgctcgcgccgccggcgctgctcgcgctcctcacctgctccctggcttttggtttggcttctgaagatacaaagaaagaggtcaagcagtctcaggatttggagaaaagtggtatatcaaggaaaaatgacatagacttaaaaggaattgtattcgtcatccagagtcaaagtaattcttttcatgcaaagagagcagagcagttaaaaaaaagcatcttaaagcaggctgcagatcttacacaggagctccccagtgtcctcctccttcatcagctggctaaacaagaaggtgcatggaccatacttccgttgttaccgcacttttctgtaacatatagcagaaattcatcttggattttcttctgtgaagaagagacaagaatacagattccaaaactcttggaaaccctcagaagatatgacccctctaaggaatggtttttgggaaaagcattacatgatgaagaagctacaataattcaccattatgccttttccgagaatcctacagtttttaagtatccagactttgctgcaggctgggccttaagtattccacttgtaaacaagcttaccaagagactaaagagtgaatccttgaaatccgactttacaatagatttaaaacatgagattgccctctacatctgggacaaaggcggaggacctcccctgaccccagtgcctgagttttgtaccaatgacgtggacttctactgtgctaccacattccattcttttctaccgctttgtagaaagccagtgaagaagaaggatatttttgttgcagtaaaaacatgcaagaaatttcatggtgacagaatgcctattgttaagcagacttgggagagccaggcaagtctcattgaatactatagtgactatactgaaaattccattcctactgtggatttgggaattcctaatacagatagaggtcattgtggaaagacatttgccattttggaaagatttctgaatcgtagccaggacaaaacagcatggttagtcattgtggatgatgatacattaataagtatctccaggctccagcacttgcttagctgttatgactccggcaagcctgtgtttctgggagagcgctacggctacggcctgggcactggtggctacagctacatcacgggaggaggaggaatggtcttcagcagagaagccgtcaggagacttctcgccagtaaatgtcgatgctacagcaatgatgctcccgatgatatggtcctgggaatgtgctttagtggcttgggaatccctgtgacacacagccctctcttccatcaggctcggccggtggattaccctaaggactacctttctcatcaagttcccatatcgttccacaaacactggaacatcgatccagtgaaggtgtatttcacatggttggcacccagtgacgaagacaaagccaggcaggagacacagaaaggttttcgagaggagttataaatcagggtgacctgtgcgcctagcctgctcagggagtgaactggagactgtggcctcatcccactgtgctgtgctcacaacacttgtgtctgccacatggcattgggtgcttcctgactttagggggagattttatgtatggtattttttgacagaggaagaaaaggggtcacaggagaaacatttttttttctgggaaaaatcacttgcttttgacttatgcagttgttttaacacttagtgatgactgtgtattctccaagctgtgatacagcagtttttttttattgtcacagggaaataaatggtaccagaagtccctttcctgttctgtctcttcattgtaatggaagtttcagttgggcatgagcctggagagatgtgactgtctacagttctatttgtatatataaaaagaggactgaaagtcttttgacatggatattgtgaatggtatgaacttttaaaccatattattgatgatgaaaattatttcctgggaactcagtaggaataataccgtattaaggaataatactgtacataaaacatcatgaaaccctagatatgaaatcccctgaagtctgtaatcatggtggttatgttttgtctattcttttgctgtttgtgcctcataaaaagagaatgaggtcttctgctagagcttcgtattgctttggaagttcatctgtgttttatttctccctgaagccctatctttatggcttacttgtaacatgaaagtagtagatgctgccagaaaatagtgtcctcaatatttaaaacaatgttgacatgttttgttcaagtcagcaagctctatgtgagtctcaggaagtgaattaaatttggaccttatgttttactcttgtttttttttttttttttgaatgttacttaatgactctctcctgactcaggagagaaaccccttgtggaaggacagcatggtgatcaggcaatttctctgggttcccaaagaatgacatttgaacacagtattttgaaacagctctagttttcaaattatatctttaatatatagtaatgtaacatattcagtattaatgtataaaaagcactctaattatataattcagtttttgtaaaggtatttgcataaaatttaatatgtcttaaactaattttggtaaattacttcttttttttctttttaataaaaactgttactcattaactttgcttataatgctttttatagcccagcacagaatttaaagccataccaccaaaagtacctgtgtgtgttaatatgtttttcttgtagcatagattgactatttgcaatagtattagtatttaccatttttccaaattagcaactaccagacctcacgtgttgcagtgataacacaatgcattggattcagttttgtgaaaatggattctgtggccatccaagggatgtatcagggatgatcagctgatgagaggctccagaaggatttctagatcgcttcaagcctatactgatggccttagctttgttcagtcattgtaactgggattgttgtcattgctaccgtggtagtcaccttcatgtcatctataatagtactcctggagagccctggctgcctacaccagtggaaaagagtctccagttctgctctggcctactaactgttaccactgagagaacaacatgttcatttgacatgattgaagctggcatccgtatatgaagatccttgtcaagctttcttctgtggtctgattagtgttgataccggggcacctcctctggtacttttaagtgttttgttatttatgtttactttttggaatggtgtaagcctaaccacaaataaaagatctttgcctaaaaaaaaaaaaaaaaaagaaaaaaaaaaaaaaaa

SEQ ID NO: 3099 - protein, 498 aa, Homo sapiens
MRPPACWWLLAPPALLALLTCSLAFGLASEDTKKEVKQSQDLEKSGISRKNDIDLKGIVFVIQSQSNSFHAKRAEQLKKSILKQAADLTQELPSVLLLHQLAKQEGAWTILPLLPHFSVTYSRNSSWIFFCEEETRIQIPKLLETLRRYDPSKEWFLGKALHDEEATIIHHYAFSENPTVFKYPDFAAGWALSIPLVNKLTKRLKSESLKSDFTIDLKHEIALYIWDKGGGPPLTPVPEFCTNDVDFYCATTFHSFLPLCRKPVKKKDIFVAVKTCKKFHGDRMPIVKQTWESQASLIEYYSDYTENSIPTVDLGIPNTDRGHCGKTFAILERFLNRSQDKTAWLVIVDDDTLISISRLQHLLSCYDSGKPVFLGERYGYGLGTGGYSYITGGGGMVFSREAVRRLLASKCRCYSNDAPDDMVLGMCFSGLGIPVTHSPLFHQARPVDYPKDYLSHQVPISFHKHWNIDPVKVYFTWLAPSDEDKARQETQKGFREEL

SEQ ID NO: 3100 - DNA, 2887 bp, Homo sapiens
gagactagggggcggcgaggagtgggacccgctcgcggccattggttgtgcggccaggaggggcggagggacgacgcgcgggctgtgcggggccggcagcccggatccactcccgctgcgcctgctgtccgccgtgcgcccagactgcgcgccgcgccgctgcgcccaacattcccgaggacggcttcgcgggcgcgtatcgtccagaccggagcaccgccccaccgctagcgcaggagacctgccggggaagtcgcgtgtcctgacctgcagtctcaatgcacatctgatacctgctgcctttgagaaacaagttttgttgtgctgatttaacagcctgtgaattctgcaaacacgatcgtgaaaaaatgccaatctgtcctgtgtaagccctgtgtgaagttttgactttaatctaccagatcactccttcaccctccataaagatgtctgaacctgacacttcctcaggattttcgggaagtgtggagaatggaacttttcttgagctgtttcccacatccctgtccacgtcagtggacccatcctcaggccacctgtcaaacgtctacatctatgtgtccatattcctcagccttttagcgtttctgcttctgcttttaatcattgccctccagaggctcaaaaatatcatctcctccagttcctcctacccagggtatccaagcgacgctggaagttctttcaccaatttggaagtctgcagcatttcctctcagaggtccactttttcaaacctttcatcctgaggaaaatggaagagtccttgagtgtggcagcagttttgacatccccttacggaagtgtcccgtgaggcattgcctcatgaaagaaatgatccttttggtgtagacctgcttctccttctcctttttctctgatttcttttctgttcatgatgcttttcatttggggatggagacaccgatgttggtggaaatgtgtgcaaaccccaaggtgcagaatttcacacaaatggcttgatgaatctagactgggcttcttcaggtaagtcagttcattctactttgttggacgccgtagactcatctgaggtggcctctccgtggatgctggacatggactcgcacttcatttcttttacaaagccgtgaaatcaactgagcctgcagaaactggcaaaatcaagtctgacctatgtagaagttattttccatatttaaaagataaagtggagacaccaaacttaaaaaggaagagagtcaatttagatttaatgtatgacatttctaaaactgagggtaaatatatgctaaatattttctttaacttcactttaacaagtaaaaatcacacttattgatgaatgtaagtcatttgggaaagttttggaagagtttacattttaatagcaagacaaacatgtattatgatggagcttgtgatgtatttctgcctcctggagttttattttgtttttctgcttatgttttagtcataatgccacaaagttgtggaatttttgtgattaattgctgttactagtactaagagaagcaccagaagagatgccaagaagtttttatatgaataatttctatcagtgagaattaagcatatggaaaatattcatttagttgtattttatacagtaataactcttagctgtcgtgtaagttcctttattcggtttcatagtctttataattttagtgcagaattatattaagcctccaagatgtctgatatttgttcactcacattaggttgtaaaacttagaaactaaattgcaaatatatgtgttattatatactccacgaatgttgcgtctctgataattagttgttgtatgttaacataatactctacattaggatttcaggatgtgagtttgtattaaaaattgtaggcactcaagttgtgtagctgctgggagctttagggatcctaggagctgccgtgctgcaggcagcagagtatgtctgaactcggcgggcgggtggcaggggctgtctgtgaaattaggcacacatgtgagctcagacatggaatgtggaggaactcaagctgcccctaaaaacaaaacaatcaaactgcagctccttaagagtaagaattttaatttaattttgaaaataaatggcccacagggtaaacactgaacttattcaacctacaggaggccactgcatcaacacgccacggtcttcccatggcaactgaatcattccttgttcaaaacatttaatcatcttaagcagtggggcttcaacacaccgtttggttagattgtgcagtcagcactctccagtgattagaatgggggaaagaatccactatttgtacagggtttatctttatcatactaaaatgctgagtgagtggaggtctgggaatgaaaatcagaagtcttcttcttcttttaattcataagcctcacttaaatcagaacacatttaactatttatatatcaaaaacgtccccaaacaccataagaccagcacagagttgctgccctaaaatgtataattagtgaaaaatttacctctgcttccatttaaagcatggcagtgggttgggtgtcattatgtagtataaaaactggactagataaactgctattttagagcattattagcattctctgaatatatgtatatatacatatatatacgcacacacacacacacataaatatatatatatatatatatataaactcacatactcccaattaaaagtcgtgtgaaagctacacaggattacagaggcatctatattatcacttttgctctttgactaatcctatgctgtttttgttatagagagaaacaaggacatggatgaagtgattttttttttaaataaaaggacaaatttgccacacaaaaaaaaaaaaaaaa

SEQ ID NO: 3101 - protein, 107 aa, Homo sapiens
MSEPDTSSGFSGSVENGTFLELFPTSLSTSVDPSSGHLSNVYIYVSIFLSLLAFLLLLLIIALQRLKNIISSSSSYPGYPSDAGSSFTNLEVCSISSQRSTFSNLSS

SEQ ID NO: 3102 - DNA, 2825 bp, Homo sapiens
cgcgcaggctgcggtcgcgcaggcgcagtcggggcgccttcccggtataggcgccttttaccccagcgtgtcctgagtctttggttcgcgaagtgccgttaggccaagcaggtgctaaaagcccggggtcgtggaccccggccaggtcttagcagcatggaggcgcagggtgtagcggagggcgcggggccgggcgccgccagcggcgtgccccaccccgcggccctagccccggctgcggctcccaccttggcgccagcctcggtggcggccgcggcctctcaattcaccctgctagtgatgcaaccctgtgctgggcaggacgaggctgcggcccccgggggcagcgttggggcgggcaagcccgttaggtacctgtgcgaaggggccggggatggcgaagaggaggctggggaggacgaggcggacctgttagacacttcggaccctccggggggaggcgagagcgcggctagtttggaggatctagaggacgaggagactcactcggggggcgagggcagcagcgggggcgcccggaggcggggcagcggtgggggcagcatgagcaagacctgcacctacgaaggctgcagcgagaccacgagccaggtggccaagcagcgcaaaccgtggatgtgcaagaaacaccgcaacaagatgtacaaggacaagtataaaaagaagaagagcgaccaggccctgaactgcggtgggactgcctcgactggcagcgcgggaaacgtcaaactcgaggaaagtgcagataacatactctccattgttaaacaaagaacaggatcttttggggatcgtcctgcaagacctactcttttagaacaagtgttaaatcaaaaaagactgtcgttactaagaagtccagaagtagtgcaatttttacagaaacagcaacagctattaaatcagcaagttttggagcaaagacaacagcagtttccaggaacatcaatgtgagggaacttaccaagaacatctacatggtttttatcttattgtaatagatgagcatatttttttaccagacataaatggggtaataatctatgcctgtagaacataaacattttcctgtaaatgtatgtgtgcatttggggataagtaagtattgcactttgtgcatctaatctttcagattactgtgagtttgaagaagtcagcttatctttccaaataacatttaattataatgttttttaaaaaatatattcctcttcagtcattgttactgaaggtaatgaagcagttactttctgtggaagtcataaagttaatagatattaatcttgactcatctagctcagtggttctcatcaagggtcaatttgattgtcatagtgaccttgaaaaccactggcttttagtgagtggccaggaaatgctaaatgttctgcagtgtcaggggtagtcccacatactaaagattgtctcacccgcagtgccaataacactcctaagaaatgttgatggctattttgtggtgctaacatgtagttggggcacctacaattgggttctcttaataacctttctttgcagttaagactgaagctgtcaaagaggtaagcacattttatatagacgtaaggaaagtgattattgtttaatatctgtgaatttaggatgtgcatctcttttcagaggtgtgttagtaaaacctgacggattaactaagcacactgggatgtgtctcctacagttggcttctctctttgatgttacctgttagtgctgatctcttaaagcagacatttcttgtttgttgaatttgtgaacagtatagatctcagcccaccaatgccaagacaaaattatttttcttatacttattttttattaaacaaaatgaaaaagatccttttcaaaaaggtgatcctgaaaataaaactaacactccagtattttgtcattgtttttcgcaattgagctatctgaaaactgttattcctaagtaatgttcaaaaatgataagtaatctggatacctttttcttatactttctcctaggaaaactttaaaactttaaaaaggcaaacctaccaataggaataacaaattaaatgtcaagagagtatatccaatattaggatataaatgtatgtgtctcaagtttaactctacaaaaatttgttacttgttttttaaactctatatataaagttcgacttaatcatggctgttctaagaagtacttatggagagcaagaacatttttgttcatttcttaatgtgtgtgtttttacttgcatatctgttcaaaacacttttaacaaaattaattcattaaagtccagttgttgacctttgagttagctgatttctttattctgttctttagtttattcttactagatgcagaggaattcatctactgtctgttattaactgttagtttattctcatacttacgatgttgagagtttttttgaagcttaagttaccctttatggtggaaaacattagcttatgcttctttagatggaataatgggaaaggagggaaatgggaaatggatggaaatgggaaaggagggaaaataatagcccagtgagagctgaatgaaaagggactgaatttaaatatttgtaagaactttgtgatgatgagtaattgtcagacgtgggatagataactgagaggctcagaatctttaccaaggatattttttaggataaggtagctgcctgttcatgaatttggataagaatagtaggacaatattcaacacaatttaatttttgtctgccacattagacatttttttaccttataaaatgatcaataaagcaataaggtttattttgggt

SEQ ID NO: 3103 - protein, 272 aa, Homo sapiens
MEAQGVAEGAGPGAASGVPHPAALAPAAAPTLAPASVAAAASQFTLLVMQPCAGQDEAAAPGGSVGAGKPVRYLCEGAGDGEEEAGEDEADLLDTSDPPGGGESAASLEDLEDEETHSGGEGSSGGARRRGSGGGSMSKTCTYEGCSETTSQVAKQRKPWMCKKHRNKMYKDKYKKKKSDQALNCGGTASTGSAGNVKLEESADNILSIVKQRTGSFGDRPARPTLLEQVLNQKRLSLLRSPEVVQFLQKQQQLLNQQVLEQRQQQFPGTSM

SEQ ID NO: 3104 - DNA, 1943 bp, Homo sapiens
gcaacttgaattggtcccagctgctcccagaagaacgggcgggttggtccctatgccacccctggagagctactcgccgcccactttgccgtgaagggctgtgcggttcccgtgcgcgccggagcctgctgtggcctcttatgcactccaccacccccatcagctccctcttctccttcaccagccccgcagtgaagagactgctaggctggaagcaaggagatgaagaggaaaagtgggcagagaaggcagtggactctctagtgaagaagttaaagaagaagaagggagccatggacgagctggagagggctctcagctgcccggggcagcccagcaaatgcgtcacgattccccgctccctggacgggcggctgcaggtgtcccaccgcaagggcctgccccatgtgatttactgtcgcgtgtggcgctggccggatctgcagtcccaccacgagctgaagccgctggagtgctgtgagttcccatttggctccaagcagaaagaagtgtgcattaacccttaccactaccgccgggtggagactccagtactgcctcctgtgctcgtgccaagacacagtgaatataacccccagctcagcctcctggccaagttccgcagcgcctccctgcacagtgagccactcatgccacacaacgccacctatcctgactctttccagcagcctccgtgctctgcactccctccctcacccagccacgcgttctcccagtccccgtgcacggccagctaccctcactccccaggaagtccttctgagccagagagtccctatcaacactcagactttcgaccagtttgttacgaggagccccagcactggtgctcggtcgcctactatgaactgaacaaccgagttggggagacattccaggcttcctcccgaagtgtgctcatagatgggttcaccgacccttcaaataacaggaacagattctgtcttggacttctttctaatgtaaacagaaactcaacgatagaaaataccaggagacatataggaaagggtgtgcacttgtactacgtcgggggagaggtgtatgccgagtgcgtgagtgacagcagcatctttgtgcagagccggaactgcaactatcaacacggcttccacccagctaccgtctgcaagatccccagcggctgcagcctcaaggtcttcaacaaccagctcttcgctcagctcctggcccagtcagttcaccacggctttgaagtcgtgtatgaactgaccaagatgtgtactatccggatgagttttgttaagggttggggtgctgagtatcatcgccaggatgtcaccagcaccccctgctggattgagattcatcttcatgggccactgcagtggctggacaaagttctgactcagatgggctctccacataaccccatttcttcagtgtcttaacagtcatgtcttaagctgcatttccataggatagaggctattgcagggagtggcttgtatcatttcagatttgcaactgaagtttctaaaaacatgtgtaaatacatagaatgtatactgttcttattttttttaatcaccgtttgttttgtgctttctagttaacctgatgccagtacagtgcaattggaaaagcaggactttggtgcctgtgctataagcagcagattttgtgggaggaaacacttgagaggcgatattgtcaacagtatttgaagggtgttagcagaataaaagacagctttagtcagccgtgtcattataaagcatgttgtgtggcctcacagaaacattgaaactgtttatacagcaaaagtcaggtattagcagcactaaagcaaatatcactcagatgaaacaaagcagtgaaaccctacagtttaaatgatgtcacttttagtgctgttggcaagaaaaaaaaaaaaaaaaaccaaaaaaaaaaaaaaaaaa

SEQ ID NO: 3105 - protein, 430 aa, Homo sapiens
MHSTTPISSLFSFTSPAVKRLLGWKQGDEEEKWAEKAVDSLVKKLKKKKGAMDELERALSCPGQPSKCVTIPRSLDGRLQVSHRKGLPHVIYCRVWRWPDLQSHHELKPLECCEFPFGSKQKEVCINPYHYRRVETPVLPPVLVPRHSEYNPQLSLLAKFRSASLHSEPLMPHNATYPDSFQQPPCSALPPSPSHAFSQSPCTASYPHSPGSPSEPESPYQHSDFRPVCYEEPQHWCSVAYYELNNRVGETFQASSRSVLIDGFTDPSNNRNRFCLGLLSNVNRNSTIENTRRHIGKGVHLYYVGGEVYAECVSDSSIFVQSRNCNYQHGFHPATVCKIPSGCSLKVFNNQLFAQLLAQSVHHGFEVVYELTKMCTIRMSFVKGWGAEYHRQDVTSTPCWIEIHLHGPLQWLDKVLTQMGSPHNPISSVS

SEQ ID NO: 3106 - DNA, 3213 bp, Homo sapiens
agagactcaagatgattccctttttacccatgttttctctactattgctgcttattgttaaccctataaacgccaacaatcattatgacaagatcttggctcatagtcgtatcaggggtcgggaccaaggcccaaatgtctgtgcccttcaacagattttgggcaccaaaaagaaatacttcagcacttgtaagaactggtataaaaagtccatctgtggacagaaaacgactgttttatatgaatgttgccctggttatatgagaatggaaggaatgaaaggctgcccagcagttttgcccattgaccatgtttatggcactctgggcatcgtgggagccaccacaacgcagcgctattctgacgcctcaaaactgagggaggagatcgagggaaagggatccttcacttactttgcaccgagtaatgaggcttgggacaacttggattctgatatccgtagaggtttggagagcaacgtgaatgttgaattactgaatgctttacatagtcacatgattaataagagaatgttgaccaaggacttaaaaaatggcatgattattccttcaatgtataacaatttggggcttttcattaaccattatcctaatggggttgtcactgttaattgtgctcgaatcatccatgggaaccagattgcaacaaatggtgttgtccatgtcattgaccgtgtgcttacacaaattggtacctcaattcaagacttcattgaagcagaagatgacctttcatcttttagagcagctgccatcacatcggacatattggaggcccttggaagagacggtcacttcacactctttgctcccaccaatgaggcttttgagaaacttccacgaggtgtcctagaaaggttcatgggagacaaagtggcttccgaagctcttatgaagtaccacatcttaaatactctccagtgttctgagtctattatgggaggagcagtctttgagacgctggaaggaaatacaattgagataggatgtgacggtgacagtataacagtaaatggaatcaaaatggtgaacaaaaaggatattgtgacaaataatggtgtgatccatttgattgatcaggtcctaattcctgattctgccaaacaagttattgagctggctggaaaacagcaaaccaccttcacggatcttgtggcccaattaggcttggcatctgctctgaggccagatggagaatacactttgctggcacctgtgaataatgcattttctgatgatactctcagcatggttcagcgcctccttaaattaattctgcagaatcacatattgaaagtaaaagttggccttaatgagctttacaacgggcaaatactggaaaccatcggaggcaaacagctcagagtcttcgtatatcgtacagctgtctgcattgaaaattcatgcatggagaaagggagtaagcaagggagaaacggtgcgattcacatattccgcgagatcatcaagccagcagagaaatccctccatgaaaagttaaaacaagataagcgctttagcaccttcctcagcctacttgaagctgcagacttgaaagagctcctgacacaacctggagactggacattatttgtgccaaccaatgatgcttttaagggaatgactagtgaagaaaaagaaattctgatacgggacaaaaatgctcttcaaaacatcattctttatcacctgacaccaggagttttcattggaaaaggatttgaacctggtgttactaacattttaaagaccacacaaggaagcaaaatctttctgaaagaagtaaatgatacacttctggtgaatgaattgaaatcaaaagaatctgacatcatgacaacaaatggtgtaattcatgttgtagataaactcctctatccagcagacacacctgttggaaatgatcaactgctggaaatacttaataaattaatcaaatacatccaaattaagtttgttcgtggtagcaccttcaaagaaatccccgtgactgtctatacaactaaaattataaccaaagttgtggaaccaaaaattaaagtgattgaaggcagtcttcagcctattatcaaaactgaaggacccacactaacaaaagtcaaaattgaaggtgaacctgaattcagactgattaaagaaggtgaaacaataactgaagtgatccatggagagccaattattaaaaaatacaccaaaatcattgatggagtgcctgtggaaataactgaaaaagagacacgagaagaacgaatcattacaggtcctgaaataaaatacactaggatttctactggaggtggagaaacagaagaaactctgaagaaattgttacaagaagaggtcaccaaggtcaccaaattcattgaaggtggtgatggtcatttatttgaagatgaagaaattaaaagactgcttcagggagacacacccgtgaggaagttgcaagccaacaaaaaagttcaaggttctagaagacgattaagggaaggtcgttctcagtgaaaatccaaaaaccagaaaaaaatgtttatacaaccctaagtcaataacctgaccttagaaaattgtgagagccaagttgacttcaggaactgaaacatcagcacaaagaagcaatcatcaaataattctgaacacaaatttaatatttttttttctgaatgagaaacatgagggaaattgtggagttagcctcctgtggtaaaggaattgaagaaaatataacaccttacaccctttttcatcttgacattaaaagttctggctaactttggaatccattagagaaaaatccttgtcaccagattcattacaattcaaatcgaagagttgtgaactgttatcccattgaaaagaccgagccttgtatgtatgttatggatacataaaatgcacgcaagccattatctctccatgggaagctaagttataaaaataggtgcttggtgtacaaaactttttatatcaaaaggctttgcacatttctatatgagtgggtttactggtaaattatgttattttttacaactaattttgtactctcagaatgtttgtcatatgcttcttgcaatgcatattttttaatctcaaacgtttcaataaaaccatttttcagatataaagagaattacttcaaattgagtaattcagaaaaactcaagatttaagttaaaaagtggtttggacttgggaa

SEQ ID NO: 3107 - protein, 836 aa, Homo sapiens
MIPFLPMFSLLLLLIVNPINANNHYDKILAHSRIRGRDQGPNVCALQQILGTKKKYFSTCKNWYKKSICGQKTTVLYECCPGYMRMEGMKGCPAVLPIDHVYGTLGIVGATTTQRYSDASKLREEIEGKGSFTYFAPSNEAWDNLDSDIRRGLESNVNVELLNALHSHMINKRMLTKDLKNGMIIPSMYNNLGLFINHYPNGVVTVNCARIIHGNQIATNGVVHVIDRVLTQIGTSIQDFIEAEDDLSSFRAAAITSDILEALGRDGHFTLFAPTNEAFEKLPRGVLERFMGDKVASEALMKYHILNTLQCSESIMGGAVFETLEGNTIEIGCDGDSITVNGIKMVNKKDIVTNNGVIHLIDQVLIPDSAKQVIELAGKQQTTFTDLVAQLGLASALRPDGEYTLLAPVNNAFSDDTLSMVQRLLKLILQNHILKVKVGLNELYNGQILETIGGKQLRVFVYRTAVCIENSCMEKGSKQGRNGAIHIFREIIKPAEKSLHEKLKQDKRFSTFLSLLEAADLKELLTQPGDWTLFVPTNDAFKGMTSEEKEILIRDKNALQNIILYHLTPGVFIGKGFEPGVTNILKTTQGSKIFLKEVNDTLLVNELKSKESDIMTTNGVIHVVDKLLYPADTPVGNDQLLEILNKLIKYIQIKFVRGSTFKEIPVTVYTTKIITKVVEPKIKVIEGSLQPIIKTEGPTLTKVKIEGEPEFRLIKEGETITEVIHGEPIIKKYTKIIDGVPVEITEKETREERIITGPEIKYTRISTGGGETEETLKKLLQEEVTKVTKFIEGGDGHLFEDEEIKRLLQGDTPVRKLQANKKVQGSRRRLREGRSQ

SEQ ID NO: 3108 - DNA, 1154 bp, Homo sapiens
cttcccctcatcagctatgtgacaagaagtcactaaacttttctatatctcggcttctttattaataaaatgagaggtgggattaggttacctccaaggttttaacattctttgatcttatacaaatgccagtgaagaagcatttttatttttaataacactttcctcttcagatggccaagttattgtgattgaaggcattccaggaaacaggaaacagtggcggcatgaagctccaggaactttaatgagtgttttggcagcagcacatctaacgagtagctcattttctgccgatgaagaatttgcaatgggaacattaaaacaatggctacccaaagaagaagatgaagggaaggtagaaatggtctctggcattgaagtagatgaggaacaactagaaccaagatctgatgatgatgatacaaattttgaagaatctgaagatgagttgagagatgaagtagtagaatacttagaaaaactcgctactttcaaaggggaagaaaaaacagaagaggcctccagtacctctaaggactctagaaagtcaagagaaagagaggggataagtatgcagaaatctgaagaattaagggagggcttggagaatatttctactacatctaatgaccacatttgtattactgatgaagaccaaggaacatcaacaaccagtcaaaatatacaagtgtgattattgtactttttcttaagtaataagttagtgtctattacctatagtatttatttgggtacaagtcataaatgctcatttactgtaagggttttctagtaatctcaaggatttattaatttttctttcaatttaggaagtagaacttttgaatatagccattaatatttttactttaaagtttctattaagaaatcttaggccgggcagtctcatcactttgggaggccaaggcaggcagatcatgaggtcaggagtttgagaccagtccaaccaacatggtgaaaccccgtctctactaaaaatacaaaattagctgggcatggtggtgcatgcctgtaatcccagttacttgggaggctgaggcaggagaatcacctgaacccaggagatggaagttgcaagtgagccgagattgtgccactgcactccagcctgggcaacaagagcgaaactc

SEQ ID NO: 3109 - protein, 149 aa, Homo sapiens
MSVLAAAHLTSSSFSADEEFAMGTLKQWLPKEEDEGKVEMVSGIEVDEEQLEPRSDDDDTNFEESEDELRDEVVEYLEKLATFKGEEKTEEASSTSKDSRKSREREGISMQKSEELREGLENISTTSNDHICITDEDQGTSTTSQNIQV

SEQ ID NO: 3110 - DNA, 2332 bp, Homo sapiens
ttcacttaacctgcagacagaactcagttagtcggggacaatttccctcaatgttaacagcactgttccaccgcaacgtggaacaacagctttaaaacgtgctcttcgtaggcccggctactccaagaacagtgcctcccgccagacccaggcggcttccttcacccgcaacccgagagacgacccgccgggcccgccccgcggaagccgccggttgccaggccaaggagtggactagggtcgccggggaagcggtttgggagagcccatggtgactgcgtgagtggagcccagctgtgtggatgccccagcatggatgactacatggtcctgagaatgattggggagggctccttcggcagagctcttttggttcagcatgaaagcagtaatcagatgtttgccatgaaagaaataaggcttcccaagtctttctctaatacacagaattctaggaaggaggctgttcttttagccaaaatgaaacaccctaatattgttgccttcaaagaatcatttgaagctgaaggacacttgtatattgtgatggaatactgtgatggaggggatctaatgcaaaagattaaacagcagaaaggaaagttatttcctgaagacatgatacttaattggtttacccaaatgtgccttggagtaaatcacattcacaagaaacgtgtgctacacagagatatcaagtccaagaatatcttcctcactcagaatggaaaagtgaaattgggagactttggatctgcccgtcttctctccaatccgatggcatttgcttgtacctatgtgggaactccttattatgtgcctccagaaatttgggaaaacctgccttataacaataaaagtgacatctggtccttgggttgcatcctgtatgaactctgtacccttaagcatccatttcaggcaaatagttggaaaaatcttatcctcaaagtatgtcaagggtgcatcagtccactgccgtctcattactcctatgaacttcagttcctagtcaagcagatgtttaaaaggaatccctcacatcgcccctcggctacaacgcttctctctcgaggcatcgtagctcggcttgtccagaagtgcttaccccccgagatcatcatggaatatggtgaggaagtattagaagaaataaaaaattcgaagcataacacaccaagaaaaaaaacaaaccccagcagaatcaggatagctttgggaaatgaagcaagcacagtgcaagaggaagaacaagatagaaagggtagccatactgatttggaaagcattaatgaaaatttagttgaaagtgcattgagaagagtaaacagagaagaaaaaggtaataagtcagtccatctgaggaaagccagttcaccaaatcttcatagacgacagtgggagaaaaatgtacccaatacagctcttacagctttggaaaatgcatccatactcacctccagtttaacagcagaggacgatagaggtggttctgtaataaagtacagcaaaaatactactcgtaagcagtggctcaaagagacccctgacactttgttgaacatccttaagaatgctgatctcagcttggcttttcaaacatacacaatatatagaccaggttcagaagggttcttgaaaggccccctgtctgaagaaacagaagcatcggacagtgttgatggaggtcacgattctgtcattttggatccagagcgacttgagcctgggctagatgaggaggacacggactttgaggaggaagatgacaaccccgactgggtgtcagagctgaagaagcgagctggatggcaaggcctgtgcgacagataatgcctgaggaaatgttcctgagtcacgctgaggagaggcttcactcaggagttcatgctgagatgatcatgagttcatgcgacgtatattttcctttggaaacagaatgaagcagaggaaactcttaatacttaaaatcgttcttgattagtatcgtgagtttgaaaagtctagaactcctgtaagtttttgaactcaagggagaaggtatagtggaatgagtgtgagcatcgggctttgcagtcccatagaacagaaatgggatgctagcgtgccactacctacttgtgtgattgtgggaaattacttaacctcttcaagccccaatttcctcaaccataaaatgaagataataatgcctacctcagagggatgctgaccacagacctttatagcagcccgtatgatattattcacattatgatatgtgtttattattatgtgactctttttacatttcctaaaggtttgagaattaaatatatttaattatgattta

SEQ ID NO: 3111 - protein, 506 aa, Homo sapiens
MDDYMVLRMIGEGSFGRALLVQHESSNQMFAMKEIRLPKSFSNTQNSRKEAVLLAKMKHPNIVAFKESFEAEGHLYIVMEYCDGGDLMQKIKQQKGKLFPEDMILNWFTQMCLGVNHIHKKRVLHRDIKSKNIFLTQNGKVKLGDFGSARLLSNPMAFACTYVGTPYYVPPEIWENLPYNNKSDIWSLGCILYELCTLKHPFQANSWKNLILKVCQGCISPLPSHYSYELQFLVKQMFKRNPSHRPSATTLLSRGIVARLVQKCLPPEIIMEYGEEVLEEIKNSKHNTPRKKTNPSRIRIALGNEASTVQEEEQDRKGSHTDLESINENLVESALRRVNREEKGNKSVHLRKASSPNLHRRQWEKNVPNTALTALENASILTSSLTAEDDRGGSVIKYSKNTTRKQWLKETPDTLLNILKNADLSLAFQTYTIYRPGSEGFLKGPLSEETEASDSVDGGHDSVILDPERLEPGLDEEDTDFEEEDDNPDWVSELKKRAGWQGLCDR

SEQ ID NO: 3112 - DNA, 2255 bp, Homo sapiens
cgccgccttggggtctgggcgcgcggtgccgtgggggtcagcagggcggagcggcttttccaggagaaagggccctcacgggtgagcggggcgactgggctcccccgcggtgcagttgccccgcgggcgccggccccggctcaacggattcttctcgctcgctgcccggaaagaaccatttgggagagcccatggtgactgcgtgagtggagcccagctgtgtggatgccccagcatggatgactacatggtcctgagaatgattggggagggctccttcggcagagctcttttggttcagcatgaaagcagtaatcagatgtttgccatgaaagaaataaggcttcccaagtctttctctaatacacagaattctaggaaggaggctgttcttttagccaaaatgaaacaccctaatattgttgccttcaaagaatcatttgaagctgaaggacacttgtatattgtgatggaatactgtgatggaggggatctaatgcaaaagattaaacagcagaaaggaaagttatttcctgaagacatgatacttaattggtttacccaaatgtgccttggagtaaatcacattcacaagaaacgtgtgctacacagagatatcaagtccaagaatatcttcctcactcagaatggaaaagtgaaattgggagactttggatctgcccgtcttctctccaatccgatggcatttgcttgtacctatgtgggaactccttattatgtgcctccagaaatttgggaaaacctgccttataacaataaaagtgacatctggtccttgggttgcatcctgtatgaactctgtacccttaagcatccatttcaggcaaatagttggaaaaatcttatcctcaaagtatgtcaagggtgcatcagtccactgccgtctcattactcctatgaacttcagttcctagtcaagcagatgtttaaaaggaatccctcacatcgcccctcggctacaacgcttctctctcgaggcatcgtagctcggcttgtccagaagtgcttaccccccgagatcatcatggaatatggtgaggaagtattagaagaaataaaaaattcgaagcataacacaccaagaaaaaaaacaaaccccagcagaatcaggatagctttgggaaatgaagcaagcacagtgcaagaggaagaacaagatagaaagggtagccatactgatttggaaagcattaatgaaaatttagttgaaagtgcattgagaagagtaaacagagaagaaaaaggtaataagtcagtccatctgaggaaagccagttcaccaaatcttcatagacgacagtgggagaaaaatgtacccaatacagctcttacagctttggaaaatgcatccatactcacctccagtttaacagcagaggacgatagaggtggttctgtaataaagtacagcaaaaatactactcgtaagcagtggctcaaagagacccctgacactttgttgaacatccttaagaatgctgatctcagcttggcttttcaaacatacacaatatatagaccaggttcagaagggttcttgaaaggccccctgtctgaagaaacagaagcatcggacagtgttgatggaggtcacgattctgtcattttggatccagagcgacttgagcctgggctagatgaggaggacacggactttgaggaggaagatgacaaccccgactgggtgtcagagctgaagaagcgagctggatggcaaggcctgtgcgacagataatgcctgaggaaatgttcctgagtcacgctgaggagaggcttcactcaggagttcatgctgagatgatcatgagttcatgcgacgtatattttcctttggaaacagaatgaagcagaggaaactcttaatacttaaaatcgttcttgattagtatcgtgagtttgaaaagtctagaactcctgtaagtttttgaactcaagggagaaggtatagtggaatgagtgtgagcatcgggctttgcagtcccatagaacagaaatgggatgctagcgtgccactacctacttgtgtgattgtgggaaattacttaacctcttcaagccccaatttcctcaaccataaaatgaagataataatgcctacctcagagggatgctgaccacagacctttatagcagcccgtatgatattattcacattatgatatgtgtttattattatgtgactctttttacatttcctaaaggtttgagaattaaatatatttaattatgattta

SEQ ID NO: 3113 - protein, 506 aa, Homo sapiens; identical to SEQ ID NO: 3111

SEQ ID NO: 3114 - DNA, 3054 bp, Homo sapiens
gccccgcggggctgtgggagccgaacgccgcggggtcagggcgtgcagtctgggacgcgggatgcttggcgctctacctcgccgcccctgagccttcccgtccgcctcgccacgcgcccggacggcctggggttgctgcccgtcagtctcgaaaggtgtttttggggaaaaaaatcacaatctggacgtgagaaaggacatgaggagactaaagacctgggattttgtcaatcagaatgaaaccaatgttgaaagacttttcaaatctattgttggtggtactctgtgactatgttcttggagaagctgaatatcttctcttgagagagccaggccatgtagcactaagcaacgacacagtgtatgtggatttccagtattttgatggtgctaatgggacactgaggaatgtatctgtcctgctgttggaggccaacaccaatcagactgtaactaccaagtacctcctgaccaaccagtcccagggaacactaaagtttgagtgcttctatttcaaggaggctggtgactactggttcacaatgactccagaagcaacagacaacagcactccattcccctggtgggagaaaagtgcctttctgaaggtggaatggcctgtctttcacgttgacttgaataggagtgccaaggcagcagaaggcaccttccaagtgggcctatttaccagtcaaccactgtgcccgtttcctgtggacaagcccaacatcgtagtggatgtcatcttcaccaacagtcttcctgaggcaagaagaaattcaagacagccgctggaaataagaaccagcaaaaggacagaacttgctcaaggtcagtgggttgagtttggctgtgcacccttggggccagaagcctatgtcaccgtggtgctgaagctgcttgggcgagactcagtcattacctccacaggacccattgacctggcccagaaatttggatacaaactggtgatggtgccagaactcacatgtgagtccggggtagaggtgacagtgctgcctccaccatgcaccttcgtccaaggagtggtcactgtcttcaaggaggcccccagataccctgggaagaggaccattcacttggctgaaaacagcctgcccctgggagagaggaggacaatttttaactgtactttgtttgacatggggaagaataagtactgctttgactttggcatttcaagcagaagccatttttctgcaaaggaggagtgcatgctaattcagagaaatacagaaacttggggactgtggcagccatggagccagtgtagtgccacatgtggggatggtgtcagagagcgtcgccgagtgtgtctcacttccttcccctccagtcctgtctgccctggaatgtccttggaggcctccctgtgttccctggaggagtgtgctgctttccagccatccagcccatctcctcttcagccccagggtccagtgaagtccaacaacatcgtgactgtcactggtatatccttgtgcttgttcatcatcattgccactgtgctcatcacgctgtggaggaggttcggccggccagccaagtgcagcacacctgctcgacacaactccatccactcccccagcttccggaagaactcggacgaggagaatatctgcgagctgagcgagcagcgcgggagcttctcggatgggggagacgggcccacggggagtccaggggacacaggcatccctctgacctacaggcggagcgggccggtacctcccgaggatgatgcctctggcagcgagagcttccagtccaacgcccagaagataatcccacctctgttcagctaccgccttgcccagcagcagttaaaggagatgaaaaagaaaggtctgacggaaactaccaaagtgtatcacgtgtctcagagtcccctgacagacactgccattgatgcggcccccagcgctcccttagatttggaaagcccggaagaagctgcagcaaacaagttccggatcaaatccccatttccggagcagcccgcggtcagtgccggggaaaggcctccctccaggctggatctaaatgtgactcaggccagttgtgccataagccccagccagactctgatccgcaagtcacaggcaaggcacgtgggcagcagagggggcccgtccgaaaggagccatgccaggaacgcccatttcaggaggacagcgagtttccatgaagccaggcaggcccggccgttccgagagaggagcatgtccactctgactccacggcaggcccctgcctacagctctaggacgcggacctgcgagcaggcagaggacagatttaggcctcagagtcgaggtgcccacctgtttcctgaaaaactggagcatttccaagaggcaagtggaacccgtggtccattaaaccctctccctaaatcctacactttggggcagcccttgaggaaaccagaccttggggatcaccaggcaggattagtggccggaattgagagaacagagccccacagagctcgtcggggaccgtcccccagtcacaagagtgtctcaaggaagcagtcttctcccatatcccccaaagataactaccagagggtcagttctctgagcccttctcagtgtagaaaagacaagtgtcaaagcttccccactcaccctgagtttgccttctatgacaatacgtcgtttggcctcactgaggctgagcagaggatgctggacctcccaggatattttgggtcaaatgaagaggatgaaaccacaagtacacttagcgtggagaagctggtgatctagactgagaatcagcctgagctttacacagctggggtctgctactcgcgttttgtagacttttgtgtaactatttgtaccgtaggacagaatgtgaggaggaagtaacacacagaggaggatgtgtgtgtatgcatgtgtttgaattcacaaggaagaaattatttatcttgagctttttcctttgttattcaatttctattgatttattagtaataacaatgataataaaatgtaaatgagcaaaaaaaaaaaaaaaaaa

SEQ ID NO: 3115 - protein, 852 aa, Homo sapiens
MKPMLKDFSNLLLVVLCDYVLGEAEYLLLREPGHVALSNDTVYVDFQYFDGANGTLRNVSVLLLEANTNQTVTTKYLLTNQSQGTLKFECFYFKEAGDYWFTMTPEATDNSTPFPWWEKSAFLKVEWPVFHVDLNRSAKAAEGTFQVGLFTSQPLCPFPVDKPNIVVDVIFTNSLPEARRNSRQPLEIRTSKRTELAQGQWVEFGCAPLGPEAYVTVVLKLLGRDSVITSTGPIDLAQKFGYKLVMVPELTCESGVEVTVLPPPCTFVQGVVTVFKEAPRYPGKRTIHLAENSLPLGERRTIFNCTLFDMGKNKYCFDFGISSRSHFSAKEECMLIQRNTETWGLWQPWSQCSATCGDGVRERRRVCLTSFPSSPVCPGMSLEASLCSLEECAAFQPSSPSPLQPQGPVKSNNIVTVTGISLCLFIIIATVLITLWRRFGRPAKCSTPARHNSIHSPSFRKNSDEENICELSEQRGSFSDGGDGPTGSPGDTGIPLTYRRSGPVPPEDDASGSESFQSNAQKIIPPLFSYRLAQQQLKEMKKKGLTETTKVYHVSQSPLTDTAIDAAPSAPLDLESPEEAAANKFRIKSPFPEQPAVSAGERPPSRLDLNVTQASCAISPSQTLIRKSQARHVGSRGGPSERSHARNAHFRRTASFHEARQARPFRERSMSTLTPRQAPAYSSRTRTCEQAEDRFRPQSRGAHLFPEKLEHFQEASGTRGPLNPLPKSYTLGQPLRKPDLGDHQAGLVAGIERTEPHRARRGPSPSHKSVSRKQSSPISPKDNYQRVSSLSPSQCRKDKCQSFPTHPEFAFYDNTSFGLTEAEQRMLDLPGYFGSNEEDETTSTLSVEKLVI

SEQ ID NO: 3116 - DNA, 2896 bp, Homo sapiens
gccccgcggggctgtgggagccgaacgccgcggggtcagggcgtgcagtctgggacgcgggatgcttggcgctctacctcgccgcccctgagccttcccgtccgcctcgccacgcgcccggacggcctggggttgctgcccgtcagtctcgaggtgtttttggggaaaaaaatcacaatctggacgtgagaaaggacatgaggagactaaagacctgggattttgtcaatcagaatgaaaccaatgttgaaagacttttcaaatctattgttggtggtactctgtgactatgttcttggagaagctgaatatcttctcttgagagagccaggccatgtagcactaagcaacgacacagtgtatgtggatttccagtattttgatggtgctaatgggacactgaggaatgtatctgtcctgctgttggaggccaacaccaatcagactgtaactaccaagtacctcctgaccaaccagtcccagggaacactaaagtttgagtgcttctatttcaaggaggctggtgactactggttcacaatgactccagaagcaacagacaacagcactccattcccctggtgggagaaaagtgcctttctgaaggtggaatggcctgtctttcacgttgacttgaataggagtgccaaggcagcagaaggcaccttccaagtgggcctatttaccagtcaaccactgtgcccgtttcctgtggacaagcccaacatcgtagtggatgtcatcttcaccaacagtcttcctgaggcaagaagaaattcaagacagccgctggaaataagaaccagcaaaaggacagaacttgctcaaggtcagtgggttgagtttggctgtgcacccttggggccagaagcctatgtcaccgtggtgctgaagctgcttgggcgagactcagtcattacctccacaggacccattgacctggcccagaaatttggatacaaactggtgatggtgccagaactcacatgtgagtccggggtagaggtgacagtgctgcctccaccatgcaccttcgtccaaggagtggtcactgtcttcaaggaggcccccagataccctgggaagaggaccattcacttggctgaaaacagcctgcccctgggagagaggaggacaatttttaactgtactttgtttgacatggggaagaataagtactgctttgactttggcatttcaagcagaagccatttttctgcaaaggaggagtgcatgctaattcagagaaatacagctttccagccatccagcccatctcctcttcagccccagggtccagtgaagtccaacaacatcgtgactgtcactggtatatccttgtgcttgttcatcatcattgccactgtgctcatcacgctgtggaggaggttcggccggccagccaagtgcagcacacctgctcgacacaactccatccactcccccagcttccggaagaactcggacgaggagaatatctgcgagctgagcgagcagcgcgggagcttctcggatgggggagacgggcccacggggagtccaggggacacaggcatccctctgacctacaggcggagcgggccggtacctcccgaggatgatgcctctggcagcgagagcttccagtccaacgcccagaagataatcccacctctgttcagctaccgccttgcccagcagcagttaaaggagatgaaaaagaaaggtctgacggaaactaccaaagtgtatcacgtgtctcagagtcccctgacagacactgccattgatgcggcccccagcgctcccttagatttggaaagcccggaagaagctgcagcaaacaagttccggatcaaatccccatttccggagcagcccgcggtcagtgccggggaaaggcctccctccaggctggatctaaatgtgactcaggccagttgtgccataagccccagccagactctgatccgcaagtcacaggcaaggcacgtgggcagcagagggggcccgtccgaaaggagccatgccaggaacgcccatttcaggaggacagcgagtttccatgaagccaggcaggcccggccgttccgagagaggagcatgtccactctgactccacggcaggcccctgcctacagctctaggacgcggacctgcgagcaggcagaggacagatttaggcctcagagtcgaggtgcccacctgtttcctgaaaaactggagcatttccaagaggcaagtggaacccgtggtccattaaaccctctccctaaatcctacactttggggcagcccttgaggaaaccagaccttggggatcaccaggcaggattagtggccggaattgagagaacagagccccacagagctcgtcggggaccgtcccccagtcacaagagtgtctcaaggaagcagtcttctcccatatcccccaaagataactaccagagggtcagttctctgagcccttctcagtgtagaaaagacaagtgtcaaagcttccccactcaccctgagtttgccttctatgacaatacgtcgtttggcctcactgaggctgagcagaggatgctggacctcccaggatattttgggtcaaatgaagaggatgaaaccacaagtacacttagcgtggagaagctggtgatctagactgagaatcagcctgagctttacacagctggggtctgctactcgcgttttgtagacttttgtgtaactatttgtaccgtaggacagaatgtgaggaggaagtaacacacagaggaggatgtgtgtgtatgcatgtgtttgaattcacaaggaagaaattatttatcttgagctttttcctttgttattcaatttctattgatttattagtaataacaatgataataaaatgtaaatgagcaaaaaaaaaaaaaaaaaaaaa

SEQ ID NO: 3117 - protein, 799 aa, Homo sapiens
MKPMLKDFSNLLLVVLCDYVLGEAEYLLLREPGHVALSNDTVYVDFQYFDGANGTLRNVSVLLLEANTNQTVTTKYLLTNQSQGTLKFECFYFKEAGDYWFTMTPEATDNSTPFPWWEKSAFLKVEWPVFHVDLNRSAKAAEGTFQVGLFTSQPLCPFPVDKPNIVVDVIFTNSLPEARRNSRQPLEIRTSKRTELAQGQWVEFGCAPLGPEAYVTVVLKLLGRDSVITSTGPIDLAQKFGYKLVMVPELTCESGVEVTVLPPPCTFVQGVVTVFKEAPRYPGKRTIHLAENSLPLGERRTIFNCTLFDMGKNKYCFDFGISSRSHFSAKEECMLIQRNTAFQPSSPSPLQPQGPVKSNNIVTVTGISLCLFIIIATVLITLWRRFGRPAKCSTPARHNSIHSPSFRKNSDEENICELSEQRGSFSDGGDGPTGSPGDTGIPLTYRRSGPVPPEDDASGSESFQSNAQKIIPPLFSYRLAQQQLKEMKKKGLTETTKVYHVSQSPLTDTAIDAAPSAPLDLESPEEAAANKFRIKSPFPEQPAVSAGERPPSRLDLNVTQASCAISPSQTLIRKSQARHVGSRGGPSERSHARNAHFRRTASFHEARQARPFRERSMSTLTPRQAPAYSSRTRTCEQAEDRFRPQSRGAHLFPEKLEHFQEASGTRGPLNPLPKSYTLGQPLRKPDLGDHQAGLVAGIERTEPHRARRGPSPSHKSVSRKQSSPISPKDNYQRVSSLSPSQCRKDKCQSFPTHPEFAFYDNTSFGLTEAEQRMLDLPGYFGSNEEDETTSTLSVEKLVI

SEQ ID NO: 3118 - DNA, 4427 bp, Homo sapiens
ggcctcggagggccggggctgggtggcagcggccatggaccgcttcgtttggaccagcggcctcctggagatcaacgagaccctggtgatccagcagcgcggggtgcgaatctacgatggcgaggagaagataaaatttgatgctgggactctccttcttagtacacaccgactgatttggagagatcagaaaaatcatgagtgttgcatggccattctcctttcccaaattgtgttcattgaagaacaggcggctggaattgggaagagtgccaaaatagtggttcatcttcacccagctcctcctaacaaagaacctggcccattccagagtagtaagaactcctacatcaaactctccttcaaagaacatggccagattgagttttacaggcgtttatcagaggaaatgacacaaagaagatgggagaatatgccagtttcccagtcattacaaacaaatagaggaccccagccaggaagaataagggctgtaggaattgtaggtattgaaaggaaactggaagaaaaaagaaaagaaactgacaaaaacatttctgaggcctttgaagacctcagcaaactaatgatcaaggctaaggaaatggtggaattatcaaaatcaattgctaataaaattaaagacaaacaaggtgacatcacagaagatgagaccatcaggtttaaatcctacttgctgagcatgggaatagctaacccagttaccagagaaacctacggctcaggcacacagtaccacatgcagctggccaaacaactggctggaatattgcaggtgcctttagaggaacgagggggaataatgtcactcacggaggtgtactgcttagtaaaccgagctcgaggaatggaattgctctcaccagaagatttagtgaatgcgtgcaagatgctggaagcactgaaattacctctcaggctccgtgtgtttgacagtggcgtcatggtaattgagcttcagtctcacaaggaagaggaaatggtggcctcggccctggagacagtttcagaaaagggatccctaacatcagaagagtttgctaagcttgtgggaatgtctgtcctcctagccaaagaaaggttgctgcttgcagagaagatgggccatctttgccgtgatgactcagtggaaggcctgcgtttttacccaaatttatttatgacacagagctaagggttttgtatttaaaatcctttttgtccatatgcttgcgtcatgtagaggttgtatgacattgagctaagagataaaccccgatcaattgagaatttattggaacttcacagtgcaatgtaaatctcttttaatttctcactaaatatggtccaggaaatttatttagtatacgcataggaaaattcagaaaagtgaatgccaatatgaatttaaaatcatgctatagtgcagaaccctcagagtttaacttggaatatagtggattttaacttgatcctcaaatctaatcattttataaagaagggaatttagttttgcagagaataaaaagagaagttgcatgttcagacaggttagattattattttggtgtaactgaaattcactgattgcacatgacaatgttgggacaaaatatactgcagcatgctatatgaggctcctccccagggcttttagaagcagtcatagacatgtcttcaacataccaaataaaatacctttaaaaatgaaataattttatttgacacatatatttatatatattctatctagtttctctttgtttttttaagtgatgatttcatgactggcatttaaagaatgcaactgtgtcattttgtttccaaatgctgtggattttgaaactgaactagagagctgtatagacatgcccagagttatgattacaaatttaggaggtagacggctcaggaattccctgggattgttgtgctggtggaatggcagagggaacttcacaggaaccttagtgttcttttacctcaaagccacagacaggaaatagaaagtggaaaagtaatatctccttttcttttccataaggagtttcaacactgaactttaaaaagtctatcatattccagcaatattttttctttgtcctttatgttgtaagttgtgtggaaaaactacttcggtaagaaatgttactgagataacaacaactggctaatactgcatgtagattgcttaggttttaaagtgactgcctgacttcacatgttattgctacagcctccagtatgttcgcattatctcaaactcagggaccccacaggacaggagacaccctttctgaaactgagttggaagtgaaagggtggtgatggttttggccaagcctgcgggagggaaagtattgtattgggagcacccttgggaccaggaagagggatgcccaggttcacactctgggacccctaagacattgtcagtgggtaaggtggagggccactgccagaggctgctgcagtgccctctgggaagtgccagggaccctcagctgcagacccaggggatcccaatcccttatctctgcctgaaaagtggctattgctgcttcgtatcctccagtgtcacaggaatgctgtgcctgagacatcccactttagtttttgttttccaaacctgtcactgactcttcattgtggtgacagatcctctggttcccccattgctcagcctcaggtttattttgagggtaactcagtgtctgactgcccaagtcttttaggggttagttggaccattgtgtaagcttgtttgtatgtctcacctctttctggttggtacttactgtctcacactgctctggcaaacttgtacacacacacacactctctctctctctcacctggctaaggcttttaaaattatgaagataaataatctgtttcaccagctggagtgagttgcaaggaagattgctggagctactcaatctagcgctaatggtttggattcattactgcaaacctacataatttaacatatttgtttactttagtgtgacaactgatgaaaaaaaatggagcaatctgaattgtataaaataacttaagaaggaagaaaagtgatatataaatatattttgcaaatgtcacattaatttaaaaatgagtatgattgattttatttttaaagtgggcattcttcactgtttcgagacctttgtatgtatttgtgtatttttatctttttttttcaggccattattataaggtgttattttggccctctaatgtagaagttatgtttaaatacaaccaatcaggccctaagtgcaaaaaagttctgtcttggtgcttatcactggtataattattatttttttgttttcctaactttgctcttaggagcatgagcctctttgtagctttatggtaatgcaatatttctggtcatttactgtcaaaaaatttttttacattgtgttagtgaagactgtgttttcagggttaaatgattggtatcaatgtatatagagtaaaattattgcaaaatttaaaaatgatttttcttggcattctttttaaatactctgaaacatatatgcaaatgagaaacctttaatcatactaaagccagttatgttaagaatttttcctttggattttataattaagagttgcttataaatacttatgacattgagctcttactgttttagttgtcttaaaacaatgggacatgtcatgaactggtttctttttttaaaaaattcttgatgtgaattccactgttacctgaccatgtatattcagatgaatgtactctttcttgttccttgttaccagattaatctgagagaatgtggattcatcctgtcatctttctcatactcaaatacttaaaatggttcttttgcccaaaagtctcagagtcttcattttggtacagtggagtcacaacttgtaaggtggttaggttttaaagaccgtgcctaaggacaaaattgagcatgctcagaatggtccttgaaaatctcctaaattaccaataaatttctctttgtagtcttaaagtttaaatccctgtggagtgatatgtaggtatgaatatattatgcttatattaagtacaaaaatacaaactgcatatcaagagattcttatagcattaataatttccatgcatgtgtctttttccagtaggtatggttgaatttatgtaaatttattgctaatcccatcccttacgatctagagtataagctgcgcaagggcagaagtttttatctggtttgttcatggatgtattctaagagctgagaacagggcctggacacaataagcattcaataaatatttactgaatgaatgaactcctacctatattcctatttataatttggctccactttatcctactttagctcccattcaattcaataaaaaaaacatttttttgaacacatagcaaaaaa

SEQ ID NO: 3119 - protein, 386 aa, Homo sapiens
MDRFVWTSGLLEINETLVIQQRGVRIYDGEEKIKFDAGTLLLSTHRLIWRDQKNHECCMAILLSQIVFIEEQAAGIGKSAKIVVHLHPAPPNKEPGPFQSSKNSYIKLSFKEHGQIEFYRRLSEEMTQRRWENMPVSQSLQTNRGPQPGRIRAVGIVGIERKLEEKRKETDKNISEAFEDLSKLMIKAKEMVELSKSIANKIKDKQGDITEDETIRFKSYLLSMGIANPVTRETYGSGTQYHMQLAKQLAGILQVPLEERGGIMSLTEVYCLVNRARGMELLSPEDLVNACKMLEALKLPLRLRVFDSGVMVIELQSHKEEEMVASALETVSEKGSLTSEEFAKLVGMSVLLAKERLLLAEKMGHLCRDDSVEGLRFYPNLFMTQS

SEQ ID NO: 3120 - DNA, 3626 bp, Homo sapiens
gacggcttagccgcggtgcagactgcggcggcggtggtctgaggaagttctatcttggcgctaaagcggagacgcatcccccgacccgaggctacgatgagcacaccggccgtgccccaggacctgcagctgcccccgagtcagagggcgcagtccgcattcaaagagcaaagaagacaaaaactcaaggaacatctgttgagaagaaaaacgctttttgcatacaagcaggaaaatgagatgttatccagtagagatcagagagttgtgacatctgaggaccaagttcaagaagggactaaagtgctgaaacttaaaacaaaaatggctgataaagaaaacatgaagagacctgcagagagcaaaaataatacagtggtggggaaacattgtattcctttaaaaccttcaaatgaactaaccaattcaactgtagtaattgacacacataaacctaaggatagtaatcaaactccgcatttgttactaactgaagatgatccccaaagtcaacatatgacattaagccaggcatttcaccttaaaaacaatagtaaaaagaaacaaatgactacagaaaaacaaaagcaagatgctaacatgcccaagaaacctgtgcttggatcttatcgtggccagattgttcagtctaagattaattcatttagaaaacctctacaagtcaaagatgagagttctgcagcaacaaagaaactttcagccactatacctaaagccacaaaacctcagcctgtaaacaccagcagtgtaacagtgaaaagtaatagatcctccaatatgactgccactactaaatttgtgagcactacatctcagaacacacaacttgtgcgacctcctattagaagtcatcacagtaatacccgggacactgtgaaacaaggcatcagtagaacctctgccaatgttacaatccggaaagggcctcatgaaaaagaactattacaatcaaaaacagctttatctagtgtcaaaaccagttcttctcaaggtataataagaaataagactctatcaagatccatagcatctgaagttgtagccaggcctgcttcattgtctaatgataaactgatggaaaagtcagagcccgttgaccagcgaagacatactgcaggaaaagcaattgttgatagtagatcagctcagcccaaagaaacctcggaagagagaaaagctcgtctgagtgagtggaaagctggcaaaggaagagtgctaaaaaggccccctaattcagtagttactcagcatgagcctgcaggacaaaatgaaaaaccagttgggtctttttggactaccatggcagaagaagatgaacaaagattatttactgaaaaagtaaacaacacattttctgaatgcctgaacttgattaatgagggatgtccaaaagaagatatactggtcacactgaatgacctgattaaaaatattccagatgccaaaaagcttgttaagtattggatatgtcttgcacttattgaaccaatcacaagtcctattgaaaatattattgcaatctatgagaaagccattctggcaggggctcagcctattgaagagatgcgacacacgattgtagatattctaacaatgaagagtcaagaaaaagctaatttaggagaaaatatggagaagtcttgtgcaagcaaggaagaagtcagagaagtcagtattgaagatacaggtgttgatgtagatccagaaaaactggaaatggagagtaaacttcatagaaatttgctacttcaagattgtgaaaaagagcaagacaacaaaacaaaagatccaacccatgatgctaaaacccccaatacagaaacgaggacaagttgcttaattaaatataatgtgtctactacgccatacttgcaaagtgtgaaaaaaaaggtgcagtttgatggaacaaattccgcatttaaagagctgaagtttttaacaccagtgagacgttctcgacgtcttcaagagaaaacttctaaattgccagatatgttaaaagatcattatccttgtgtgtcttcattggaacagctaacggagttgggaagagaaactgatgcttttgtatgccgccctaatgcagcactgtgccgggtgtactatgaggctgatacaacataagggaaataaagctctgttagggaatggggtttttattatttgtggggtgttttgttttgagtagctttatattgctcttaggtctggagttggccatgtacctatgtatcctaagcattcacggcagtgagctcctttactaacattcatgttatggcaagagttgtcctctacattggaaagctaatcctaccttgtcagtttcaaccaactgagttttttctttaagaaaggtaaattttgtcagctagtttactatgttccttgaatataaacaggttataatactaccctgttcactttactaaatataagtacagtaatgatgcataattagaaaatgaggtattctaggtaaaatgtatgtttgccttgacatgtttttaaaagttatgatgtacctccctgcctttaaacagaatacttttttcttttttttggcctttctcagattagtcaaaaattctatagaatgactcacttcgaatactaagacacaggaggtttagcctgctttcttaccaaattcatgttacccagacttgtgttctcttgcgtcccttggactgcctgttgattgatggaaagtgtctgcactgacacttttcgtcagtagtctgtagtttcgtggcctcttttgattataactggggtcaccaagaaggtttacttaattaaataccgcatttctaagagaagatactttgtgtaagaaaagatgccacatttagtggtttaacttttgtaacttcacttgatagtttttaagcaattagaatggagttagggaaagaacatatcatactgaacaaatgtcattctagtttagatagcatttctaagataactgatactaatacttgttttcttccctataacataaaaaacttcactgttaagtcatgtcccttgaaacatgatagttacatacacagttttctctccacacataaataacaccactaaagttgttttgtaaggttccaaactaatatggcatatatcaactctacagtttcaaataaatgactttttaattgtaaaagattagttgaaaaactgtatgaatgtgaagatcacatgcttagtcatttctatgttcattccactttgtatatcttttctatttattgacttctcatgttctagagagtaggacttttattccgtgtacctgatatatatacaattaaaatatctgtataattatgttttaatgaggtttatttcaacagatattttatgaaatgcagtttaaccacagtgaatgaattttagctttgcttttgaaatacattgtaagatttgacttgaggtttttgacacttaagtacatgcttaatgatatattttcaaaagtcatcagtctacttacataaactttacctaatttttttcactttaacaaaaacataactatgcccttgttttttcatactttgacccaaaatatgccattttgaaataaaatttaagctttg

SEQ ID NO: 3121 - protein, 682 aa, Homo sapiens
MSTPAVPQDLQLPPSQRAQSAFKEQRRQKLKEHLLRRKTLFAYKQENEMLSSRDQRVVTSEDQVQEGTKVLKLKTKMADKENMKRPAESKNNTVVGKHCIPLKPSNELTNSTVVIDTHKPKDSNQTPHLLLTEDDPQSQHMTLSQAFHLKNNSKKKQMTTEKQKQDANMPKKPVLGSYRGQIVQSKINSFRKPLQVKDESSAATKKLSATIPKATKPQPVNTSSVTVKSNRSSNMTATTKFVSTTSQNTQLVRPPIRSHHSNTRDTVKQGISRTSANVTIRKGPHEKELLQSKTALSSVKTSSSQGIIRNKTLSRSIASEVVARPASLSNDKLMEKSEPVDQRRHTAGKAIVDSRSAQPKETSEERKARLSEWKAGKGRVLKRPPNSVVTQHEPAGQNEKPVGSFWTTMAEEDEQRLFTEKVNNTFSECLNLINEGCPKEDILVTLNDLIKNIPDAKKLVKYWICLALIEPITSPIENIIAIYEKAILAGAQPIEEMRHTIVDILTMKSQEKANLGENMEKSCASKEEVREVSIEDTGVDVDPEKLEMESKLHRNLLLQDCEKEQDNKTKDPTHDAKTPNTETRTSCLIKYNVSTTPYLQSVKKKVQFDGTNSAFKELKFLTPVRRSRRLQEKTSKLPDMLKDHYPCVSSLEQLTELGRETDAFVCRPNAALCRVYYEADTT

SEQ ID NO: 3122 - DNA, 2627 bp, Homo sapiens
gacgggagctctgctcaggcttcaacatggcgggccgtttcggttgacttcgcctgtggaaaccgaattccccctccatggtttccccaggatatgagttgggggcctcacctcgcctataagggtcaggcgagctttctggatgctcgagggacctttcggcctgcgcagccggagcagcttgtcccaatgccctgccatttctgtgagggcccacgaggcctggaggagcctcggagcccccgcaggccctcgcgtcactgcctcaagagggtgctcggagccctgctcgggagctggtccccaacgaggtgtggaaccccttcttgctggaactccacggagagactgtcctgctaggacctgcttccagaagagttgatcccagccgtgaaagtgcatgatgccttcagcgaagcaggcaggaaaggctcaagtgatcctcctgtatcaccctgggtatcaaggccattcagtggaaaagaacagtctcttcagcaagtggatgaagttagatctcttcctcacatcatacagaaaaatcaacctcaaatggaagaaatatctaaatgaagccgaacacttgataaaaagttcatcagcgtaaataagaagaatcccctccattacatacaaaagaaaaaataactggagagatcatctctgctctaagcgtgtttttaagtctctgcagtcttggaccaagctcgttttattccctactctacgagaatctcaagagcaccaggattctgtttggagttgccatggacacagagttcttaatccagtactggcttattctcaatacgagagaaagttgtactgaagacacgagacctgagacttgtgtcattttagcggctgaaccgaccccaacttcttctgagcggcagtggcgccagaagcagtctggctttcagtccccatcctgttgacctggtggaagtcatcattgatagagacaccgatgacattccccacacaagtgaactgacaggaggaaccaaggaagcatgtatctacgaaagtgtgtcagaacgactttccaggtttgaagattatgaaaatgctgaatatgtcgcttcatatgacagcaagattaagaaaattgttcattcaattgtgtcatcctttgcagttggaatatttggagttttcctgatcttgttggatgtggctctgatctttgctgacctaattttcactgatagcaaagtttatattcctttggagtatcgttctatttctctagctattgctttattttttctcatggatgttcttcttcgagtatttgtagaagggagacagcattatttttctgatttacttaacattttagatactgccgttactgtgattattctgctggttgatgtcgtttacattttttttgacgttaagtttcttaaggatattcccagatggacacgtttatttcgacttctacgacttatcattctgataagagtttttcgtctggctcatctaaaaagacaacttggaaagctgataagaaggctggtttcaggaaacaaaaggtgatacgaaagggatggatttgacctagacctcacttatattacagaacgtattgtcgctatgtcatttccatcttcgggaggccagtctttctatcggaatccaattaaggtgaaagagcttatgatcctaagcacttccataatagggtcagtagaatcatgatcgatgatcataatgtccccactctacgggagatggtagcattctccaaggaagtgttggagtggatggctcaagattctgaaaacatcgtagtgattcactgtaaaggaggcaaaggaagaaccggaactatggtttgtgcctgcctgattgccagtgaaatatttttaactgcagaggaaagattgtactattttggagaacggcgaacagataaaaccaatggcactaaatatcagggagtagaaactccttctcagaatagatatgttggatattttgcacaagtgaaacatagctacaactggaatctccctccaagaaaaacactgtttataaaaagattagttatttattcgattcatggtgttggaacaggcgatggatatgatctaaaagtccaaatagtaatgaagaaaaagattgtcttttcctgtacttccttaaacagttgtcgggtatttcatgacactgaaacagacagggtaataattgatgtgttcaactgtccacctctgtatgatgatgtgaaagtgcaagcttcctcttcggattttcctaaatactatcacaactacccttttttcttctggtttaacacatctttaatacaaaataacaagctttatctacaaagaaatgaattggataatcttcataaacaaaaaactggaaaatttatcaaccagaatatgcagtagagacatattttgatgagaaatgacttaagttatgttgtaactggtagctgattaagtatagttccctgcaccccttctgggaaagaattatgttctttctaaccctgccacatagttatatgttctaaatcttccttgctggtacatctatattgatatatgtatacacatgttctttataaatctattaaatatatacagaaaaaaaaaaaaaaa

SEQ ID NO: 3123 - DNA, 2365 bp, Homo sapiens
agaccagaaacggaagagagcgcgggggatgtgtttggcgtggggcgcactgttcagttgctctcctggatggctttatgtctccgcggtgtttcctagagtctcggcgtttctacctcttcgcaccctttcctgccaccctttgtcccctggaagcccggagacatcagcggctgcaattttgctactcgctgctcggcgtggaactgtcaggacaaaaaataatatccaaagatattttggcactaacggcgctatctgtagcaagaaagttgagcagtgtgaactgttgagacttccaaggagacttcagacaaccaagacagtgtaaaggaaaacagagaaaaagacttgttagacattattaagggcacgaaagttgaattgagcacagtaaatgtacaaacaacaaagccacccaacagaagttcacttaaaagctacaactggcgggcctcaaagagctttaggacatgctccaaagaagagaaatgagcccctgagtcctgagttggtggcagctgcatctgctgctctgttttgacaagcaaacaagccagaactgctcaggcagctccgtagcatgaggaagagtcaggggcacagagagatggagagagacctagttagtttcaataacaaaatatcagatatgaaaattgccagatgtgctacagctagaattaatataaggccagagcatcagattcagtttgaccaaggctatgacaattatcctggcctggagaagactgctgatcttagaaacaggaaaaatatattcagggggaagagatgtaatagatttcacattatggcagttactaaagaagcacgtgaacagacacatcaccttcactttgggatatggaatttgataagcagttagccacagaatatgaacaaccccttgagaatgagattgaagaactgatccaggggacaaaagaggggaaactgagagttcccaattaataatgaagcagcttcatatctaagatctctggtggactttttctgcccgtggacgccgctgaagaagcatcgttaaagtctctcttcaccttgccgtcatgtctaagtcagcgtctccaaaagagcccgaacagctgaggaagctcttcattggagggttgagctttgaaacaactgatgagagcctgaggagccattttgagcaatggggaacgctcacagactgtgtggtaatgagagatccaaacaccaagcgctccaggggctttgggtttgtcacatatgccactgtggaggaggtggatgcagctatgaatacaacgccacacaaggtggatggaagagttgtggaaccaaagagagctgtctccagagaagattctcaaagaccaggtgcccacttaactgtgaaaaagatatttgttggtggcattaaagaagacactgaagaacatcacctaagagattattttgaacagtatggaaaaattgaagtaattgaaatcatgactgaccgaggcagtggcaagaaaaggggctttgcctttgtaacctttgacgaccatgactccgtggataagattgtcattcagaaataccatactgtgaagggccacaactgtgaagttagaaaagccctgccaaagcaagagatggctagtgcttcatccagccaaagaggtcgaaggggttctggaaactttggtggtggtcgtggagatggtttcggtgggaatgacaactttggtcgtggaggaaacttcagtggtcgtggtggctttggtggcagctgtggtggtggtggatatggtggcagtggggatggctataatggatttggtaatgatggaagcaattttggaggtggtggaagctacaatgattttggcaattacaacaatcagtcttcaaattttggacccatgaagggaggaaattttggaggcagaagctctggcccctatggcggtggaggccaatactttgcaaaaccacaaaaccaaggtggctatggcgtttccagcagcagcagtagctatggcagtggcagaagattttaattaggaaacaaagcttagcaggagaggagagccagagaagtgacagggaagctacaggttacaacagatttgtgaactcagccaagcacagtggtggcagggcctagctgctacaaagaagacatgttttagacaaatactcatgtgtatgggcaaaaaactcgaggactgtatttgtgactaattgtataacaggttattttagtttctgttctgtggaaagtgtaaagcattccaacaaagtgttttaatgtagatttttttttttgcacccatgctgttgattgctaaatgtaatagtctgattgtgacgctgaataaatgtctct

SEQ ID NO: 3124 - protein, 320 aa, Homo sapiens
MSKSASPKEPEQLRKLFIGGLSFETTDESLRSHFEQWGTLTDCVVMRDPNTKRSRGFGFVTYATVEEVDAAMNTTPHKVDGRVVEPKRAVSREDSQRPGAHLTVKKIFVGGIKEDTEEHHLRDYFEQYGKIEVIEIMTDRGSGKKRGFAFVTFDDHDSVDKIVIQKYHTVKGHNCEVRKALPKQEMASASSSQRGRRGSGNFGGGRGDGFGGNDNFGRGGNFSGRGGFGGSCGGGGYGGSGDGYNGFGNDGSNFGGGGSYNDFGNYNNQSSNFGPMKGGNFGGRSSGPYGGGGQYFAKPQNQGGYGVSSSSSSYGSGRRF

SEQ ID NO: 3125 - DNA, 2224 bp, Homo sapiens
agaccagaaacggaagagagcgcgggggatgtgtttggcgtggggcgcactgttcagttgctctcctggatggctttatgtctccgcggtgtttcctagagtctcggcgtttctacctcttcgcaccctttcctgccaccctttgtcccctggaagcccggagacatcagcggctgcaattttgctactcgctgctcggcgtggaactgtcaggacaaaaaataatatccaaagatattttggcactaacggcgctatctgtagcaagaaagttgagcagtgtgaactgttgagacttccaaggagacttcagacaaccaagacagtgtaaaggaaaacagagaaaaagacttgttagacattattaagggcacgaaagttgaattgagcacagtaaatgtacaaacaacaaagccacccaacagaagttcacttaaaagctacaactggcgggcctcaaagagctttaggacatgctccaaagaagagaaatgagcccctgagtcctgagttggtggcagctgcatctgctgctctgttttgacaagcaaacaagccagaactgctcaggcagctccgtagcatgaggaagagtcaggggcacagagagatggagagagacctagttaggaaaaatatattcagggggaagagatgtaatagatttcacattatggcagttactaaagaagcacgtgaacagacacatcaccttcactttgggatatggaatttgataagcagttagccacagaatatgaacaaccccttgagaatgagattgaagaactgatccaggggacaaaagaggggaaactgagagttcccaattaataatgaagcagcttcatatctaagatctctggtggactttttctgcccgtggacgccgctgaagaagcatcgttaaagtctctcttcaccttgccgtcatgtctaagtcagcgtctccaaaagagcccgaacagctgaggaagctcttcattggagggttgagctttgaaacaactgatgagagcctgaggagccattttgagcaatggggaacgctcacagactgtgtggtaatgagagatccaaacaccaagcgctccaggggctttgggtttgtcacatatgccactgtggaggaggtggatgcagctatgaatacaacgccacacaaggtggatggaagagttgtggaaccaaagagagctgtctccagagaagattctcaaagaccaggtgcccacttaactgtgaaaaagatatttgttggtggcattaaagaagacactgaagaacatcacctaagagattattttgaacagtatggaaaaattgaagtaattgaaatcatgactgaccgaggcagtggcaagaaaaggggctttgcctttgtaacctttgacgaccatgactccgtggataagattgtcattcagaaataccatactgtgaagggccacaactgtgaagttagaaaagccctgccaaagcaagagatggctagtgcttcatccagccaaagaggtcgaaggggttctggaaactttggtggtggtcgtggagatggtttcggtgggaatgacaactttggtcgtggaggaaacttcagtggtcgtggtggctttggtggcagctgtggtggtggtggatatggtggcagtggggatggctataatggatttggtaatgatggaagcaattttggaggtggtggaagctacaatgattttggcaattacaacaatcagtcttcaaattttggacccatgaagggaggaaattttggaggcagaagctctggcccctatggcggtggaggccaatactttgcaaaaccacaaaaccaaggtggctatggcgtttccagcagcagcagtagctatggcagtggcagaagattttaattaggaaacaaagcttagcaggagaggagagccagagaagtgacagggaagctacaggttacaacagatttgtgaactcagccaagcacagtggtggcagggcctagctgctacaaagaagacatgttttagacaaatactcatgtgtatgggcaaaaaactcgaggactgtatttgtgactaattgtataacaggttattttagtttctgttctgtggaaagtgtaaagcattccaacaaagtgttttaatgtagatttttttttttgcacccatgctgttgattgctaaatgtaatagtctgattgtgacgctgaataaatgtctct

SEQ ID NO: 3126 - protein, 320 aa, Homo sapiens; identical to SEQ ID NO: 3124

SEQ ID NO: 3127 - DNA, 1535 bp, Homo sapiens
gaggtggtaaccgtgatagtagcagctccggcggcagcaacagcgactacgagggatggcggcggctgcagcaggaactgcaacatcccagaggtttttccagagcttctcggatgccctaatcgacgaggacccccaggcggcgttagaggagctgactaaggctttggaacagaaaccagatgatgcacagtattattgtcaaagagcttattgtcacattcttcttgggaattactgtgttgctgttgctgatgcaaagaagtctctagaactcaatccaaataattccactgctatgctgagaaaaggaatatgtgaataccatgaaaaaaactatgctgctgccctagaaacttttacagaaggacaaaaattagatagtgcagatgctaatttcagtgtctggattaaaaggtgtcaagaagctcagaatggctcagaatctgaggtgtggactcatcagtcaaaaatcaagtatgactggtatcaaacagaatctcaagtagtcattacacttatgatcaagaatgttcagaagaatgatgtaaatgtggaattttcagaaaaagagttgtctgctttggttaaacttccttctggagaggattacaatttgaaactggaacttcttcatcctataataccagaacagagcacgtttaaagtactttcaacaaagattgaaattaaactgaaaaagccagaggctgtgagatgggaaaagctagaggggcaaggagatgtgcctacgccaaaacaattcgtagcagatgtaaagaacctatatccatcatcatctccttatacaagaaattgggataaattggttggtgagatcaaagaagaagaaaagaatgaaaagttggagggagatgcagctttaaacagattatttcagcagatctattcagatggttctgatgaagtgaaacgtgccatgaacaaatcctttatggagtcgggtggtacagttttgagtaccaactggtctgatgtaggtaaaaggaaagttgaaatcaatcctcctgatgatatggaatggaaaaagtactaaataaattaatttgctctcatcgtattgtgtatattcacctaatgcccattgtgtattgatattgcattcttgaattttgaacactgaatatctttttgaaagattatacttctttacctctttgtgctttagaaattattttccttcaagtgttcaagtctaatgaagaatgaagataacattttatcacttctgtccttaaagatttcagacatggtgaaactgaataaagcatgtcatttgctcctagatagattcattctatctagttgtggggatggagaaatctttaatggtatattttcggttattgccttatttttgatacagtattctgtcagtaatttattagacctggcagctttgggtgagcttagatttttcaccttcagtgttacattgtgtttgcttttaaaaactgcttttgaatggagttgtaaatacaatttttctatgaagatgtaaaaaaaaaaaaaaa

SEQ ID NO: 3128 - protein, 333 aa, Homo sapiens
MAAAAAGTATSQRFFQSFSDALIDEDPQAALEELTKALEQKPDDAQYYCQRAYCHILLGNYCVAVADAKKSLELNPNNSTAMLRKGICEYHEKNYAAALETFTEGQKLDSADANFSVWIKRCQEAQNGSESEVWTHQSKIKYDWYQTESQVVITLMIKNVQKNDVNVEFSEKELSALVKLPSGEDYNLKLELLHPIIPEQSTFKVLSTKIEIKLKKPEAVRWEKLEGQGDVPTPKQFVADVKNLYPSSSPYTRNWDKLVGEIKEEEKNEKLEGDAALNRLFQQIYSDGSDEVKRAMNKSFMESGGTVLSTNWSDVGKRKVEINPPDDMEWKKY

SEQ ID NO: 3129 - DNA, 1535 bp, Homo sapiens
ccgtgcaccgtgtgtgcgcgcggcgttgaaatgccctgcacgtcggggcagcgggacagatcccagggtgcccagggagtctccaagtgcctcactcctcccgccgcaaacatgacagagaactccgacaaagttcccattgccctggtgggacctgatgacgtggaattctgcagccccccggcgtacgctacgctgacggtgaagccctccagccccgcgcggctgctcaaggtgggagccgtggtcctcatttcgggagctgtgctgctgctctttggggccatcggggccttctacttctggaaggggagcgacagtcacatttacaatgtccattacaccatgagtatcaatgggaaattacaagatgggtcaatggaaatagacgctgggaacaacttggagacctttaaaatgggaagtggagctgaagaagcaattgcagttaatgatttccagaatggcatcacaggaattcgttttgctggaggagagaagtgctacattaaagcgcaagtgaaggctcgtattcctgaggtgggcgccgtgaccaaacagagcatctcctccaaactggaaggcaagatcatgccagtcaaatatgaagaaaattctcttatctgggtggctgtagatcagcctgtgaaggacaacagcttcttgagttctaaggtgttagaactctgcggtgaccttcctattttctggcttaaaccaacctatccaaaagaaatccagagggaaagaagagaagtggtaagaaaaattgttccaactaccacaaaaagaccacacagtggaccacggagcaacccaggcgctggaagactgaataatgaaaccagacccagtgttcaagaggactcacaagccttcaatcctgataatccttatcatcaggaaggggaaagcatgacattcgaccctagactggatcacgaaggaatctgttgtatagaatgtaggcggagctacacccactgccagaagatctgtgaacccctggggggctattacccatggccttataattatcaaggctgccgttcggcctgcagagtcatcatgccatgtagctggtgggtggcccgtatcttgggcatggtgtgaaatcacttcatatatcatgtgctgtaaaataagaactagctgaagagacaaccaaagaagcattaaggcaggttgatgctgatgggaccataaaatatttttacactcaacctgagcggttattcttgacactcttaacagaattttttcaattgttttccagaactttagtatatgcaaatgtactgaaagggtagttcaagtctaaaatgccataacccctttattatttgttattttttatttgcattgctttgccataagtcttcccttgcttgtatcttccaaagctattttgaaataaacatgaaaatttacagtttgccaaaaaaaaaaaaaaaaaaaaaaaaaaaaaaaaaaaaaaaaaaaaaaaaaaaaaaaaaaaaaaaaaaaaaaaaaaaaaaaaaaaaaaaaaaaaaaaa

SEQ ID NO: 3130 - protein, 333 aa, Homo sapiens
MTENSDKVPIALVGPDDVEFCSPPAYATLTVKPSSPARLLKVGAVVLISGAVLLLFGAIGAFYFWKGSDSHIYNVHYTMSINGKLQDGSMEIDAGNNLETFKMGSGAEEAIAVNDFQNGITGIRFAGGEKCYIKAQVKARIPEVGAVTKQSISSKLEGKIMPVKYEENSLIWVAVDQPVKDNSFLSSKVLELCGDLPIFWLKPTYPKEIQRERREVVRKIVPTTTKRPHSGPRSNPGAGRLNNETRPSVQEDSQAFNPDNPYHQEGESMTFDPRLDHEGICCIECRRSYTHCQKICEPLGGYYPWPYNYQGCRSACRVIMPCSWWVARILGMV

SEQ ID NO: 3131 - DNA, 1538 bp, Homo sapiens
ccgtgcaccgtgtgtgcgcgcggcgttgaaatgccctgcacgtcggggcagcgggacagatcccagggtgcccagggagtctccaagtgcctcactcctcccgccgcaaacatgacagagaactccgacaaagttcccattgccctggtgggacctgatgacgtggaattctgcagccccccggcgtacgctacgctgacggtgaagccctccagccccgcgcggctgctcaaggtgggagccgtggtcctcatttcgggagctgtgctgctgctctttggggccatcggggccttctacttctggaaggggagcgacagtcacatttacaatgtccattacaccatgagtatcaatgggaaattacaagatgggtcaatggaaatagacgctgggaacaacttggagacctttaaaatgggaagtggagctgaagaagcaattgcagttaatgatttccagaatggcatcacaggaattcgttttgctggaggagagaagtgctacattaaagcgcaagtgaaggctcgtattcctgaggtgggcgccgtgaccaaacagagcatctcctccaaactggaaggcaagatcatgccagtcaaatatgaagaaaattctcttatctgggtggctgtagatcagcctgtgaaggacaacagcttcttgagttctaaggtgttagaactctgcggtgaccttcctattttctggcttaaaccaacctatccaaaagaaatccagagggaaagaagagaagtggtaagaaaaattgttccaactaccacaaaaagaccacacagtggaccacggagcaacccaggcgctggaagactgaataatgaaaccagacccagtgttcaagaggactcacaagccttcaatcctgataatccttatcatcagcaggaaggggaaagcatgacattcgaccctagactggatcacgaaggaatctgttgtatagaatgtaggcggagctacacccactgccagaagatctgtgaacccctggggggctattacccatggccttataattatcaaggctgccgttcggcctgcagagtcatcatgccatgtagctggtgggtggcccgtatcttgggcatggtgtgaaatcacttcatatatcatgtgctgtaaaataagaactagctgaagagacaaccaaagaagcattaaggcaggttgatgctgatgggaccataaaatatttttacactcaacctgagcggttattcttgacactcttaacagaattttttcaattgttttccagaactttagtatatgcaaatgtactgaaagggtagttcaagtctaaaatgccataacccctttattatttgttattttttatttgcattgctttgccataagtcttcccttgcttgtatcttccaaagctattttgaaataaacatgaaaatttacagtttgccaaaaaaaaaaaaaaaaaaaaaaaaaaaaaaaaaaaaaaaaaaaaaaaaaaaaaaaaaaaaaaaaaaaaaaaaaaaaaaaaaaaaaaaaaaaaaaaa

SEQ ID NO: 3132 - protein, 334 aa, Homo sapiens
MTENSDKVPIALVGPDDVEFCSPPAYATLTVKPSSPARLLKVGAVVLISGAVLLLFGAIGAFYFWKGSDSHIYNVHYTMSINGKLQDGSMEIDAGNNLETFKMGSGAEEAIAVNDFQNGITGIRFAGGEKCYIKAQVKARIPEVGAVTKQSISSKLEGKIMPVKYEENSLIWVAVDQPVKDNSFLSSKVLELCGDLPIFWLKPTYPKEIQRERREVVRKIVPTTTKRPHSGPRSNPGAGRLNNETRPSVQEDSQAFNPDNPYHQQEGESMTFDPRLDHEGICCIECRRSYTHCQKICEPLGGYYPWPYNYQGCRSACRVIMPCSWWVARILGMV

SEQ ID NO: 3133 - DNA, 747 bp, Homo sapiens
atgggactgggcgctgtggagcaggtagcggagctcctccgggaggctcgggctgcccaggagccggcggcgggggtgggggggcaggctcaggcatggcgggcctcaggtcctaagccctgcccctcagggaggcagctaaggcccggcgagaaatcgagcacagcagctggtggccaagatcttggctttgcagatgctgccaggaaccccatactatcagccatggtcaaccccaccgtgttcttcaacatggctgtcaatgatgagcccttgtgccacgtctcctttgagctgtatgcagacaagtttccaaagacagcagaaaactttcgtgctctgagcactggagagaaaggatttggttacaagggtttctgcttttacagaattattccagggtttatgtggtttatgtgtcagggcagtgacttcacacaccataatggcactggtggcaagtccatctatggagagaaatttgatgacgagaacttcatcctgaagcatacaggtcctgaaccctcacattcccaaaccaattacttatccatggcaaatgctggacccaacacaaatggttcccagtttttcctctgcactgccaagactgagtggttggatggcacacatgtggtctttggcaaggtgaaagaaggcatcaatattgtggaggccatggagcgctttggatctaggaatggcaagaccagcaagatcaccattgttgactgtggacaactctaa

SEQ ID NO: 3134 - DNA, 2934 bp, Homo sapiens
ctgctgcgagccgagccgggcggcggcggcagtggcggcagtggcggcagcggcagcagttgcagcagtggtggccagagcggatgcttgcgggctccctgcggctccactagttttcttcgccccgcccagccgcccactcttctcggctagggaagaagaccagagggtgctcagctggaaaactctggtgtctcagcttagggcctcctccgggaagagctaactgctcccaggtgaagccggtgcccgcgggcggtccgtacaccccgcagccggctcgcaccgctcgagagcctcggccgctgtgtcttccacgtctgcagctcagccagggcgcgcagggcgagtggggtccactggcgggtaaaggggaccaggacggcgaggatggacgcacagacctggcccgtgggctttcgctgcctcctccttctggccctggttgggtccgcccgcagcgagggcgtgcagacctgcgaagaagttcggaaacttttccagtggcggctgctgggagctgtcagggggctgccggattcgccgcgggcaggacctgatcttcaggtttgcatatccaaaaagcctacatgttgcaccaggaagatggaggagagatatcagattgcggctcgccaggatatgcagcagtttcttcaaacgtccagctctacattaaagtttctaatatctcgaaatgcggctgcttttcaagaaacccttgaaactctcatcaaacaagcagaaaattacaccagtatacttttttgcagtacctacaggaacatggccttggaggctgctgcttcggttcaggagttcttcactgatgtggggctgtatttatttggtgcggatgttaatcctgaagaatttgtaaacagattttttgacagtctttttcctctggtctacaaccacctcattaaccctggtgtgactgacagttccctggaatactcagaatgcatccggatggctcgccgggatgtgagtccatttggtaatattccccaaagagtaatgggacagatggggaggtccctgctgcccagccgcacttttctgcaggcactcaatctgggcattgaagtcatcaacaccacagactatctgcacttctccaaagagtgcagcagagccctcctgaagatgcaatactgcccgcactgccaaggcctggcgctcactaagccttgtatgggatactgcctcaatgtcatgcgaggctgcctggcgcacatggcggagcttaatccacactggcatgcatatatccggtcgttggaagaactctcggatgcaatgcatggaacatacgacattggacacgtgctgctgaactttcacttgcttgttaatgatgctgtgttacaggctcacctcaatggacaaaaattattggaacaggtaaataggatttgtggccgccctgtaagaacacccacacaaagcccccgttgttcttttgatcagagcaaagagaagcatggaatgaagaccaccacaaggaacagtgaagagacgcttgccaacagaagaaaagaatttatcaacagccttcgactgtacaggtcattctatggaggtctagctgatcagctttgtgctaatgaattagctgctgcagatggacttccctgctggaatggagaagatatagtaaaaagttatactcagcgtgtggttggaaatggaatcaaagcccagtctggaaatcctgaagtcaaagtcaaaggaattgatcctgtgataaatcagattattgataaactgaagcatgttgttcagttgttacagggtagatcacccaaacctgacaagtgggaacttcttcagctgggcagtggtggaggcatggttgaacaagtcagtggggactgtgatgatgaagatggttgcgggggatcaggaagtggagaagtcaagaggacactgaagatcacagactggatgccagatgatatgaacttcagtgatgtaaagcaaatccatcaaacagacactggcagtactttagacacaacaggagcaggatgtgcagtggcgactgaatctatgacattcactctgataagtgtggtgatgttacttcccgggatttggtaactgaactcttctgtcctgacataccttactgaagtctcgatttcttctctctctgcatatgcctggaataagagatcctttttcaatgtaacaattatatttatgaaaagatatgttacactaacttctcagaagccaagctgaaatattcataaagtccctaaaactcaacgtttaaatgacacactttaaaaatatgtcttttttcaatctaactgaaaaccttcttaacttctaatatattaaatctgaagatgtgaagggcacagaagtgactttgaataagaagaatttagtgtatctgtaattttattatcaattccaagccccttcctttctaaattaaaaatgttttcatttgaaagtgtatttgccagacaatgaaaacagtatgcagtatttcttaaagtattgaaattagaatatcatgaaataaatcaaaacatacaatggcaagtagtatgcatgcatattcaagagactcttccatttttgcaagctgtagaaggaaatgtctgaatgtctataagttatggggtagattcttgagaagcatttcatataatttcactgaagaaccttgataattttgacccactgtaacttagccactgatgaaccttaaagctgagtattttattaacacctgatttgtattccattatattcaaaatgcatctttggtattgtgcctctgctcccatctctctctttgcctcatagatttagctatgttgggaagcacatgcttgctctaggaatatctccaataaagctgttaactatttggtggaaaaaaaaaaaaaaaaaaaaaaaaaaaaaaaa

SEQ ID NO: 3135 - protein, 572 aa, Homo sapiens
MDAQTWPVGFRCLLLLALVGSARSEGVQTCEEVRKLFQWRLLGAVRGLPDSPRAGPDLQVCISKKPTCCTRKMEERYQIAARQDMQQFLQTSSSTLKFLISRNAAAFQETLETLIKQAENYTSILFCSTYRNMALEAAASVQEFFTDVGLYLFGADVNPEEFVNRFFDSLFPLVYNHLINPGVTDSSLEYSECIRMARRDVSPFGNIPQRVMGQMGRSLLPSRTFLQALNLGIEVINTTDYLHFSKECSRALLKMQYCPHCQGLALTKPCMGYCLNVMRGCLAHMAELNPHWHAYIRSLEELSDAMHGTYDIGHVLLNFHLLVNDAVLQAHLNGQKLLEQVNRICGRPVRTPTQSPRCSFDQSKEKHGMKTTTRNSEETLANRRKEFINSLRLYRSFYGGLADQLCANELAAADGLPCWNGEDIVKSYTQRVVGNGIKAQSGNPEVKVKGIDPVINQIIDKLKHVVQLLQGRSPKPDKWELLQLGSGGGMVEQVSGDCDDEDGCGGSGSGEVKRTLKITDWMPDDMNFSDVKQIHQTDTGSTLDTTGAGCAVATESMTFTLISVVMLLPGIW

SEQ ID NO: 3136 - DNA, 4370 bp, Homo sapiens
ggtcgccctcagtcccacccggtgcctacggggccgcatcgccgcccggctcggcccggcccatgcccagggccgctgctccctcagttgccgccgccgccgccggcgcccagggggccgccgcggctgtgaggtgggggcggcagcgggaggcggcggggcgggccgccggggccggggctgggggcgcagcgcggccggcgtaggtctatgtcgcgggcggcggcggcggcggcggccgcggagggacgatgcgcgagtacaaagtggtggtgctgggctcgggcggggtaggcaaatccgccctgaccgtgcagttcgtgaccggcaccttcatcgagaaatacgaccccaccatcgaggacttctaccgcaaggagatcgaggtggattcgtcgccgtcggtgctggagatcctggacacggcgggcaccgagcagttcgcgtccatgcgggacctgtacatcaagaacggccagggcttcatcctcgtctacagcctcgtcaaccagcagagcttccaggacatcaagcccatgcgggaccagatcatccgcgtgaagcggtatgagaaagtgccagtcatcttggttgggaacaaagtggacctggaaagtgagagagaagtatcgtccagcgaaggcagagcccttgctgaagagtggggctgcccctttatggaaacttccgctaagagtaaaacaatggtggacgaactctttgcagaaattgtgaggcagatgaactatgctgctcagcctgacaaagatgacccatgctgttctgcatgtaacatacaatagcatccaaatatggctgtcctggatgggatttgcccaatgtcgtaggtgatagaaaactcgcctactccactgcagaacttgcagaatgcgtggtgttaatctacagagaactgcagcccttattcagaattgagcagtgattgtcagttgatatctctgagtaacatttgggttcagtaactacagttttcaccatttgtcctcagtctcctttatgcatctgcaactttaaggcatagtccatcgatctacagggtgatctcatttgaaagctatgatggcattgtcgctgagttgacagaagcaactattgtacaaattaaaaataaccataagggagaaaccagaagaattcctctgaccacttacaattaaaatattttgtcttctttaaaaaaataagtaaaggagaaatattttcctacaagagtactgaatttcaggaaatgggatagagcttctaaccagtgtattccgtcaagtaagataataacagctgacctgccaacagcattacagggagattctttgctcagctaacacatttctgtttttcaaaattgatgcttaattgtagctgttattctaatttgtgacatggaactaactcatgcttcaatccttgatagagcaaaactcagaacaggttatgtaaaaatatagtctggctttagaatttgttaattcacctgctttgccacagaaaatggaggctttcacaagggtttgatcagaattaaaaccccaaaccagccctctgttaggggtggtctttataactttactgaacaagagggaagcaactgtgatgggaagagattacctagccttactaacaagaagcattctaatagataaactagtaccatcatgtaaggaagatgaagccatgttgcatccacatgttcccgtttgcagaaacctcacaggacagtacgaatatctggcatttttaagttcattaaagcagcaaattccttctcgcctttaagggctatggttgtagtgtgacccgtggctaacctgctttcaaaatcaagtatttgctgtagcagagctttattgcaggcattttaaaaattgaataaccatgtgaaataatttgggcttaaaagtgaacataaattatagagtggaaggtaagggacaaaagccttttacctttaattttcctggagaattatatataggttttcttagaacaattttaccctgattactgaagcgtcaaataaagctggagtgaaaattttgttttgaaaaggtgctcaagctctgacatttttggttttcatagtcgtgaagtatttatcatttgcatgactaatggcacaggaaaaacctattcataagttttacaatcaagtatagaggggtcttcagctaacttagttatacataaatgctgaaaagattatcttgagctgggccttgggagaagaatttggccttcagaactgcaatatcactgagcctgcgatctatacaccaccccacattttgttggtttcacagtcttgtgcaagtaacctctggtcttacgtgtgtaactgagagaagagtgtgtgtttgtgtgtgcatgtgtgtttattgttcctaagaatttggcacaagtcagagataattgcctatactaagaatctatactgcagaatatagtgtatcaaaaacttttttcttttaaattattaaagtgtcttttatacttttatgaaatcattggtagccccccaagtgtttaataactggcattaagcttagagggtgaaaaaaaaaaaaaaaagattgatagtatttttcataatgaaaaaactgaagagatacgtgaatgaaaccaggccatagctgtcataaatctttgacttttgaatatttacattcttcagtataattttttataatcctcaattatgaaccaccttgtttataggacaaaaaaatttaaccaattttattgaaacgaatttcactgtgtaaaagttggtttgattcaaacatgtagagaagttgtagattcaagatatatgatttctctatggaaataaaaatatttgttagtgaattggttgagttttgattcctctaacttctcagaatgattctttagaattctataattcatagcaatttttgacaagtaagattgcaaaatagaaatatctataaagattccacagtttgacattatggcttgctatgcagatgtgaaaataggttaaataatatgaaagatatggcagaatgtaaagtggaaaagatgacctaaaattttgagttgtattaatagttaaaaacatttgtgtcagatgacagggtgggcttttactgtcaagacatgaataagaactgatctggctgcctgatgagtgtttccacgcagccctgcatatttagtgaccaaggcatcaaggacatcccgaaactggaaattcatatccatctggtatgaatatataactcagctggcaaatgaatgtgtttgttgagatattacagtaataaaacacttaagaacaggaagattacatttgttggcatacgaaaccttagtggctacagaagaaagttgaccttgtgtcactatttattttatgccctgatcagactagcaacttagataagtgaaagtttttctaacatgccttaaaaatattatggtttgatccaaagacccactttttctttagctcttgtgataagattttgttttttttacttttatacaaaggcagcatctttgaatttttttttcttttgatgttgcaacttttgggttcttttaaactgtgatagtgatggtaactgatgcctttcattttgttcaacttacacaaaacaagccagcatctgatcaaaagtattacataaaatattttcttaaactattgaaaggtgctttgatgattttctcctttggtttgtagaattaggactgaacttttgactcaaattgctacagttgccatcacctttctgtggtaatactactgatatttgcttttctatataaagaaatgttgcctaaggctgtctggtatttcttttcaagggttttccagtatgaatgttaatgttgtcagtgtatgtatgaatatgaaagtgctttgttttgtttgttgctgttttttgtttatgtgtgtgtttttaatttttttgttcttatcagcagtcttgtgttagcactgggtaagctttaattgtcccttagccaatcaaacattaaggactatggaggtctttttttttttatttaacatgtcattgttcatctattaaatcttgatcagggtttcaagaatgactgcagtgggttttggaaacagacttatcattattgatttgaggtttcccagagatatagttcacagttaattgttgcgctctaatacaactgaccatttaaaattgaacaagtttattgttttgtaacaatgtcagttgttaaaccttgacatttcaattaaaacatgaattgtagttataactcaatgcaaattcaacagttgtatttggagttaaattattttaacaaataaatttatttaatgaagaaaaaaaaaaaaaaaa

SEQ ID NO: 3137 - protein, 183 aa, Homo sapiens
MREYKVVVLGSGGVGKSALTVQFVTGTFIEKYDPTIEDFYRKEIEVDSSPSVLEILDTAGTEQFASMRDLYIKNGQGFILVYSLVNQQSFQDIKPMRDQIIRVKRYEKVPVILVGNKVDLESEREVSSSEGRALAEEWGCPFMETSAKSKTMVDELFAEIVRQMNYAAQPDKDDPCCSACNIQ

SEQ ID NO: 3138 - DNA, 6019 bp, Homo sapiens
gacctcccacaactggagcagccgggaacagctctgaccacagtggttccggggagaagcctttccaggacccatgtgtaggcacaactgttttccctgatcaggatacttgcggcactcaacagaggaaagaaattcctaagggaacactgctcagaaagtactgcagcatgtcttcaaatgcctgaggatcaagttggaaaactagaagcaacagaaaacacaataagcgcaatggcggcggccgcggcggagcagcaacagttctacctgctcctgggaaacctgctcagccccgacaatgtggtccggaaacaggcagaggaaacctatgagaatatcccaggccagtcaaagatcacattcctcttacaagccatcagaaatacaacagctgctgaagaggctagacaaatggccgccgttctcctaagacgtctcttgtcctctgcatttgatgaagtctatccagcacttccctctgatgttcagactgccatcaagagtgagctactcatgattattcagatggaaacacaatctagcatgaggaaaaaagtttgtgatattgcggcagaactggccaggaatttaatagatgaggatggcaataaccagtggcccgaaggtttgaagttcctttttgattcagtcagctctcaaaatgtgggactgcgggaagctgcccttcacattttctggaactttcctggaatttttgggaaccagcaacaacactatttagatgtcatcaaacgaatgttagttcagtgtatgcaagatcaggaacacccgtcgatcaggacgttatctgctagagctacagctgcatttatacttgcaaatgagcataatgttgctctgttcaaacattttgcagacttgctaccgggattcctacaggcggtaaatgactcgtgctaccagaatgatgattctgtcctaaaatccctcgttgagattgcagatactgttccaaagtatttgcgtcctcacttggaagcaactctacagctaagtctaaagttgtgtggagacactagcctcaacaatatgcaacgccagcttgcccttgaagtgatcgtcaccctctctgagactgcagctgctatgttaagaaaacataccaatattgttgcacagactattcctcagatgttagcaatgatggttgatttggaagaagatgaggactgggcaaatgcagatgaactagaagatgatgattttgacagcaatgcagttgcaggcgagagtgctctagatcgaatggcttgcggacttggtggaaagctcgttctgccgatgatcaaggaacacattatgcaaatgcttcaaaatcctgactggaaataccggcatgcaggattgatggccttatctgccattggtgaagggtgccaccagcaaatggaaggaattctaaatgagatcgtaaattttgttttactttttctccaggatcctcatccaagagtaaggtatgcagcctgtaatgccgtgggacagatggctacagattttgcacctggtttccaaaagaaatttcatgagaaggtgattgcagctctgctgcagaccatggaagaccaaggcaatcaacgtgtgcaggcccatgcagctgctgccctcattaactttactgaagactgtcccaagtcactacttattccatacttggataatttggtgaaacatctgcattccattatggtactgaagcttcaagagctgattcagaaaggcaccaagttagttttggaacaagttgtgacatccattgcatcagttgccgatactgcagaagaaaaatttgtcccctactatgatttatttatgccatcactgaagcacatcgttgagaatgcggttcaaaaagaactgagacttctgagaggaaaaactattgaatgcattagcctcattggtctggctgttgggaaggaaaaattcatgcaggatgcatcagatgtgatgcagcttttgttaaagacccagacagacttcaatgatatggaagatgatgatcctcagatctcttacatgatctcagcatgggccagaatgtgcaaaatccttggaaaagaatttcagcaataccttccagtggttatggggcctttaatgaagacggcttcaattaagcccgaagtagcccttttagatacccaagacatggagaatatgagtgatgatgatggttgggaatttgtgaaccttggagatcagcaaagctttggtattaaaactgcaggactagaagaaaaatcaactgcttgccagatgttggtttgctatgctaaggagttaaaggaaggctttgtggagtacaccgaacaggttgtcaaactgatggtccctttactgaaattttatttccacgatggtgttcgagtggcagcagcggaatccatgcctcttctcctggagtgtgcaagagtccgtggtcctgagtatctcacacagatgtggcattttatgtgtgatgctctaattaaggccattggtacagaaccagattcagacgtcctctcagaaataatgcattcttttgcaaagtgcattgaagtaatgggagatggatgccttaataatgaacactttgaagaactgggaggtatattgaaagcaaagcttgaagaacattttaaaaatcaagaattacgacaagttaaaagacaagatgaagactatgatgaacaggtcgaagagtcactacaagatgaggatgataatgatgtttatattctgaccaaagtgtcagatattttacactcaatattcagtagctacaaagaaaaggtgttaccatggtttgaacagctgcttccattaattgtcaacctcatttgtccacatagaccatggccagacagacaatggggattatgcatctttgatgatgtcatagaacactgtagtccagcctcatttaaatacgcagaatatttcttaagaccaatgctccaatatgtatgtgacaacagcccagaagtcaggcaagcagctgcatatggcctgggagtcatggcacagtacggtggagataattatcgccctttttgtacagaagcacttcccctgctggtaagagttattcagtctgcggattctaagaccaaagaaaatgtcaatgctacagagaactgcatctcagcagtagggaaaatcatgaagttcaagcctgactgtgtaaacgttgaagaggtccttccacactggttgtcttggcttccactacatgaagataaagaagaagctgttcagactttcaattatctgtgtgacctgattgaaagtaatcatccaattgttcttggcccaaacaataccaatctgcccaaaatatttagtataattgcggaaggagaaatgcacgaggcaattaaacatgaagatccttgtgccaaacgtctggccaatgtcgttcgccaagtacagacttctggaggactgtggactgagtgcatagcacagctcagtcctgagcagcaggccgccattcaggagctcctgaactctgcgtgaagggccttaatgtcacccaccagaaaactaactccaaataaacgcttaccctttcctttaggtttctttgttttgtttttgagcaaaagagatcggtagtgttgtgtgtaggccattcttctggagagccacaagcaggaagagcagcgctgtgttgcagaatggagtttccatggatttctaccagaccactgaaggagttcctggaagccctgcggtagctagcactgaagactatttttctattggtataacccgcccacctgaaggggaaagggaaatcaaattaatttttctcgttagacataaggaaatttaaggaaaaacagctttaagaacagttactcagcgtagatgtgtgttcacacaaattgctctgcattcagtgttcattgtgaattgggagtgtgagtctttctgtagggtagaaagaagcctcctacccagcaaaccagtagacccaaaagttgaaaaaaactgatgacagacaacaagcatgaagatggcatatttgatgtcactttggttctttttcccagaaggcttatacagtgactcagtcgggaagctttccagcttccagcccttgaatgtgaagtgtcattggcatgtctggcagtagtctctcattcactcctcaataaacaacattgaatacaaaagaggcttgtgtaaaaactcagtactgtctggcttggattcatttcatgtttttaatataagaatgatctaatatttttttaaagtaatagctatcagtaatagctgagtgttttttcccctaatattttccttgtgcaattcagacttaagcatcgagtttttaccatcttccactttaagctaagttatgatacctattccattcacaattggtgttctttttaaggtttgcaaatttcagccaattttgtagctaagattgttctgatcagctcaaaaagatttggcttagtgttttcattgcaaattataattgctgtagagccacacacaacttttgaacttttaattataagtgttatggctaaagttatttactgaaaatttcagtaaaatgtgtgaatgtttctttatgtattaacctcatagcagtaaatgacttgctgttgtttaatttttctaaggcatcttaatagacttctgttgaaaacttcagtgttaacatttttatagtttgtactaaatttaaccgtgatataaaaatgaattttatgcatagatcagaattttaaattaaaggttttttctttaaatgatttgtattactttattaaaactaaatctgaaatggaatagaaaatagaatggattacatacagatggtttccttgttagcagatgcccttcaaatatattttacgtttgcagcacaacaccattgcccggaggcttccgaatctagcaaagcagcatattaaatgactccacctgcgcagtccttgtgttcagtggatgaatacctgtgggctcttgtaatgtgtggtaatatttggagctttatagcctgtattccttgggagaaaaaaatgggaattggagtaaaaagtgtgtcaagacaacccctttctgctttcttatgtagcatctgcaaagccgattcatgtactgatgccaatcagctagagcaatgtaggctttttttaatttaaattattactacactttattactacacttgcagaaaagaaacatgttaaaatcatggcacacctgcagaatttcagatgacagtgtggtcagaagatgttttttgggagaacctagtgtttgctgggcactatgctaagcactttgggagcaagaacctcctaccttccagtttaaacactagtggtattgtcagatgccgttagtatctgagatgtacttacagcagggttctaagagctctgaaagaagcgctctgttagatgcagactggcagcatcctccttgataaaagcagaaaagcaaagaggtaattggagttgaatcaagttaatagggaaggttggtagtaaatgctgttagtgtgacatgattctgaaacccagagctcagaactaactgtgagatgtaccatgaactaacaattctttgaaaggacctgcagaagcatttttaatacctcattctgtctatgcaagatgaaaatccatggagttttttcttggcttttgtaccaaatttaggggtcttgcatgtcagcaagtgatatatattgtttataaatgcaagctatttctggaggggaaaaatgtgtgtggctcttacgttttctgggaattttgtaacaagttacacgcacaagtgttagaaactttggcataactcaatttggagtattttttaaatgctgtatctttaaagaaaagtaaaattgtcttaaatctaattgacacttctgtaatgagaggcaaccttataactctggagttgtagtttgacagaaccatcagtaaagacataagcaaataaatggtcttggtgcaaaaaaaaaaaaaaaaaa

SEQ ID NO: 3139 - protein, 1115 aa, Homo sapiens
MPEDQVGKLEATENTISAMAAAAAEQQQFYLLLGNLLSPDNVVRKQAEETYENIPGQSKITFLLQAIRNTTAAEEARQMAAVLLRRLLSSAFDEVYPALPSDVQTAIKSELLMIIQMETQSSMRKKVCDIAAELARNLIDEDGNNQWPEGLKFLFDSVSSQNVGLREAALHIFWNFPGIFGNQQQHYLDVIKRMLVQCMQDQEHPSIRTLSARATAAFILANEHNVALFKHFADLLPGFLQAVNDSCYQNDDSVLKSLVEIADTVPKYLRPHLEATLQLSLKLCGDTSLNNMQRQLALEVIVTLSETAAAMLRKHTNIVAQTIPQMLAMMVDLEEDEDWANADELEDDDFDSNAVAGESALDRMACGLGGKLVLPMIKEHIMQMLQNPDWKYRHAGLMALSAIGEGCHQQMEGILNEIVNFVLLFLQDPHPRVRYAACNAVGQMATDFAPGFQKKFHEKVIAALLQTMEDQGNQRVQAHAAAALINFTEDCPKSLLIPYLDNLVKHLHSIMVLKLQELIQKGTKLVLEQVVTSIASVADTAEEKFVPYYDLFMPSLKHIVENAVQKELRLLRGKTIECISLIGLAVGKEKFMQDASDVMQLLLKTQTDFNDMEDDDPQISYMISAWARMCKILGKEFQQYLPVVMGPLMKTASIKPEVALLDTQDMENMSDDDGWEFVNLGDQQSFGIKTAGLEEKSTACQMLVCYAKELKEGFVEYTEQVVKLMVPLLKFYFHDGVRVAAAESMPLLLECARVRGPEYLTQMWHFMCDALIKAIGTEPDSDVLSEIMHSFAKCIEVMGDGCLNNEHFEELGGILKAKLEEHFKNQELRQVKRQDEDYDEQVEESLQDEDDNDVYILTKVSDILHSIFSSYKEKVLPWFEQLLPLIVNLICPHRPWPDRQWGLCIFDDVIEHCSPASFKYAEYFLRPMLQYVCDNSPEVRQAAAYGLGVMAQYGGDNYRPFCTEALPLLVRVIQSADSKTKENVNATENCISAVGKIMKFKPDCVNVEEVLPHWLSWLPLHEDKEEAVQTFNYLCDLIESNHPIVLGPNNTNLPKIFSIIAEGEMHEAIKHEDPCAKRLANVVRQVQTSGGLWTECIAQLSPEQQAAIQELLNSA

SEQ ID NO: 3140 - DNA, 4335 bp, Homo sapiens
gcgcggagctgggagtggcttcgccatggctgtgagaagggactccgtgtggaagtactgctggggtgttttgatggttttatgcagaactgcgatttccaaatcgatagttttagagcctatctattggaattcctcgaactccaaatttctacctggacaaggactggtactatacccacagataggagacaaattggatattatttgccccaaagtggactctaaaactgttggccagtatgaatattataaagtttatatggttgataaagaccaagcagacagatgcactattaagaaggaaaatacccctctcctcaactgtgccaaaccagaccaagatatcaaattcaccatcaagtttcaagaattcagccctaacctctggggtctagaatttcagaagaacaaagattattacattatatctacatcaaatgggtctttggagggcctggataaccaggagggaggggtgtgccagacaagagccatgaagatcctcatgaaagttggacaagatgcaagttctgctggatcaaccaggaataaagatccaacaagacgtccagaactagaagctggtacaaatggaagaagttcgacaacaagtccctttgtaaaaccaaatccaggttctagcacagacggcaacagcgccggacattcggggaacaacatcctcggttccgaagtggccttatttgcagggattgcttcaggatgcatcatcttcatcgtcatcatcatcacgctggtggtcctcttgctgaagtaccggaggagacacaggaagcactcgccgcagcacacgaccacgctgtcgctcagcacactggccacacccaagcgcagcggcaacaacaacggctcagagcccagtgacattatcatcccgctaaggactgcggacagcgtcttctgccctcactacgagaaggtcagcggggactacgggcacccggtgtacatcgtccaggagatgcccccgcagagcccggcgaacatttactacaaggtctgagagggaccctggtggtacctgtgctttcccagaggacacctaatgtcccgatgcctcccttgagggtttgagagcccgcgtgctggagaattgactgaagcacagcaccgggggagagggacactcctcctcggaagagcccgtcgcgctggacagcttacctagtcttgtagcattcggccttggtgaacacacacgctccctggaagctggaagactgtgcagaagacgcccattcggactgctgtgccgcgtcccacgtctcctcctcgaagccatgtgctgcggtcactcaggcctctgcagaagccaagggaagacagtggtttgtggacgagagggctgtgagcatcctggcaggtgccccaggatgccacgcctggaagggccggcttctgcctggggtgcatttcccccgcagtgcataccggacttgtcacacggacctcgggctagttaaggtgtgcaaagatctctagagtttagtccttactgtctcactcgttctgttacccagggctctgcagcacctcacctgagacctccactccacatctgcatcactcatggaacactcatgtctggagtcccctcctccagccgctggcaacaacagcttcagtccatgggtaatccgttcatagaaattgtgtttgctaacaaggtgccctttagccagatgctaggctgtctgcgaagaaggctaggagttcatagaagggagtggggctggggaaagggctggctgcaattgcagctcactgctgctgcctctgaaacagaaagttggaaaggaaaaaagaaaaaagcaattaggtagcacagcactttggttttgctgagatcgaagaggccagtaggagacacgacagcacacacagtggattccagtgcatggggaggcactcgctgttatcaaatagcgatgtgcaggaagaaaagcccctcttcattccggggaacaaagacgggtattgttgggaaaggaacaggcttggagggaagggagaaagtaggccgctgatgatatattcgggcaggactgttgtggtactggcaataagatacacagctccgagctgtaggagagtcggtctgctttggatgattttttaagcagactcagctgctatacttatcacattttattaaacacagggaaagcatttaggagaatagcagagagccaaatctgacctaaaagttgaaaagccaaaggtcaaacaggctgtaattccatcatcatcgttgttattaaagaatccttatctataaaaggtaggtcagatccccctccccccaggttcctccttcccctcccgattgagccttacgacactttggtttatgcggtgctgtccgggtgccagggctgcagggtcggtactgatggaggctgcagcgcccggtgctctgtgtcaaggtgaagcacatacggcagacctcttagagtccttaagacggaagtaaattatgatgtccagggggagaaggaagataggacgtatttataataggtatatagaacacaagggatataaaatgaaagatttttactaatatatattttaaggttgcacacagtacacaccagaagatgtgaaattcatttgtggcaattaagtggtcccaatgctcagcgcttaaaaaaacaaattggacagctacttctgggaaaaacaacatcattccaaaaagaacaataatgagagcaaatgcaaaaataaccaagtcctccgaaggcatctcacggaaccgtagactaggaagtacgagccccacagagcaggaagccgatgtgactgcatcatatatttaacaatgacaagatgttccggcgtttatttctgcgttgggttttcccttgccttatgggctgaagtgttctctagaatccagcaggtcacactgggggcttcaggtgacgatttagctgtggctccctcctcctgtcctcccccgcaccccctcccttctgggaaacaagaagagtaaacaggaaacctactttttatgtgctatgcaaaatagacatctttaacatagtcctgttactatggtaacactttgctttctgaattggaagggaaaaaaaatgtagcgacagcattttaaggttctcagacctccagtgagtacctgcaaaaatgagttgtcacagaaattatgatcctctatttcctgaacctggaaatgatgttggtccaaagtgcgtgtgtgtatgtgtgagtgggtgcgtggtatacatgtgtacatatatgtataatatatatctacaatatatattatatatatctatatcatatttctgtggagggttgccatggtaaccagccacagtacatatgtaattctttccatcaccccaacctctcctttctgtgcattcatgcaagagtttcttgtaagccatcagaagttacttttaggatgggggagaggggcgagaaggggaaaaatgggaaatagtctgattttaatgaaatcaaatgtatgtatcatcagttggctacgttttggttctatgctaaactgtgaaaaatcagatgaattgataaaagagttccctgcaaccaattgaaaagtgttctgtgcgtctgttttgtgtctggtgcagaatatgacaatctaccaactgtccctttgtttgaagttggtttagctttggaaagttactgtaaatgccttgcttgtatgatcgtccctggtcacccgactttggaatttgcaccatcatgtttcagtgaagatgctgtaaataggttcagattttactgtctatggatttggggtgttacagtagccttattcacctttttaataaaaatacacatgaaaacaagaaagaaatggcttttcttacccagattgtgtacatagagcaatgttggttttttataaagtctaagcaagatgttttgtataaaatctgaattttgcaatgtatttagctacagcttgtttaacggcagtgtcattcccctttgcactgtaatgaggaaaaaatggtataaaaggttgccaaattgctgcatatttgtgccgtaattatgtaccatgaatatttatttaaaatttcgttgtccaatttgtaagtaacacagtattatgcctgagttataaatatttttttctttctttgttttattttaatagcctgtcataggttttaaatctgctttagtttcacattgcagttagccccagaaaatgaaatccgtgaagtcacattccacatctgtttcaaactgaatttgttcttaaaaaaataaaatatttttttcctatggaaaaaaaaaaaaaaaaaa

SEQ ID NO: 3141 - protein, 333 aa, Homo sapiens
MAVRRDSVWKYCWGVLMVLCRTAISKSIVLEPIYWNSSNSKFLPGQGLVLYPQIGDKLDIICPKVDSKTVGQYEYYKVYMVDKDQADRCTIKKENTPLLNCAKPDQDIKFTIKFQEFSPNLWGLEFQKNKDYYIISTSNGSLEGLDNQEGGVCQTRAMKILMKVGQDASSAGSTRNKDPTRRPELEAGTNGRSSTTSPFVKPNPGSSTDGNSAGHSGNNILGSEVALFAGIASGCIIFIVIIITLVVLLLKYRRRHRKHSPQHTTTLSLSTLATPKRSGNNNGSEPSDIIIPLRTADSVFCPHYEKVSGDYGHPVYIVQEMPPQSPANIYYKV

SEQ ID NO: 3142 - DNA, 4024 bp, Homo sapiens
gcggctgccatcttaggggcgcctggcgctacgggtttctcgttggaggcggccttcgtggcagctgtagacgccgggaaaaggcataaagtccgttggccgacacctttctttcctccggcctcggtagaaccgccagcccgcgtccgaaggcggaggcgaggggaactggccgcgtgaggggcctgaggcgagcggttagagcgtctcccggaaggatgggccggtctcggagccggagctcgtcccgctccaagcacaccaagagcagcaagcacaacaagaagcgcagccggtcccggtcgcgatcccgggacaaggagcgcgtgcggaagcgttccaaatctcgggaaagtaaacggaaccggcggcgggagtcgcggtcccgttcgcgctccaccaacacggccgtgtcccggcgcgagcgggaccgggagcgcgcctcgtccccgcccgaccgcatcgacatcttcgggcgcacggtgagcaagcgcagcagcctggacgagaagcagaagcgagaggaggaggagaagaaagcggagttcgagcggcagcgaaaaattcgacagcaagaaatagaagaaaaactcatcgaggaagaaacagcacgaagagtagaagaattggtagcaaaaagggtggaggaagaactggagaaaaggaaggatgaaattgaacgagaagttctccgaagggtggaggaagccaaacgcatcatggaaaagcagttgctcgaagaactcgagcgacagagacaagctgagcttgccgcacaaaaagctagagaggtaacgctcggtcgtttggaaagtagagacagtccatggcaaaactttcagtgttgggttctgcctcctgctcagttcagaaagagatggaatacagactatctaattcctttctcgtctaaacttaacattgctgcgaaagttaattttttagcctattcagaggtgctgactgataacttaaaagttggaagcttttataaaacatattcaaggatactttttgatttaatggaactggctatttgagaagtgtttgaaacttttgccatggctgcaggacttacattcttttttgggaggacggtggggagacagggagtggtaaagggaaaaggttaaaaatccacctgtggttgtatattcttctattctgtcactctgttacctagactgtgagaggcttttgccttcagtcagattaaaaagagcagggcctaacattgagtgatagcacctgctttgataaataggttttctcactcttctttttttccttcttttatccctcactccctcccctaaaccctgcttcagcacaatggactaattctagcattctgatcataaggccctccattttcctaatgtgtttcaaggaatctttttaggaaaaatatccagattattcatccactttttttagtatctactaacaactcctttttttctctagagagttatgaaggaacaggttgtccttgtctggagtcaagctaaacacatgatttgttttatcagcagctggagcagaagttgaaaatgtctttctgtgagacagtaatttgctactgaagctttatggcttgtttgcactgattactccaggatccaaaaacttggtgaaagtcactgaaacactcaaggcaaattactttacagccctgagtgtctgtcaccatagtttgcataatgaatatgaatcccattggtgtgtggtgtaggaaatcctgtagttgtattttcttgaactgaaatatttgactcaaaataattaagactcattgtcatttttcatcttggcattattgtggacaagttgacatattaaatctctttgctttctggtaagcttagcttttaaaatgcattttcccttgtcctgtctttaactagatatacatgcttatatttatagtgggtttcacagactataaaattgaatgtatgaaatttttatttatatcagtgcttttaataatgaagatatttttggagtaatggtgctgtcttgtagcgagttattaatcatagtaagatttttttctcttcatttgctttttttgtttcatattaacaattttttttttacacggacacaaccctctgacagtctttccaaatattaaaatcatttgaatatgtatgctgtgatctgaacactgctcaagccatcaagcagtcttcatacagtttgcattataaaatctcattaaattctccaagaaaaaataagttgaagaattttatttcctgaccatgcatcccctggatttctgagtttcagttcagattgtagatgacaatataagctgccttccgaaattgtcaacatctgaatgttaagtccattttccccatggaagaagcccgtagttccatgaagtatggattaccatttgtatttttcactaacagtaaatgtatttttcttattaattgtttgccttaggaatgatgaattacattttttgttccttcttaccataaacatctgcattgctcagctcagccttccttgtatgttgtttctttataaatggttgagctgctgatgcaggtattgccaagctaacagtacaaatcattttaaagaggaagctggcgcgtatggcagccgaggagcacactctgcaggacactggacaagacagtaaatattcaacttttaatgctgattaaaggagtataggtaaagaatacgtaggtatacataattggtgagacaaatattcactttatttatattttatatattatttttttaatttggtaaatactatccagttttgtagttgtccttgttgatttgtgtgatattaaagtattagtaataattgccaggaaactatcattagggagggtttagttggttgctgtttggactgggagggatgatttaaatttagtgctagaaaccaattttagtgactgcacagtttatcatttgtcagacagaaggtagctataaagctaccctgtaagtcatatcaaaaaagttcagaggaagattagtaaatatttatcaataaaaataaacattttgtttttctaatatcttaacatatcctcccctttaggaggaagaacgtgcaaaacgtgaggagctagagcgaatactggaagagaataaccgaaaaattgcagaagcacaagccaaactggccgaagaacagttgagaattgttgaagaacaaagaaagattcatgaggaaaggatgaaactagaacaagaacgacaacgtcaacaaaaagaagaacaaaaaattatcctgggcaaggggaagtccaggccaaaactgtccttctcattaaaaacccaggattaaattgcaaactctgaactttttacaaagaaaaatggaaaaactttgtatggtagcttcatgttgaagtggttttttgtttttgtttttgtttttttaatttgtaaaatctggaaagttagcttgttctaataggggctatgctctgcaattccctttttttttttttttttccttccactaagtcaaatccttatcagatcattgttgtattctaaggagtgacgtatttttcacctgtttggattctatattagtggtctgaggaagagcagatcacattgtaaaactatggatggtctgataaggcttttactgaccccactgacttcagagttatactctgtttgctacatcataatgctggttttgctgactttttgtttttttatatatttataaaaaaagaaaaagttggtgattgcattgggaaattcccagggtattactggacctatgtggtgtattgttaaaccagtgtccttgtgatactgttgctcttgatgttcctgatacaggtaaggaaacagttggtcaactctgatacaaagtatatatacagttcagtattgtctctgttcattttgtttttatttcattgacaaaatcaaaccagcattccccattgtgtaaataaatgattttgctgaataaagtaaagtcttaaattcaaaaaaaaaaaaaaaa

SEQ ID NO: 3143 - protein, 273 aa, Homo sapiens
MGRSRSRSSSRSKHTKSSKHNKKRSRSRSRSRDKERVRKRSKSRESKRNRRRESRSRSRSTNTAVSRRERDRERASSPPDRIDIFGRTVSKRSSLDEKQKREEEEKKAEFERQRKIRQQEIEEKLIEEETARRVEELVAKRVEEELEKRKDEIEREVLRRVEEAKRIMEKQLLEELERQRQAELAAQKAREVTLGRLESRDSPWQNFQCWVLPPAQFRKRWNTDYLIPFSSKLNIAAKVNFLAYSEVLTDNLKVGSFYKTYSRILFDLMELAI

SEQ ID NO: 3144 - DNA, 1926 bp, Homo sapiens
tggggggtttatcatcagaaggagagagacccgagggagccacctgcccactccagatgaggtgctccgtggaacacgaggagcacacgaaacccgatcagctttgtgtgacttccgcgtgtggggtggcacgcgtgtgcttgctattcattgtttctgctgggggcatttttatcttttgaaattctttcttctgaacctttcgtgcctaccagaaccagcctgtcaggatgcgcctgatctccacagcagcccctccatccgactctgaagaagccgtcagctcacagaagattccttttgtttaatgagtaacagctactgactcactccatggcccaccagaatgacagactcctgttcaaaagcctgatctgaagttgctgccatgacacaagcaatgcctgtgaagtgcctgcagcccacgcctctgagacaggccaggcgtgtggtggacacgcagctgcaggcgcttgctctctgtcatcacgagaaaaagtatccctgcaccggacaagaaaggacctgcaggcacactcacaatcaacttcctgatttcacaatgatggtagggagccctgtgggcactagaagcagcggggaggggttctagacctttggtgcccaagagacttccgtgcatggaaaatgttgacttctagcttccatctgcagcgaactctccatcgggacatgggacctggctgtacgagttaattcaaactgagccactttccattagggcaccaaatggagttagcaatccaagattattttattttctgggctatccagatgacttaaagcctcgctgaagttcccatgagaagagtttaaacaacccaaagaaagcacatcatggtcgactgcagggaactgaaactacagaaatgaacacttccaataagaggcaactactgttctcaaacggccctaaaaggcaccgagactttcaccttgtcacgaagatgcccagggagcccacggagaggtcaacatggcaagcactggaggtggaaggggtcatgggggtctggtcctcctgccacagtcaagctttcagatgatgcagcctgctgacattgtgactgaaggacaccaagctggaactacccatctaggcctctctggactcttggcccacagaagccaggtgaagcagaatcagagaaggcttgaagctcagcctccccaagctacgaatgcatgattgcaccagcgcaagacaggaatccccagtcccggctgcaggggccagggcagcttggactctccacggctcttcagcttggctttctgggcatttcaagacaggtcatggaaggtccactgggagccgaggatgctgttcttgcagtaaaggtctcagcttctgctatgccagtcaatcggggtgaaggaagtgacttttcttcagatggagaggccaagaattttatgcagatagcaacaaggtccctgacacagggaagcaatatccctgcacagaccagcttaagacaagattagtgtggagcacaggaggatcaagaggatctgcacggggtgagataaggaatctggacagaccagaaaagaggcgattccccagacacccagtgagaagtgacatttgggagatgaggatgggccatttacatacatcatgaatgggaatgcctgtattgttcatgtaactcgcagggaaaatgtcagaaaattcatccaaatctacattgtacacttgatgaggcagccgattggctgagaggcttgggaaaatcagccgggtctacccagagcttacgtagctcagattgcgggcacatggctgtggggcaccctaattcctgagggtccccccaacatgggctggcaaggcggggattgcaaaagtctccagttaccagcaccctgaacatgcaccctttgattaaatcaccccac

SEQ ID NO: 3145 - protein, 100 aa, Homo sapiens
MIAPAQDRNPQSRLQGPGQLGLSTALQLGFLGISRQVMEGPLGAEDAVLAVKVSASAMPVNRGEGSDFSSDGEAKNFMQIATRSLTQGSNIPAQTSLRQD

SEQ ID NO: 3146 - DNA, 774 bp, Homo sapiens
agaacatccttctccctcagctggagggagcatggcagtgagccaaggagacgggaccctctgctttgtcctcctgctgtgctgttggcaagaaactgagctccggccgagaaccgtgattccaggttcacctactgaaataccattcagttcaaaacaggaggatatgtctgaattattagatgaaattctggtccaggagattttggatctgaataaaacaacaccgagcgaaatgccaagtacagcatcaacattatcaacaccgttacatgctggtattgatgagaattatcaagctggtggttctgagaattaccatgaattattagagaatttacaattctctcctggcattgaggacaaaatttccaatgatgaagccaatgctaatgcaaatctccatggcgatccttctgagaattatcgtgggccacaggtgtctcctggcagtgagaagagtgtttccagtaaagaaaagaattcaaagaacactcagtatgaaaatctatccattctggaccaaatccttcaaaatattggaagatcttcaggaaacattttccataaagagcagcagaggaccagcgcacagaggaggagccaaggcagtcagtgaggccgcagccccagaccccctgcgcaggagaggagcctgctagaacccccacccaccagcctccggaacagggcacttgtgtgcacacgcccacgttctctgaaccattccacataaaggaaaatcgtttattcacaccaaaaaaaaaaaaaaaa

SEQ ID NO: 3147 - protein, 195 aa, Homo sapiens
MAVSQGDGTLCFVLLLCCWQETELRPRTVIPGSPTEIPFSSKQEDMSELLDEILVQEILDLNKTTPSEMPSTASTLSTPLHAGIDENYQAGGSENYHELLENLQFSPGIEDKISNDEANANANLHGDPSENYRGPQVSPGSEKSVSSKEKNSKNTQYENLSILDQILQNIGRSSGNIFHKEQQRTSAQRRSQGSQ

SEQ ID NO: 3148 - DNA, 3909 bp, Homo sapiens
gtgtgggaagcgcccgcgctttcggcgggttccgttaaaatggcgccctggtggccggcggcgcccgcgccttagcctgtcaggagcagggagcttgcggggcgcaggaagggcgcgggccgcggtccctgcgcgtgcggcggcagtggcggctctgcccggaccaccgtgcacggctccgggcgaggatggcgaccccggaccagaagtcgccgaacgttctgctgcagaacctgtgctgcaggatcctgggcaggagcgaagctgatgtagcccagcagttccagtatgctgtgcgggtgattggcagcaacttcgccccaactgttgaaagagatgaatttttagtagctgaaaaaatcaagaaagagcttattcgacaacgaagagaagcagatgctgcattattttcagaactccacagaaaacttcattcacagggagttttgaaaaataaatggtcaatactctacctcttgctgagcctcagtgaggacccacgcaggcagccaagcaaggtttctagctatgctacgttatttgctcaggccttaccaagagatgcccactcaaccccttactactatgccaggcctcagacccttcccctgagctaccaagatcggagtgcccagtcagcccagagctccggcagcgtgggcagcagtggcatcagcagcattggcctgtgtgccctcagtggccccgcgcctgcgccacaatctctcctcccaggacagtctaatcaagctccaggagtaggagattgccttcgacagcagttggggtcacgactcgcatggactttaactgcaaatcagccttcttcacaagccactacctcaaaaggtgtccccagtgctgtgtctcgcaacatgacaaggtccaggagagaaggggatacgggtggtactatggaaattacagaagcagctctggtaagggacattttgtacgtctttcagggcatagatggcaaaaacatcaaaatgaacaacactgaaaattgttacaaagtagaaggaaaggcaaatctaagtaggtctttgagagacacagcagtcaggctttctgagttgggatggttgcataataaaatcagaagatacacggaccagaggagcctggaccgctcattcggactcgtcgggcagagcttttgtgctgccttgcaccaggaactcagagaatactatcgattgctctctgttttacattctcagctacaactagaggatgaccagggtgtgaatttgggacttgagagtagtttaacacttcggcgcctcctggtttggacctatgatcccaaaatacgactgaagacccttgcggccctagtggaccactgccaaggaaggaaaggaggtgagctggcctcagctgtccacgcctacacaaaaacaggagacccgtacatgcggtctctggtgcagcacatcctcagcctcgtgtctcatcctgttttgagcttcctgtaccgctggatatatgatggggagcttgaggacacttaccacgaattttttgtagcatcagatccaacagttaaaacagatcgactgtggcacgacaagtatactttgaggaaatcgatgattccttcgtttatgacgatggatcagtctaggaaggtccttttgataggaaaatcaataaatttcttgcaccaagtttgtcatgatcagactcccactacaaagatgatagctgtgaccaagtctgcagagtcaccccaggacgctgcagacctattcacagacttggaaaatgcatttcaggggaagattgatgctgcttattttgagaccagcaaatacctgttggatgttctcaataaaaagtacagcttgctggaccacatgcaggcaatgaggcggtacctgcttcttggtcaaggagactttataaggcacttaatggacttgctaaaaccagaacttgtccgtccagctacgactttgtatcagcataacttgactggaattctagaaaccgctgtcagagccaccaacgcacagtttgacagtcctgagatcctgcgaaggctggacgtgcggctgctggaggtctctccaggtgacactggatgggatgtcttcagcctcgattatcatgttgacggaccaattgcaactgtgtttactcgagaatgtatgagccactacctaagagtatttaacttcctctggagggcgaagcggatggaatacatcctcactgacatacggaagggacacatgtgcaatgcaaagctcctgagaaacatgccagagttctccggggtgctgcaccagtgtcacattttggcctctgagatggtccatttcattcatcagatgcagtattacatcacatttgaggtgcttgaatgttcttgggatgagctttggaacaaagtccagcaggcccaggatttggatcacatcattgctgcacacgaggtgttcttagacaccatcatctcccgctgcctgctggacagtgactccagggcacttttaaatcaacttagagctgtgtttgatcaaattattgaacttcagaatgctcaagatgcaatatacagagctgctctggaagaattgcagagacgattacagtttgaagagaaaaagaaacagcgtgaaattgagggccagtggggagtgacggcagcagaggaagaggaggaaaataagaggattggagaatttaaagaatctataccaaaaatgtgctcacagttgcgaatattgacccatttctaccagggtatcgtgcagcagtttttggtgttactgacgaccagctctgacgagagtcttcggtttcttagcttcaggctggacttcaacgagcattacaaagccagggagcccaggctccgtgtgtctctgggtaccagggggcggcgcagctcccacacgtgaagctcgcggtcctcccagggagctgcgggtgatgttcgttgcactgctagacacgaaattcccattgacgtcctgcaggaactgcatgctgcaggtgtcctgcccttccgcccacgagtgcgccatgtttcagcggagcggcgtgtgggagaagccacgtcgtgtttcacatgtcggagtcgaatgcatttgtaaatccctaagtcaagtaggctggctgcactgttcgcatttgtctctaaaagtcttcatcgctaaaagataccataatttgctgaggcttcttaagctttctatgttataatttatatttgtcactttaaaaaatccatttcttttagaaaaaattagggtgataggatattcattagttaagatggtaacgtcattgctatttttttaacatcctctttagaggtaatttttgttaacataaccaaaaattaaattgaaacaaaatgtcccaactaagaaaatatatagagcattttatttttttttagtgttgtaaaatattaacctctgtgagatcctttgtatcttaatgcattacctttacacatatttattcttattttctctcctttcagagtttacatttttatatttaatttactatttcagatttttaaaatagtatagaaaaaagtaggagtgatagagaacaaaaatactcttatacagtgcaacccaaataccgcgaatgcatcagctaaagcagcgtgtaaataggagtgatgagaaagttaatggagtattttattttcaaagttcctgataagcattggaaagaaatcgacatggataatgaagatttcctttttccttgcctattttttcattgtaaatatttatatactactgaccaagatgttggggtgggggggattgttttttgtaaaaatgtcattatcaggtcacataaatctgcctttatgttgcataagtgaaaatttagaaaattaaaagcaattatcttccaaaaaaaaaaaaaaaa

SEQ ID NO: 3149 - protein, 907 aa, Homo sapiens
MATPDQKSPNVLLQNLCCRILGRSEADVAQQFQYAVRVIGSNFAPTVERDEFLVAEKIKKELIRQRREADAALFSELHRKLHSQGVLKNKWSILYLLLSLSEDPRRQPSKVSSYATLFAQALPRDAHSTPYYYARPQTLPLSYQDRSAQSAQSSGSVGSSGISSIGLCALSGPAPAPQSLLPGQSNQAPGVGDCLRQQLGSRLAWTLTANQPSSQATTSKGVPSAVSRNMTRSRREGDTGGTMEITEAALVRDILYVFQGIDGKNIKMNNTENCYKVEGKANLSRSLRDTAVRLSELGWLHNKIRRYTDQRSLDRSFGLVGQSFCAALHQELREYYRLLSVLHSQLQLEDDQGVNLGLESSLTLRRLLVWTYDPKIRLKTLAALVDHCQGRKGGELASAVHAYTKTGDPYMRSLVQHILSLVSHPVLSFLYRWIYDGELEDTYHEFFVASDPTVKTDRLWHDKYTLRKSMIPSFMTMDQSRKVLLIGKSINFLHQVCHDQTPTTKMIAVTKSAESPQDAADLFTDLENAFQGKIDAAYFETSKYLLDVLNKKYSLLDHMQAMRRYLLLGQGDFIRHLMDLLKPELVRPATTLYQHNLTGILETAVRATNAQFDSPEILRRLDVRLLEVSPGDTGWDVFSLDYHVDGPIATVFTRECMSHYLRVFNFLWRAKRMEYILTDIRKGHMCNAKLLRNMPEFSGVLHQCHILASEMVHFIHQMQYYITFEVLECSWDELWNKVQQAQDLDHIIAAHEVFLDTIISRCLLDSDSRALLNQLRAVFDQIIELQNAQDAIYRAALEELQRRLQFEEKKKQREIEGQWGVTAAEEEEENKRIGEFKESIPKMCSQLRILTHFYQGIVQQFLVLLTTSSDESLRFLSFRLDFNEHYKAREPRLRVSLGTRGRRSSHT

SEQ ID NO: 3150 - DNA, 3861 bp, Homo sapiens
atgtcacatctggtggaccctacatcaggagacttgccagttagagacatagatgctatacctctggtgctaccagcctcaaaaggtaagaatatgaaaactcaaccacccttgagcaggatgaaccgggaggaattggaggacagtttctttcgacttcgcgaagatcacatgttggtgaaggagctttcttggaagcaacaggatgagatcaaaaggctgaggaccaccttgctgcggttgaccgctgctggccgggacctgcgggtcgcggaggaggcggcgccgctctcggagaccgcaaggcgcgggcagaaggcgggatggcggcagcgcctctccatgcaccagcgcccccagatgcaccgactgcaagggcatttccactgcgtcggccctgccagcccccgccgcgcccagcctcgcgtccaagtgggacacagacagctccacacagccggtgcaccggtgccggagaaacccaagagggggccaagggacaggctgagctacacagcccctccatcgtttaaggagcatgcgacaaatgaaaacagaggtgaagtagccagtaaacccagtgaacttgtttctggttctaacagcataatttctttcagcagtgtcataagtatggctaaacccattggtctatgcatgcctaacagtgcccacatcatggccagcaataccatgcaagtggaagagccacccaagtctcctgagaaaatgtggcctaaagatgaaaattttgaacagagaagctcattggagtgtgctcagaaggctgcagagcttcgagcttccattaaagagaaggtagagctgattcgacttaagaagctcttacatgaaagaaatgcttcattggttatgacaaaagcacaattaacagaagttcaagaggcatacgaaaccttgctccagaagaatcagggaatcctgagtgcagcccatgaggccctcctcaagcaagtgaatgagctcagggcagagctgaaggaagaaagcaagaaggctgtgagcttgaagagccaactggaagatgtgtctatcttgcagatgactctgaaggagtttcaggagagagttgaagatttggaaaaagaacgaaaattgctgaatgacaattatgacaaactcttagaaagcatgctggacagcagtgacagctccagtcagccccactggagcaacgagctcatagcggaacagctacagcagcaagtctctcagctgcaggatcagctggatgctgagctggaggacaagagaaaagttttacttgagctgtccagggagaaagcccaaaatgaggatctgaagcttgaagtcaccaacatacttcagaagcataaacaggaagtagagctcctccaaaatgcagccacaatttcccaacctcctgacaggcaatctgaaccagccactcacccagctgtattgcaagagaacactcagatcgagccaagtgaacccaaaaaccaagaagaaaagaaactgtcccaggtgctaaatgagttgcaagtatcacacgcagagaccacattggaactagaaaagaccagggacatgcttattctgcagcgcaaaatcaacgtgtgttatcaggaggaactggaggcaatgatgacaaaagctgacaatgataatagagatcacaaagaaaagctggagaggttgactcgactactagacctcaagaataaccgtatcaagcagctggaaggtattttaagaagccatgaccttccaacatctgaacagctcaaagatgttgcttatggcacccgaccgttgtcgttatgtttggaaacactgccagcccatggagatgaggataaagtggatatttctctgctgcatcagggtgagaatctttttgaactgcacatccaccaggccttcctgacatctgccgccctagctcaggctggagatacccaacctaccactttctgcacctattccttctatgactttgaaacccactgtaccccattatctgtggggccacagcccctctatgacttcacctcccagtatgtgatggagacagattcgcttttcttacactaccttcaagaggcttcagcccggcttgacatacaccaggccatggccagtgaacacagcactcttgctgcaggatggatttgctttgacagggtgctagagactgtggagaaagtccatggcttggccacactgattggagctggtggagaagagttcggggttctagagtactggatgaggctgcgtttccccataaaacccagcctacaggcgtgcaataaacgaaagaaagcccaggtctacctgtcaaccgatgtgcttggaggccggaaggcccaggaagaggagttcagatcggagtcttgggaacctcagaacgagctgtggattgaaatcaccaagtgctgtggcctccggagtcgatggctgggaactcaacccagtccatatgctgtgtaccgcttcttcaccttttctgaccatgacactgccatcattccagccagtaacaacccctactttagagaccaggctcgattcccagtgcttgtgacctctgacctggaccattatctgagacgggaggccttgtctatacatgtttttgatgatgaagacttagagcctggctcgtatcttggccgagcccgagtgcctttactgcctcttgcaaaaaatgaatctatcaaaggtgattttaacctcactgaccctgcagagaaacccaacggatctattcaagtgcaactggattggaagtttccctacataccccctgagagcttcctgaaaccagaagctcagactaaggggaaggataccaaggacagttcaaagatctcatctgaagaggaaaaggcttcatttccttcccaggatcagatggcatctcctgaggttcccattgaagctggccagtatcgatctaagagaaaacctcctcatgggggagaaagaaaggagaaggagcaccaggttgtgagctactcaagaagaaaacatggcaaaagaataggtgttcaaggaaagaatagaatggagtatcttagccttaacatcttaaatggaaatacaccacagcaggtgaattacactgagtggaagttctcagagactaacagcttcataggtgatggctttaaaaatcagcacgaggaagaggaaatgacattatcccattcagcactgaaacagaaggaacctctacatcctgtaaatgacaaagaatcctctgaacaaggttctgaagtcagtgaagcacaaactaccgacagtgatgatgtcatagtgccacccatgtctcagaaatatcctaaggcagattcagagaagatgtgcattgaaattgtctccctggccttctacccagaggcagaagtgatgtctgatgagaacataaaacaggtgtatgtggagtacaaattctacgacctacccttgtcggagacagagactccagtgtccctaaggaagcctagggcaggagaagaaatccactttcactttagcaaggtaatagacctggacccacaggagcagcaaggccgaaggcggtttctgttcgacatgctgaatggacaagatcctgatcaaggacatttaaagtttacagtggtaagtgatcctctggatgaagaaaagaaagaatgtgaagaagtgggatatgcatatcttcaactgtggcagatcctggagtcaggaagagatattctagagcaagagctagacattgttagccctgaagatctggctaccccaataggaaggctgaaggtttcccttcaagcagctgctgtcctccatgctatttacaaggagatgactgaagatttgttttcatga

SEQ ID NO: 3151 - protein, 1286 aa, Homo sapiens
MSHLVDPTSGDLPVRDIDAIPLVLPASKGKNMKTQPPLSRMNREELEDSFFRLREDHMLVKELSWKQQDEIKRLRTTLLRLTAAGRDLRVAEEAAPLSETARRGQKAGWRQRLSMHQRPQMHRLQGHFHCVGPASPRRAQPRVQVGHRQLHTAGAPVPEKPKRGPRDRLSYTAPPSFKEHATNENRGEVASKPSELVSGSNSIISFSSVISMAKPIGLCMPNSAHIMASNTMQVEEPPKSPEKMWPKDENFEQRSSLECAQKAAELRASIKEKVELIRLKKLLHERNASLVMTKAQLTEVQEAYETLLQKNQGILSAAHEALLKQVNELRAELKEESKKAVSLKSQLEDVSILQMTLKEFQERVEDLEKERKLLNDNYDKLLESMLDSSDSSSQPHWSNELIAEQLQQQVSQLQDQLDAELEDKRKVLLELSREKAQNEDLKLEVTNILQKHKQEVELLQNAATISQPPDRQSEPATHPAVLQENTQIEPSEPKNQEEKKLSQVLNELQVSHAETTLELEKTRDMLILQRKINVCYQEELEAMMTKADNDNRDHKEKLERLTRLLDLKNNRIKQLEGILRSHDLPTSEQLKDVAYGTRPLSLCLETLPAHGDEDKVDISLLHQGENLFELHIHQAFLTSAALAQAGDTQPTTFCTYSFYDFETHCTPLSVGPQPLYDFTSQYVMETDSLFLHYLQEASARLDIHQAMASEHSTLAAGWICFDRVLETVEKVHGLATLIGAGGEEFGVLEYWMRLRFPIKPSLQACNKRKKAQVYLSTDVLGGRKAQEEEFRSESWEPQNELWIEITKCCGLRSRWLGTQPSPYAVYRFFTFSDHDTAIIPASNNPYFRDQARFPVLVTSDLDHYLRREALSIHVFDDEDLEPGSYLGRARVPLLPLAKNESIKGDFNLTDPAEKPNGSIQVQLDWKFPYIPPESFLKPEAQTKGKDTKDSSKISSEEEKASFPSQDQMASPEVPIEAGQYRSKRKPPHGGERKEKEHQVVSYSRRKHGKRIGVQGKNRMEYLSLNILNGNTPQQVNYTEWKFSETNSFIGDGFKNQHEEEEMTLSHSALKQKEPLHPVNDKESSEQGSEVSEAQTTDSDDVIVPPMSQKYPKADSEKMCIEIVSLAFYPEAEVMSDENIKQVYVEYKFYDLPLSETETPVSLRKPRAGEEIHFHFSKVIDLDPQEQQGRRRFLFDMLNGQDPDQGHLKFTVVSDPLDEEKKECEEVGYAYLQLWQILESGRDILEQELDIVSPEDLATPIGRLKVSLQAAAVLHAIYKEMTEDLFS

SEQ ID NO: 3152 - DNA, 4696 bp, Homo sapiens
ggcagaccgtcacgtgacgacgtcgattcgcgtgcggcagtggcgaagttgacaaaccccgcgaaaatcgactctttgcatcgcacattttgttgattttccctcgtttttctttctctctttcccccgtccatccgaaagagggttggaaaaaaacaaaacaaacaaacaaacaaaaaaaaaacctaacgctgttgggacccggaagcggaaagggcatctttgaggtcgatacttccgggtcattgggagagtgcgggattcctgggccgagagcgggtggctgagccgggacctcgcgtgattctcggaacccgaggagaagcggcgtccggggctatggctgtgactctggacaaagacgcttattatcggcgagtgaagagactgtacagcaattggcggaaaggagaagatgagtatgccaacgttgatgccattgttgtatcagtgggtgttgatgaagaaattgtttatgccaaatcaactgccttacagacatggctctttggttatgaactaactgatactatcatggtcttttgtgatgacaaaatcatctttatggccagcaagaaaaaagtggagttcttgaaacagattgccaacactaagggcaatgagaatgctaatggagcccctgccatcacactgctaatacgagaaaagaatgaaagtaataagagtagctttgacaaaatgattgaagccattaaagaaagcaagaatggcaagaagattggagtgttcagcaaagacaaattccctggagagttcatgaagagctggaatgactgcctcaacaaagaaggctttgacaaaatagatatcagtgcagttgtggcatataccatcgctgtaaaggaggatggggagctcaacctaatgaagaaagcagccagcatcacttctgaagtcttcaacaaattcttcaaggaaagagtcatggaaatagttgatgcagatgagaaagttcgacacagcaaactggctgagtctgtggaaaaggccattgaagagaaaaaataccttgctggggcagacccttctactgtggaaatgtgttaccctcctatcattcagagtggtggcaactataatctcaagttcagtgtggtgagtgacaagaatcatatgcactttggggctatcacttgtgccatgggtattcgcttcaagtcttactgctccaaccttgttcgcactttgatggttgatccttctcaagaagttcaagaaaattataactttttgctccagcttcaagaggagctgctgaaggaattaagacatggtgtgaagatatgtgacgtgtataacgctgtcatggacgtggttaaaaagcagaagccagaactgctgaacaaaattaccaaaaacctagggtttgggatgggaattgaattccgtgaaggctccctagtaatcaatagcaaaaatcaatacaaactgaagaaaggaatggttttcagcatcaatttaggattctcagacctgactaacaaggaggggaaaaagccagaagagaaaacctatgccctgttcattggtgacacagtgcttgtggatgaggatggcccagctactgttctcacttctgtgaagaagaaagtgaagaatgtggggattttcctaaagaatgaagatgaggaagaagaggaggaggagaaagatgaggcagaggaccttttgggaagaggttctcgggcagcattacttacagaaagaacaagaaatgaaatgactgcagaagagaagcgaagagcacatcagaaagaactagcggctcaactcaatgaagaagcaaagaggcgattgactgaacaaaagggagaacagcagattcagaaagctcgcaagtctaatgtgtcctataaaaacccatctctgatgcctaaggaaccgcatattcgggaaatgaagatctacatcgataagaaatatgagactgtaataatgcccgtgtttggcattgcaacaccgtttcacattgccacaatcaagaatataagtatgtccgtggaaggagattatacttacttgcgaatcaacttttattgcccaggcagtgctctgggcaggaatgaaggcaacatctttcctaaccctgaagcgacttttgtcaaggaaattacataccgagcatcaaatattaaggcacccggagaacagacagtaccagccttgaaccttcagaatgctttccgaattattaaagaagtacagaaacgttataaaactcgagaagctgaagagaaagagaaggaggggattgtaaaacaagactcactggtgatcaatctaaaccggagtaatccgaaactgaaagatctatacattcgcccaaatattgcccaaaagaggatgcaaggctcactggaggcccatgtcaatggcttccgcttcacatctgttcgaggagacaaagtggatattttgtacaataatattaagcatgctttgttccagccctgtgatggagaaatgattattgtcttgcactttcacctcaagaatgccatcatgtttgggaagaagcggcacacggatgtgcagttctacacagaagtgggagagataaccacggacttggggaaacatcagcatatgcatgaccgagatgacctctatgctgagcagatggaacgagaaatgaggcacaaactgaaaacagcctttaaaaatttcattgagaaagtagaggctctaactaaggaggaactggaatttgaagtgccttttagggacttgggatttaacggagctccctataggagtacctgcctccttcagcccactagtagtgcgctggtaaatgctacggaatggccaccttttgtggtgacattggatgaggtagagctgatccactttgagcgggtccagtttcacctgaagaactttgatatggtaatcgtctacaaggactacagcaagaaagtgaccatgatcaacgccattcctgtagcctctcttgaccccatcaaggaatggttgaattcctgcgacctgaaatacacagaaggagtacagtccctcaactggactaaaatcatgaagaccattgttgatgaccctgagggcttcttcgaacaaggtggctggtctttcctggagcctgagggtgaggggagtgatgctgaagaaggggattcagagtctgaaattgaagatgagacttttaatccttcagaagatgactatgaagaggaagaggaggacagtgatgaagattattcatcagaagcagaagagtcagactattctaaggagtcattgggtagtgaagaagagagtggaaaggattgggatgaactggaggaagaagcccgaaaagcggaccgagaaagtcgttacgaggaagaagaagaacaaagtcgaagtatgagccggaagaggaaggcatctgtgcacagttcgggccgtggctctaaccgtggttccagacacagctctgcaccccccaagaaaaagaggaagtaacttctgaactttggccctgagctccattcttcctccagccaacccctgaaaattttacatgacatagaaactgtatttttcctttcgttttcatttgaagttttgccatttgtgtttatgggtttagggggccatttgtgtggaccaatctactcggggaattccaggcccaccaggacacgtgccaatggccccattcagatggcaagggaggaggtgttcttgaagacaggaggaggctcccgctgttaataaatattgtttcattcttctctcttcctgtcaccttctgccaagacattgatggcttctgacatcttatttggtgtctcaaagctgtatttccaagacagtggtacaaggtgacccttaattacccgtatcatggttcttgaccagcacattcaatcctccaacctaccctactgccatgaccttccgcacatctctaagttttatctttgcaatactcaaggttctcggaaatttgctaatggttgtgataaaccatacagcttgagccagtgaggcagattgggctggtgccttcgtctgagttttcctgctttcctgcctcgtgcagattctgaggtatatctgctgccttggaagacataagaagcagtgatactccctggctcggttattttctccatacaatgcacacatggtacaatgatagaaggcaaaattgccactgtcttcttttttttctcatatatctaaggaagatatatcaggttgtgcctcatgtaccgcttctagtgaaatgtagaggaaggctcaaaggagtcaacatttagatctggaagggacaagtcatgccttgggcctagaataccctgatgagaaaagagaagaggaagggaggccatatctacaacacagcctctcggcactgctgctccttattttaactttgtcttgcattgtcctgtatttatcacagtttctgttgaacagcttttcaagtatttggggagtttatcttgccatcctccccttctggttctctgcacccacctgtcccactgcagttccttccgtgctctgtgactttaagagaagaaggggggaggggtcccggattttatgtttgtttgttttttctccttagcagtaggacttgatattttcaattttggaagaactaaaagatgaataaactgggttttttttgttgtttgtttttgtaaaaaaaaaaaaaaaaaaa

SEQ ID NO: 3153 - protein, 1047 aa, Homo sapiens
MAVTLDKDAYYRRVKRLYSNWRKGEDEYANVDAIVVSVGVDEEIVYAKSTALQTWLFGYELTDTIMVFCDDKIIFMASKKKVEFLKQIANTKGNENANGAPAITLLIREKNESNKSSFDKMIEAIKESKNGKKIGVFSKDKFPGEFMKSWNDCLNKEGFDKIDISAVVAYTIAVKEDGELNLMKKAASITSEVFNKFFKERVMEIVDADEKVRHSKLAESVEKAIEEKKYLAGADPSTVEMCYPPIIQSGGNYNLKFSVVSDKNHMHFGAITCAMGIRFKSYCSNLVRTLMVDPSQEVQENYNFLLQLQEELLKELRHGVKICDVYNAVMDVVKKQKPELLNKITKNLGFGMGIEFREGSLVINSKNQYKLKKGMVFSINLGFSDLTNKEGKKPEEKTYALFIGDTVLVDEDGPATVLTSVKKKVKNVGIFLKNEDEEEEEEEKDEAEDLLGRGSRAALLTERTRNEMTAEEKRRAHQKELAAQLNEEAKRRLTEQKGEQQIQKARKSNVSYKNPSLMPKEPHIREMKIYIDKKYETVIMPVFGIATPFHIATIKNISMSVEGDYTYLRINFYCPGSALGRNEGNIFPNPEATFVKEITYRASNIKAPGEQTVPALNLQNAFRIIKEVQKRYKTREAEEKEKEGIVKQDSLVINLNRSNPKLKDLYIRPNIAQKRMQGSLEAHVNGFRFTSVRGDKVDILYNNIKHALFQPCDGEMIIVLHFHLKNAIMFGKKRHTDVQFYTEVGEITTDLGKHQHMHDRDDLYAEQMEREMRHKLKTAFKNFIEKVEALTKEELEFEVPFRDLGFNGAPYRSTCLLQPTSSALVNATEWPPFVVTLDEVELIHFERVQFHLKNFDMVIVYKDYSKKVTMINAIPVASLDPIKEWLNSCDLKYTEGVQSLNWTKIMKTIVDDPEGFFEQGGWSFLEPEGEGSDAEEGDSESEIEDETFNPSEDDYEEEEEDSDEDYSSEAEESDYSKESLGSEEESGKDWDELEEEARKADRESRYEEEEEQSRSMSRKRKASVHSSGRGSNRGSRHSSAPPKKKRK

SEQ ID NO: 3154 - DNA, 7147 bp, Homo sapiens
tgctggagagacagggagaggggcgaaccggccccccacagccactgcaggagttccaccatcttcctctgaagacgtagccatcttgctccatgaagggtgaatcgaaacgcatcaccctggtcctccagcagccacagtctggaggtccccaaggacatcggcatgttgtgctagggagtctaccaggcaagatagtgttacagggcaaccagctggcagccctgactcaagccaagaatgcccaagggcagcctgccaaggtagtaactatccagctgcaggtgcagcagccacagcaaaaaatccagattgtaccacaaccaccatcatcgcagccacagccccagcagccaccctccacccagccagtgactctgtcctctgtacagcaggctcagataatgggaccaggacaaagcccaggacaaagactttcagtaccagtcaaggtggtactgcagccacaggctggctcttcccaaggggcctcttctgggctctctgtagttaaagttctgagtgccagtgaagtggcagctttgtcatcaccagcaagctctgctcctcattcggggggaaagacaggaatggaggaaaaccgcagattggaacaccagaagaagcaagagaaagcaaatcggattgtagcagaggccattgcgagagcccgtgcccgcggtgagcagaacatacctcgagtcttaaatgaggacgagttgcccagcgttcggccagaggaggaaggcgagaagaaacgcaggaagaagagtgctggggagaggctgaaagaggagaagccaaagaagagtaaaacatctggtgcctccaaaacaaagggcaagagcaagctcaacaccatcactcctgtagtgggtaagaagagaaaacgtaatacctcatctgataattcagatgtggaagtcatgcctgcacagtcacctcgagaagatgaagaaagcagcattcagaagagacgctcaaaccgccaagttaagcgaaaaaaatatacagaggacctggatataaagatcgcagatgatgaagaagaagaagaggtggatgtaactggtccaataaaacctgagcctatcctccctgaaccagtgcaagaaccagatggcgagactttgccttccatgcagttctttgtggagaatcccagtgaagaagatgcagccattgtagacaaagtgctttctatgcggattgtgaagaaggagctcccttctggacaatatactgaagcagaagaattctttgtcaagtacaagaactactcctatctgcattgtgaatgggctactatctcccaactagagaaggataagaggatacatcaaaaattaaagcgcttcaaaaccaaaatggctcagatgagacacttcttccatgaggatgaagagccctttaatccagactacgtagaggtggataggatattggatgagtctcacagtattgacaaggacaatggggagcccgttatttactacctggtgaaatggtgctctctgccctatgaggatagcacatgggagctaaaagaagatgttgatgagggcaagattcgagaatttaaacggattcagtcaaggcacccagaactcaaaagggtgaatcgtccgcaggcaagtgcctggaagaaattggagctatcacatgaatataaaaacagaaaccagctacgggaatatcagttggaaggggttaattggctgctctttaattggtataacaggcagaactgcatcctggctgatgagatgggattgggcaaaactattcagtccattgccttcttgcaggaagtatataatgtgggcatccatggtcccttcttggtcattgccccactgtccacaattactaactgggagcgagaatttaatacatggacagaaatgaacactattgtgtaccatggcagtctggccagcaggcagatgattcaacagtatgaaatgtactgcaaagattcacggggacgcctcatcccaggcgcatacaagtttgacgctctgatcaccacttttgagatgattttgtcagattgtcctgagcttcgtgaaattgaatggcgttgtgttatcattgatgaagcccatcgactgaaaaaccgtaattgcaagctgcttgatagtctcaagcacatggacctggaacacaaggtgctactcacaggaacaccattgcaaaatactgtagaagaactgtttagcttgcttcatttcttggaaccgtcacaatttccctcagaatcagagtttctcaagaactttggggatctcaagacagaggaacaggttcaaaagctacaggccattcttaagccaatgatgctgagaagactcaaagaggatgttgaaaaaaacttggcacccaaacaggaaacaattattgaagtagagctgactaatatccagaagaaatactatcgggctattttggagaagaatttctccttcctttccaaaggggcaggtcataccaacatgcctaatctacttaacacaatgatggagttgcgcaagtgctgcaaccacccatatctcatcaatggtgctgaagaaaaaatcctaacagaattccgtgaagcttgccatattatacctcatgactttcacctgcaggccatggttcgttcagccggcaaactggttcttattgacaagttgcttccaaagcttaaagctggtggccataaagttctgatcttctctcagatggtacgctgcctagacatcctagaggattatttaatccagaggaggtacttatatgaacgtattgatgggcgagttagaggcaaccttcgacaggctgccattgaccgcttcagcaagcctgactcagaccgctttgtcttcttactgtgtacccgggctggtggacttggtattaatcttacagctgctgatacctgcatcatctttgattcagactggaatccacaaaatgacctgcaggcccaggcacgatgtcatcgaattgggcagagcaaagctgtgaaggtgtaccgcctcatcactcgtaattcctacgagagagagatgtttgataaggccagcctcaagttggggttggataaggctgtgcttcaatccatgagtggtcgggatggcaacattactggaatccaacagttctctaagaaggagattgaagatcttttaagaaaaggagcatatgcagccatcatggaggaagatgatgaaggctccaagttttgtgaagaggacattgaccagatcttgttaagacgaactacaaccatcaccattgaatctgaaggaaaaggttccacctttgctaaggcaagctttgttgcttctgaaaacaggacagatatttctttggatgaccccaacttttggcaaaagtgggccaaaaaggctgacctagacatggatctgctcaacagcaagaataatttggtaattgacacacctagagtacgaaaacaaacgcgccactttagcactctgaaagatgatgacctggtggaattctctgatttggaaagtgaggatgatgagcggccacgctcccgcagacatgaccgtcatcatgcctatgggcgcactgactgctttcgggtggaaaagcatctcctggtatatggttggggacgatggcgagatattttatctcatggacgcttcaagcgacgtatgactgaacgagatgtggagaccatttgtcgggccattctcgtgtactgtcttctacactaccgtggggatgaaaatattaaaggcttcatctgggacttgattagcccagctgaaaatggcaagacaaaagaattgcagaatcattcaggtctatctatccctgtgcctcgtggacgcaaaggaaaaaaagtaaagtcacaaagcacttttgatatccataaggcagattggatccggaaatataaccctgacactttgttccaagatgaaagttataagaagcacttgaaacatcagtgtaacaaggtactgttgcgggtacgaatgctatactacctgaggcaggaggttattggagaccaagcagaaaaggtgttagggggtgcgattgccagtgagattgacatatggttcccagtagtggatcaactggaggttccaacaacttggtgggacagtgaggctgacaagtcgctgctcattggagtctttaaacatggctatgagaaatataataccatgagggcagacccagccttatgtttcctagaaaaggctggccgaccagatgacaaagcaattgcagcagaacatcgagtgttggataacttctctgacatagtagaaggggttgactttgataaagattgtgaagatcctgaatataaaccactccaaggtcccccaaaggaccaagatgatgagggtgatcccttgatgatgatggatgaggagatctcagtgattgatggagatgaagcccaggtgacccaacagccaggccatttattctggcctccgggctctgccctaacagctaggcttcggcgtctagtaacagcgtatcagcgcagctacaagagagaacaaatgaagatagaggctgcagaacgtggggaccggcgaaggcggcgttgtgaagcagccttcaagctgaaagaaattgcacggcgggagaaacaacaacgatggacaaggcgtgaacaaactgatttttatcgagtggtgtctacgtttggtgtggaatatgaccctgacaccatgcagttccattgggatcgcttccgcacttttgctcgactagacaaaaagacagatgaaagccttaccaagtacttccatggctttgtggccatgtgccgccaagtatgccgccttcccccagcagctggagatgaaccccccgaccctaacctgttcattgagcccatcactgaggagagagcctcacggactctctaccgtatagaattgcttcggcgcttacgggaacaagttttatgccacccccttttggaagatcggctggcattgtgtcagcctcctggtcctgaattgcccaaatggtgggagcctgttcggcatgatggggagcttctaagaggggcagcccgccatggggtgagccaaacagactgcaacatcatgcaggacccagacttctcttttctggctgcccgtatgaattatatgcagaaccatcaagcaggagcaccagctccatccttgtcacgctgctctactccactgctgcaccagcagtatacctcacgcactgcctcaccactgcccctgcgcccagatgctcctgttgaaaagtcacccgaggagacagctacccaggtccccagtctggagagtctgactttaaagctagagcacgaggtggtggccaggagccgaccaaccccacaagactatgagatgcgagtatccccctctgatactacccctctggtttcccggagtgttccaccagtcaaactggaggatgaggatgattcggactctgagctggacttgagcaagctgtcaccatcttcttcttcttcctcatcctcatccagctccagctccagcactgatgagagtgaggatgagaaggaagagaagctaactgaccagtcccgctcaaagctctatgatgaagagagtctcctgtccctcactatgtcccaagatggattcccaaatgaagatggagaacaaatgacccctgagcttctgctactgcaggaaagacaaagagcctctgagtggcccaaggatcgtgtcctgataaaccgtattgacctcgtctgccaggctgtactctcagggaagtggccttctagccgtaggagccaggaaatggtaacaggaggaattttggggccaggcaaccacttgctagacagtccctcattgactcctggagaatatggtgactctccagtccccacaccacgaagtagtagtgcagcttccatggcagaggaggaagcatctgcagtcagcacagcggcagcccagttcaccaaacttcgccgaggcatggatgaaaaggagtttacagttcaaatcaaagatgaggaaggattgaagttaacattccagaagcacaagttgatggcgaatggagtaatgggagatggacatccactgtttcataagaagaaggggaacagaaagaagctagtagagctggaggtggagtgcatggaagagcctaatcaccttgatgtggacctggagacccggatccctgtcatcaataaggtggatggtactttgctggtgggtgaggatgcccctcgccgggctgaactggagatgtggttacagggtcatccagagtttgctgttgatccccgatttctagcgtatatggaggatcgcagaaaacagaagtggcaaagatgtaaaaaaaataataaggcagaattgaactgtttgggaatggaaccagtacagacagctaactctagaaatgggaaaaagggtcatcacactgaaacggtgttcaaccgggttttgccagggcctattgcaccagagagcagcaagaagcgggcccgtaggatgcgaccagacctttctaagatgatggccctcatgcagggtggaagcactgggtctctatctctgcataacacgttccaacacagcagtagtggcctacagtctgtgtcatctttgggtcacagcagtgccacttctgcatctttgccttttatgccatttgtgatgggtggtgcacaatcatcccctcatgtagactccagcaccatgcttcatcaccaccaccaccacccccacccccaccatcaccaccatcaccatccaggcttgagagcccctggctacccctcttcaccagtgactaccgcctctggtactaccttgcggttgccaccactgcaacctgaggaggatgacgatgaggatgaagaagatgatgatgacttatctcagggctatgatagctcagaaagggacttctcactcattgatgatcctatgatgccagctaactcagactccagtgaagatgctgatgactgaagccccagcatgggccccattgcttgggcggctgctgtattttcatttactctggcccttggactatggaaacgtgggaggggcaggggagatgtggggaagtccaggactccaggaggtgaaaaggaaaaaaaaaaaaaaaaaaa

SEQ ID NO: 3155 - protein, 2302 aa, Homo sapiens
MKGESKRITLVLQQPQSGGPQGHRHVVLGSLPGKIVLQGNQLAALTQAKNAQGQPAKVVTIQLQVQQPQQKIQIVPQPPSSQPQPQQPPSTQPVTLSSVQQAQIMGPGQSPGQRLSVPVKVVLQPQAGSSQGASSGLSVVKVLSASEVAALSSPASSAPHSGGKTGMEENRRLEHQKKQEKANRIVAEAIARARARGEQNIPRVLNEDELPSVRPEEEGEKKRRKKSAGERLKEEKPKKSKTSGASKTKGKSKLNTITPVVGKKRKRNTSSDNSDVEVMPAQSPREDEESSIQKRRSNRQVKRKKYTEDLDIKIADDEEEEEVDVTGPIKPEPILPEPVQEPDGETLPSMQFFVENPSEEDAAIVDKVLSMRIVKKELPSGQYTEAEEFFVKYKNYSYLHCEWATISQLEKDKRIHQKLKRFKTKMAQMRHFFHEDEEPFNPDYVEVDRILDESHSIDKDNGEPVIYYLVKWCSLPYEDSTWELKEDVDEGKIREFKRIQSRHPELKRVNRPQASAWKKLELSHEYKNRNQLREYQLEGVNWLLFNWYNRQNCILADEMGLGKTIQSIAFLQEVYNVGIHGPFLVIAPLSTITNWEREFNTWTEMNTIVYHGSLASRQMIQQYEMYCKDSRGRLIPGAYKFDALITTFEMILSDCPELREIEWRCVIIDEAHRLKNRNCKLLDSLKHMDLEHKVLLTGTPLQNTVEELFSLLHFLEPSQFPSESEFLKNFGDLKTEEQVQKLQAILKPMMLRRLKEDVEKNLAPKQETIIEVELTNIQKKYYRAILEKNFSFLSKGAGHTNMPNLLNTMMELRKCCNHPYLINGAEEKILTEFREACHIIPHDFHLQAMVRSAGKLVLIDKLLPKLKAGGHKVLIFSQMVRCLDILEDYLIQRRYLYERIDGRVRGNLRQAAIDRFSKPDSDRFVFLLCTRAGGLGINLTAADTCIIFDSDWNPQNDLQAQARCHRIGQSKAVKVYRLITRNSYEREMFDKASLKLGLDKAVLQSMSGRDGNITGIQQFSKKEIEDLLRKGAYAAIMEEDDEGSKFCEEDIDQILLRRTTTITIESEGKGSTFAKASFVASENRTDISLDDPNFWQKWAKKADLDMDLLNSKNNLVIDTPRVRKQTRHFSTLKDDDLVEFSDLESEDDERPRSRRHDRHHAYGRTDCFRVEKHLLVYGWGRWRDILSHGRFKRRMTERDVETICRAILVYCLLHYRGDENIKGFIWDLISPAENGKTKELQNHSGLSIPVPRGRKGKKVKSQSTFDIHKADWIRKYNPDTLFQDESYKKHLKHQCNKVLLRVRMLYYLRQEVIGDQAEKVLGGAIASEIDIWFPVVDQLEVPTTWWDSEADKSLLIGVFKHGYEKYNTMRADPALCFLEKAGRPDDKAIAAEHRVLDNFSDIVEGVDFDKDCEDPEYKPLQGPPKDQDDEGDPLMMMDEEISVIDGDEAQVTQQPGHLFWPPGSALTARLRRLVTAYQRSYKREQMKIEAAERGDRRRRRCEAAFKLKEIARREKQQRWTRREQTDFYRVVSTFGVEYDPDTMQFHWDRFRTFARLDKKTDESLTKYFHGFVAMCRQVCRLPPAAGDEPPDPNLFIEPITEERASRTLYRIELLRRLREQVLCHPLLEDRLALCQPPGPELPKWWEPVRHDGELLRGAARHGVSQTDCNIMQDPDFSFLAARMNYMQNHQAGAPAPSLSRCSTPLLHQQYTSRTASPLPLRPDAPVEKSPEETATQVPSLESLTLKLEHEVVARSRPTPQDYEMRVSPSDTTPLVSRSVPPVKLEDEDDSDSELDLSKLSPSSSSSSSSSSSSSSTDESEDEKEEKLTDQSRSKLYDEESLLSLTMSQDGFPNEDGEQMTPELLLLQERQRASEWPKDRVLINRIDLVCQAVLSGKWPSSRRSQEMVTGGILGPGNHLLDSPSLTPGEYGDSPVPTPRSSSAASMAEEEASAVSTAAAQFTKLRRGMDEKEFTVQIKDEEGLKLTFQKHKLMANGVMGDGHPLFHKKKGNRKKLVELEVECMEEPNHLDVDLETRIPVINKVDGTLLVGEDAPRRAELEMWLQGHPEFAVDPRFLAYMEDRRKQKWQRCKKNNKAELNCLGMEPVQTANSRNGKKGHHTETVFNRVLPGPIAPESSKKRARRMRPDLSKMMALMQGGSTGSLSLHNTFQHSSSGLQSVSSLGHSSATSASLPFMPFVMGGAQSSPHVDSSTMLHHHHHHPHPHHHHHHHPGLRAPGYPSSPVTTASGTTLRLPPLQPEEDDDEDEEDDDDLSQGYDSSERDFSLIDDPMMPANSDSSEDADD

SEQ ID NO: 3156 - DNA, 2335 bp, Homo sapiens
gaagaagatcggtagattgagtggctagagaggtcggaggtaagtggctatagaagtcgggcggacccggaacccagaggacgcgacaccatgacttatgcttatctcttcaagtatatcatcatcggagacacaggtgtggggaagtcatgtctcctcctgcagtttacagataagcggttccagcctgtccacgacctcacaataggtgtggagtttggagctcgtatggtcaacattgatggaaaacaaatcaaactgcaaatctgggatacggctgggcaagaatccttccgttctatcacccgttcctactacaggggagcagctggagcactgctggtgtacgacattacaaggcgtgaaaccttcaaccacctgacctcatggttagaggatgcccggcagcactctagttccaacatggttatcatgctcattgggaataagagtgacctagagtcccgcagggatgtgaagagagaagaaggagaggcctttgctagggagcatggacttatattcatggaaacttcagccaaaacagcctgcaatgttgaagaggccttcattaacacagccaaagaaatatataggaagatccagcagggtttatttgatgtccacaatgaggcaaatggcatcaagattgggccccaacagtcaatttcaacatcagtgggacccagtgcctcccagcggaactctcgtgacatagggtccaactctggctgctgctgaacatctggcttgaactttttttgtccttcctggaatagcttcagatcaataggcttaatgaaagaggtctttcttgctttggctgagagcagcctctttttaaagtgtgatgttttgcctttccacctaaagaccaggagagaatttgggcccttactgacctgtcctccttcagggacatgagcattccctatagattagggttcttcttatcctcctatacaaatttcttaaattgttaggaccaaagtgctggattacaggcgtgagccaccgtgcctggcctaaataaataatttcgtaagcatatacaatccacttcccactaagaattagggtcaaagacattctgcttgaacacttgcagttacctagatctagttggcctttggttgatagatcctctgcctcagaatttcattgagtttttttcttccttgcctttgggtgtctgcttgccacttcctaagaattcttgtagaaggcagtttcctctacttgcccaagagcactgagtacttctctactatcctattattagcttctatctcttagtgtaacttcaaaacttttaagagcagtgaagttggtcagggacatgtggccacttattattacctaaagaaaacatttgttccctgttcattttattttaggggccagatctaacattgtagtgtctttcaccagatagacttctactgtttcatcaaactcccttcttaactagacctagactttctactccaatcaggctaatctacttactgaatgtgacatatttattcctagttccatacctttgcacatgccctactctccactaattatacttaaaagtccaaaaattttttctttagtaacagacttaggtactgctaagcagttattaacacaatattccttagttttcatatgttggttattcatatgtctatttatatgtatatttatttttatgtatgttactatgtaaatatggtttgcagttgtttttgtgtggaatcttgtctttccgtataagttgtaagctccttgagagcaggatccatgtcattcctttatttttataaattattccccctatcattcctttacagtgcctagtgctgctcattatgtgttcattgaatttgactgacatagttaaaaacttaaggtttattttagactttcaaggaaacaaaagactttagagtcctctctctgtaattctgccccactcatttgtttaccctgggttttatacatttctcttccttctcccctcccacctttccctggctttttgcctccattccatgaggcatacagtaaggctgcctgctagtaagcagtcacataagtgggtacctatccagccattctcttttcagagcatataatactatcttagccaaacttgcctttgcttcactcatcatgcagccttctgggttggttgctatatatatcttttttccttgatgtcccattctcttccacagccctgaggtcttacgaatttttctactttctttttgctgttgatgaattgtttcattattaaatatatgcatgtaccaaaaaaaaaaaaaaaaaaaaaaaaaaaaaa

SEQ ID NO: 3157 - protein, 216 aa, Homo sapiens
MTYAYLFKYIIIGDTGVGKSCLLLQFTDKRFQPVHDLTIGVEFGARMVNIDGKQIKLQIWDTAGQESFRSITRSYYRGAAGALLVYDITRRETFNHLTSWLEDARQHSSSNMVIMLIGNKSDLESRRDVKREEGEAFAREHGLIFMETSAKTACNVEEAFINTAKEIYRKIQQGLFDVHNEANGIKIGPQQSISTSVGPSASQRNSRDIGSNSGCC

SEQ ID NO: 3158 - DNA, 4538 bp, Homo sapiens
agcagagagaacacacgtccttgcggaagtgacggcagttccgagtccagtgggggcggtgggagcgatgagggtctgagacggtgggagcggttgtgtgaagatggagtttcccggaggaaatgacaattacctgacgatcacagggccttcgcaccccttcctgtcaggggccgagacattccatacaccaagcttgggtgatgaggaatttgaaatcccacctatctccttggattctgatccctcattggctgtctcagatgtggttggccactttgatgacctggcagacccttcctcttcacaggatggcagtttttcagcccagtatggggtccagacattggacatgcctgtgggcatgacccatggcttgatggagcagggcggggggctcctgagtgggggcttgaccatggacttggaccactctataggaactcagtatagtgccaacccacctgttacaattgatgtaccaatgacagacatgacatctggcttgatggggcatagccagttgaccaccattgatcagtcagaactgagttcccagctgggtttgagcctagggggtggcaccatcctgccacctgcccagtcacctgaagatcgtctttcaaccaccccttcacctactagttcacttcacgaggatggtgttgaggatttccggaggcaacttcccagccagaagacagtcgtggtggaagcagggaaaaagcagaaggccccaaagaagagaaaaaagaaagatcctaatgaacctcagaaaccagtttcagcatatgctttattctttcgtgatacacaggctgccatcaagggacagaatcctaatgccacttttggtgaggtttcaaaaattgtggcctccatgtgggatagtcttggagaggagcaaaaacaggtatataagaggaaaactgaggctgccaagaaagagtatctgaaggcactggctgcttacaaagacaaccaggagtgtcaggccactgtggaaacagtggaattggatccagcaccaccatcacaaactccttctccacctcctatggctactgttgacccagcatctccagcaccagcttcaatagagccccctgccctgtccccatccattgttgttaactccaccctttcatcctatgtggcaaaccaggcatcttctggagctgggggtcagcccaatatcaccaagttgattattaccaaacaaatgttgccctcttctattactatgtctcaaggagggatggttactgttatcccagccacagtggtgacctcccgggggctccaactaggccaaaccagtacagctactatccagcccagtcaacaagcccagattgtcactcggtcagtgttgcaggcagcagcagctgctgctgctgctgcttctatgcaactgcctccaccccgactacagccccctccattacaacagatgccacagcccccgactcagcagcaagttaccattctgcagcagcctcctccactccaggccatgcaacagcctccacctcagaaagttcgaatcaatttacagcaacagcctcctcctctgcagatcaagagtgtgcctctacccactttgaaaatgcagactaccttagtcccaccaactgtggaaagtagtcctgagcggcctatgaacaacagccctgaggcccatacagtggaggcaccttctcctgagactatctgtgagatgatcacagatgtagttcctgaggttgagtctccttctcagatggatgttgaattggtgagtgggtctcctgtggcactctcaccccagcctcgatgtgtgaggtctggttgtgagaaccctcccattgtgagtaaggactgggacaatgaatactgcagcaatgagtgtgtggtgaagcactgcagggatgtattcttggcctgggtagcctctagaaattcaaacacagtggtgtttgtgaaatagtccttcctgttctccaagccagtgaagagttatctgctgggaaagtgtccaagagcctgtttttgaaacacaagctgggcttctggtagtgcctcatcacaacccatgatggctgttcatgtttcaccccttttcttccttcagcagaggccaggctatggagcagggccactgaatttgctgtaatctggagatgctttttactttcaaccataagcggtaatagcagaggaaagggtgaagggagtctgggcaagcaaagcatagagatggtggggtggtggtggggttgaagaaacttgttggtataattgtcataggacttgcctaaaatattattaaaattacgggagtgtactcagctttgagcctaggagaaaatgccactgtgtgcatccattttaaagggttccctcataaaaaaatgttattccccattatcacatcagtacactgctttgaaaacaaaacttttcaacatgggcatactgggctacatggaaaatgacatcacccaggagtgatttctctttatatatattatttctgcagttaccatccttatctgagttatcacagttcatgaatctaagaggcggaactctacatcattagtaagaggttccaccaaagtctaaagttgtattcacttgtgtttgatgaactatctttaaaagaccataggtctatcattatttcttagacataatctaaagaaaaacagactagagaagccacctggttgtaacagaataagcagaagtttacagcatgatagtccaagtggtgataactttaaataaaactcaaatttttactgtttgtagacaggaatgctgtcctagagaacctcctcctcaaccagctacgtacatagttttatcctatgcattcctgttttctgtgttttttgttttttttttttgagacagagtctcgctctgtcacccaggctggagtgcagtggtgcgacctcagctcactgaaacctctgcctcccgggttcaagcgattctcctgcatcagcctcccgagtagctaggattacaggcgcccgccactacgcccagctaatttgtggtatttttagtagagacagggtttcaccatgttggccaggctggtctcgaactcctgacctcatgatccgcccgccttgacctcccaaagtgctgggattacaggcatgagccaccgcacccagcctgcattcctgtttttttaatggttttggagggtagcagtagagatggggtctcactatgttgcccagtctagtcttgaactcctgggctacagttaccctcctacctcggcttcccaaagtgctcggattacaggtgtgagccactgtgcctagcctataatgatcattttaatgtttcccatgcactcatttagtttgaaccttcacagcaacccaatgaggtaatactcccatttcacatataatactgagagatgagttgcacaagattatacactgttaagtagcagagccagaatggacttcagaatcccaactacaatacaaatgtttatttaaataaagaagaaagctattgtacaaatatcactcttcaggtttagcttacagagccatggctatggattcttagctctgtaaggaagtgcttctataaattcttaggtttagagatgataccatctgggtacctttgcttgaaccgtgcaaccacatctgggtctagtaggtggatcccatccagttggtttccaagggtgatcctgaaacagtgtaaaaggaggggcaaaccagaaatcctggaattagagggtttaatattgttaaaaaatgcataccaaatgaagactgcctatcatcatatcaaatatgccaattctaaaaagagcttaacattagaatagtatatggtagaattactagttcagaattggcatagattctggtgttaaaatagactggatctgtattatctgagggttagtaactaatgcttagccaggcctgcttcacagagttgctaccagggagtattctttggataagcaaaatgctagcagcatgtgttttaagctctgttaaggggtgaaagatgtaattattgacagattaaatagataacttcgtaaccaccagggggcagattcaatacatcacagaatggctgaggaagatccttgggttgtgaagagagtagaaaccctagggagcagtgcttttgggtcctagaacctgttgagtttctaatgaatatttgtagaatctcataaaacagtttaaatacaagcttaagtggcttatgaatcctgtgaagctcatttatggactagtgtaaaacaatgtgaagctctactaagttctgtccttaatcataaataatagccccttgaggactagcctgttctctggtcaccttaccagttgggttgcacattgtgtggtcgtccaaataactcaatcttgcgagtgccaggagatagtctttcaatcatgccatagatttcatctggtttatgactggtggaacgaacctaggaaataaaaactagctgctttttaagttacacaaaaaaaaaaaaaaaa

SEQ ID NO: 3159 - protein, 621 aa, Homo sapiens
MEFPGGNDNYLTITGPSHPFLSGAETFHTPSLGDEEFEIPPISLDSDPSLAVSDVVGHFDDLADPSSSQDGSFSAQYGVQTLDMPVGMTHGLMEQGGGLLSGGLTMDLDHSIGTQYSANPPVTIDVPMTDMTSGLMGHSQLTTIDQSELSSQLGLSLGGGTILPPAQSPEDRLSTTPSPTSSLHEDGVEDFRRQLPSQKTVVVEAGKKQKAPKKRKKKDPNEPQKPVSAYALFFRDTQAAIKGQNPNATFGEVSKIVASMWDSLGEEQKQVYKRKTEAAKKEYLKALAAYKDNQECQATVETVELDPAPPSQTPSPPPMATVDPASPAPASIEPPALSPSIVVNSTLSSYVANQASSGAGGQPNITKLIITKQMLPSSITMSQGGMVTVIPATVVTSRGLQLGQTSTATIQPSQQAQIVTRSVLQAAAAAAAAASMQLPPPRLQPPPLQQMPQPPTQQQVTILQQPPPLQAMQQPPPQKVRINLQQQPPPLQIKSVPLPTLKMQTTLVPPTVESSPERPMNNSPEAHTVEAPSPETICEMITDVVPEVESPSQMDVELVSGSPVALSPQPRCVRSGCENPPIVSKDWDNEYCSNECVVKHCRDVFLAWVASRNSNTVVFVK

SEQ ID NO: 3160 - DNA, 699 bp, Homo sapiens
catccggtgtggtcgacgggtcctccaagagtttggggcgcggaccggagtaccttgcgtgcagttatgtcggcgtcggtagtgtctgtcatttcgcggttcttagaagagtacttgagctccactccgcagcgtctgaagttgctggacgcgtacctgctgtatatactgctgaccggggcgctgcagttcggttactgtctcctcgtggggaccttccccttcaactcttttctctcgggcttcatctcttgtgtggggagtttcatcctagcggtttgcctgagaatacagatcaacccacagaacaaagcggatttccaaggcatctccccagagcgagcctttgctgattttctctttgccagcaccatcctgcaccttgttgtcatgaactttgttggctgaatcattctcatttacttaattgaggagtaggagactaaaagaatgttcactctttgaatttcctggataagagttctggagatggcagcttattggacacatggattttcttcagatttgacacttactgctagctctgctttttatgacaggagaaaagcccagagttcactgtgtgtcagaacaactttctaacaaacatttattaatccagcctctgcctttcattaaatgtaaccttttgctttccaaattaaagaactccatgccactcctcaaaaaaaaaaaaaa

SEQ ID NO: 3161 - protein, 113 aa, Homo sapiens
MSASVVSVISRFLEEYLSSTPQRLKLLDAYLLYILLTGALQFGYCLLVGTFPFNSFLSGFISCVGSFILAVCLRIQINPQNKADFQGISPERAFADFLFASTILHLVVMNFVG

SEQ ID NO: 3162 - DNA, 2543 bp, Homo sapiens
tcccgggtcagctggtgctggcgtcaggcgctgggcgggctcgccaggacctggcaaggcttgtttactatggccgatgatctggagcagcagtctcaaggctggctgagtagctggctgcccacgtggcgccccacttccatgtctcagctgaagaatgtggaagccaggatcctccagtgtctccagaataagttcctggccagatatgtatccctcccaaaccagaataagatctggacggtgactgtgagccccgagcaaaacgaccgcacccccttggtgatggtgcatggttttgggggcggcgtgggtctctggatcctcaacatggactcactgagtgcccgccgcacactgcacaccttcgatctgcttggcttcgggcgaagctcaaggccagcattcccaagggacccggagggggctgaggatgagtttgtgacatcgatagagacatggcgggagaccatggggatccccagcatgatcctcctggggcacagtttgggaggattcctggccacttcttactcaatcaagtaccctgatagagttaaacacctcatcctggtggacccatggggctttcccctccgaccaactaaccccagtgagatccgtgcacccccagcctgggtcaaagccgtggcatctgtcctaggacgttccaatccattggctgttcttcgagtagctgggccctgggggcctggtctggtgcagcgattccggccggacttcaaacgcaagtttgcagacttctttgaagatgataccatatcagagtatatttaccactgcaacgcacagaatcccagtggtgagacagcattcaaagccatgatggagtcctttggctgggcccggcgccctatgctggagcgaattcacttgattcgaaaagatgtgcctatcactatgatctacgggtccgacacctggatagataccagtacgggaaaaaaggtgaagatgcagcggccggattcctatgtccgagacatggagattaagggtgcctcccaccatgtctatgctgaccagccacacatcttcaatgctgtggtggaggagatctgcgactcagttgattgagctgctctctgaagaggaagaggagaaagccagagagtcactcttacctccctgtctgcttactcacccactctgtcctttcctcaccaactaacatgtgccagccaggcagagtcttgtgctgttcccagaacaggacgacagtgaaaagaacactcttgaccctacactgaaggctgaaggcagaagccacaagaggccttgagtgccacccccagggaagaacataaagggttgcacaatgccacccatccactccttgccaagtgttacccagatggtggaggatgtgaagggattgcaccaagccacattcactctctctgtggcctttcttcctctgggcaaagaagggcttccagtggcctttcctcactctgtagtgtttgtggggataggttccatgcaagaacaccttcctcctccatcccccacttcaccccatcccataccagttccatccagggtctgcttaactgccaagagcaggtcctggagttcccttcacctgcagagtccttttcatgacctaggaggtcttattcaaagccctcattgacagaggaggaaacaggccaaggcaggacatggctggaccatggtgatacagctctgtgtgattcaagttctggcagagcttgtaaggctagagcccaggtctgccgacaccctgtgcttgttgcacacttgatttgctaaggctggagacaggcaccattgccatggggctggtcctagtcactggccgaggataagcccgtccctgtcccacattctagccccactatgcgggggtgctgttgtcctgcctgtgtctcatccccggctgcctaagctagggacactcaagtgcttccttccttgccccatcttcctcccaactggaggcctctgagcctcccctgtgccttgggccctgaagccccatatgtagtatagagcaaaggtggctcctggtgaagagagggtggaaaggcccttcagccccagggccatgtctgggttctccatgcccatcagtctctgcagtttctctacctgcccccagagctgaggccatctgcaagcccctgcccatggcccaatggggagcctccagccacaagttccctgtccttatcagccactgggtggttcccactgcatgaccctctatccctgccatctgtccccatggtttccagctcaatccacccctgacccatctgtcagctttttcccagggagccgtttcaggggttctgggcagtaggctgggcctggcctcagaacctggtggctcctgcctgctccttcacttttgtaaaaccatccccttcaccagaatggtattaactcctggtgctttgtactactggtccagctgccctgggctccttttctatattaataaagaaacgagtaaaaattaaaaaaaaaaaaaaaaaaaaaaaaaaaaaaaaaaa

SEQ ID NO: 3163 - protein, 342 aa, Homo sapiens
MADDLEQQSQGWLSSWLPTWRPTSMSQLKNVEARILQCLQNKFLARYVSLPNQNKIWTVTVSPEQNDRTPLVMVHGFGGGVGLWILNMDSLSARRTLHTFDLLGFGRSSRPAFPRDPEGAEDEFVTSIETWRETMGIPSMILLGHSLGGFLATSYSIKYPDRVKHLILVDPWGFPLRPTNPSEIRAPPAWVKAVASVLGRSNPLAVLRVAGPWGPGLVQRFRPDFKRKFADFFEDDTISEYIYHCNAQNPSGETAFKAMMESFGWARRPMLERIHLIRKDVPITMIYGSDTWIDTSTGKKVKMQRPDSYVRDMEIKGASHHVYADQPHIFNAVVEEICDSVD

SEQ ID NO: 3164 - DNA, 8192 bp, Homo sapiens
cggacgcccggcgagtggcggaaagcgagaccccggcgccgagtgaggtcggccaggctgctgccgacttccccgctggcccctttgttcccctcccggggccctgccggcggcggttcccggttgcccgcgccagagcctcaggccggctccttttgcccttgagaagggttcgctgccaggccttcgagttccgggcgcagctcccgggagagccggcgccctgcctggcccggcggcctcctctcgggcacgaaggcttgctgctgcttctccagaacttcccttcctcgtagacacagcaaagagacttttaaaaaaccatggcagatgtggacccagatacattgctggaatggctacagatgggacagggagatgaaagggacatgcaactaatagcccttgaacagctatgcatgctgcttttgatgtctgacaacgtggatcgttgttttgaaacatgtcctcctcgcactttcttaccagccctttgcaaaatttttcttgatgaaagtgctccagacaatgtattagaggtgacagcccgtgccataacatactacctggatgtatctgcggaatgtacccgaaggattgttggggtagatggagctataaaagcactttgtaatcgtttggttgtagttgaacttaacaacaggactagcagagacttagctgaacagtgtgtaaaggtattagaactgatatgtactcgtgagtcaggagcagtctttgaggctggtggtttgaattgtgtgcttaccttcattcgtgacagtggacatctagttcataaagacaccttgcactctgctatggctgtggtatcaagactctgtggcaaaatggagcctcaagattcttctttagaaatttgtgtagaatctctgtctagtttattaaagcatgaagatcatcaggtttcagatggagctctgcgatgctttgcatcactggctgaccgatttacccgtcgtggtgttgacccagctccattagccaagcatggattaactgaggagctgttatctcgaatggctgctgctggtggtactgtttcaggaccatcatcagcatgcaaaccaggtcgcagcaccacaggagctccatccaccactgcagattccaaattgagtaatcaggtgtcaacaattgtaagtctgctctcaacactttgcagaggctctccggtagtaacacatgatcttctgaggtcggagcttccagattcaattgaaagtgcattgcagggtgatgaaagatgtgtgcttgatactatgcgtttggttgaccttctcttggtgctattatttgaaggacgaaaagctttgccaaagtctagtgctggatctacaggcagaatcccaggactccggagattagatagttctggggagcgctcacatcggcagcttatagattgtattcgaagtaaagataccgatgcacttatagatgcaattgacacaggagcctttgaagtaaattttatggatgatgtaggtcagactctattaaactgggcctctgcttttggaactcaggaaatggtagaatttctttgtgagagaggtgcagatgttaatagaggtcaaaggtcatcatcattacattatgctgcatgttttggaagacctcaagtagcaaagactctgttacggcatggtgcaaatccagatctgagagatgaagatgggaaaactccattagataaagctcgagaaaggggccatagtgaagtggtagctattcttcagtctccaggtgattggatgtgtccagttaataaaggagatgataagaaaaaaaaagatacaaacaaagatgaagaagaatgtaatgagcccaaaggagatccggaaatggcacccatatacttgaaaaggttattgccagtgtttgcacaaacatttcagcaaactatgctgccttcaataaggaaagcaagtcttgctctaattcgaaaaatgattcatttttgctctgaagcactgttacaagaagtttgtgattctgatgttggtcacaatttgcctacaatactagtggaaatcactgcaactgtccttgatcaagaggatgatgatgatggccacttgctagctttgcagatcataagggatatagtagataaaggtggtgatatatacaagcatcagctagccagacttggtgtaataagcaaagtgtcaacgttggcaggtccttcctctgatgatgagaatgaagaggaatcaaaaccagaaaaagaagatgaaccacaggaagatgctcaagaattgcaacaaggtaaaccatatcattggagagactggtcaatcattaggggaagggactgcttatatatttggagtgatgcagcagccttggaattatctaatggcagtaatggatggttcagatttatcttggatggaaaacttgccaccatgtattcaagtggtagtccggaaggtggatctgacagttcagaaagccgaagtgaattcttagagaagttacaaagagctcgaggccaagtaaagccatctacttcaagtcaacctatactgtcagcaccaggacccactaaacttactgtaggaaattggtcactgacatgtttgaaagaaggagaaattgctattcataattcagatggtcagcaagctacaatattgaaagaagatttacctggttttgtatttgaatctaatagaggaaccaaacattcatttactgcagaaacttccctgggttcagaatttgtgactggctggactggcaaaagaggcagaaaactgaaatctaagttagaaaaaacaaagcaaaaggtacgaactatggctcgagatttatacgatgaccattttaaagctgttgaaagcatgcctcgtggagtagtggtgacactcagaaacatagcaactcagttagagtcatcttgggaacttcatacaaatagacaatgtattgaaagtgagaacacttggagagatttaatgaagacagctttaaaaaacctaattgtacttttgaaggatgaaaacacaatttcaccatatgaaatgtgtagcagtggcttggtacaagcacttcttactgtgttaaacaatgtaagtatatttagggctacaaagcaaaaacagaatgaagtcccaaaggtgattttaagtgttttcaagactgcattcactgaaaatgaagatgacgaaagtcgaccagcagttgcgttaattcgaaagttaatagctgtactagaatctattgaacgtctacctctccatttgtatgatacaccaggatccacatataacctccagatacttacaaggagattacgatttcggttggaacgtgcacctggtgaaactgcattgattgacaggactggcagaatgttgaagatggaacctttggctacagttgaatctctggaacagtaccttttgaaaatggtagcaaaacagtggtatgattttgaccgatcttcatttgtttttgttcgaaaattaagagaaggacaaaattttatatttcggcaccagcatgattttgatgaaaatggaatcatttactggattggaacaaatgcaaaaactgcttatgaatgggtaaatccagctgcctatggacttgtagtagtaacgtcatcagaaggaagaaatctaccttatggccgcttagaagacatactaagtcgtgataattcagctttaaattgtcatagcaatgatgataagaatgcctggtttgccatagatctgggtctctgggtgataccatcagcatatacacttcgtcatgctcgtggttatggaaggtctgcactgagaaattgggttttccaggtatccaaagatggacagaactggacttctttgtatacccatgttgatgactgcagtctcaatgaaccagggtcaactgcaacttggcctcttgatccaccaaaggatgagaaacaagggtggagacatgtgagaattaaacagatggggaaaaatgccagtggacaaacacactacctctcattatctggattcgaactttatggcactgtaaatggagtatgtgaagatcagctagggaaagcagctaaagaagcagaagctaatcttagacggcagagacgtctagtacgttcccaggttctgaaatacatggttccaggagctcgtgttatcagaggcctggattggaaatggcgagatcaggatggcagcccacagggagaaggcactgtcacaggagaactacacaatggctggattgatgtcacctgggatgctggtggctcaaactcttaccgtatgggcgcagaaggaaaatttgacctcaagcttgcaccagggtacgaccctgatacagtggcatcacccaaacctgtttcatccactgtttcaggcacaacgcaatcatggagcagcttggtgaaaaacaactgtccagacaagacatctgctgctgcaggctcctcaagtagaaaaggaagcagcagttctgtgtgtagcgtggccagtagcagcgacatcagcttgggttcgaccaaaacggaacggagatcagaaattgtaatggaacacagtatagtttcaggagctgatgtccatgaaccaattgttgttctttcatctgctgaaaacgtccctcaaacagaagtagggtcatcttccagtgcaagcaccagcaccttaacagcggaaacgggaagtgaaaatgctgaaaggaagttaggccctgatagttctgttcgtactcctggggagtctagtgcaatatccatgggaattgtcagtgttagttctcctgatgttagttcagtatctgaattaactaataaagaagcagcttcacaacgacctcttagctcttcagcaagtaacagactgtcagtgagttctttgttggctgctggggcccctatgagctctagtgcaagtgtacctaacctgtcctcaagagaaacatctagcttggagagttttgtaaggagagtggcaaacatagcacggactaatgccacgaacaacatgaatctaagccgaagcagcagtgataacaacactaatactttggggaggaatgtgatgagcacagcaacttctcctcttatgggtgctcagagtttccctaatttgaccacacctggtactacatcaacagtgactatgtcaacatccagtgttactagcagcagcaatgtagctacagcaacaacagttttatcagttggtcaatctttaagtaacactttaaccaccagcctcacatcaacttccagtgagagtgacacaggtcaggaagcagaatattccttatatgatttccttgatagctgccgtgccagtactctattggctgagctcgatgatgatgaggacttacctgagccagatgaagaagatgatgagaatgaagatgacaatcaggaggaccaagaatacgaggaggttatgattctgagacgcccatccctgcaacgtcgagctggctcccgctctgatgtaacgcatcatgctgttacctcgcagctaccacaggtacctgctggagcagggagccgacctattggggagcaggaagaagaagagtacgaaactaaaggaggacgccggagaacatgggatgatgattatgtgctaaagagacagttttctgcattggttcctgcttttgatcctagacctggtcgtactaatgtccagcagacaactgatctagaaataccacccccagggacccctcattcagagctcttggaagaagtcgaatgtactccgtcacctcgattagctctcactttgaaagtaacaggtcttggaacgactcgtgaagttgaattaccactcaccaatttcagatcaaccatcttttactatgtacaaaaattgcttcaattgtcctgtaatggcaatgtgaaatcagataaacttaggcgtatttgggagcccacatacacaatcatgtacagagaaatgaaggattctgataaagaaaaggaaaatggaaaaatgggttgctggtctatagagcatgtggagcagtaccttggcactgatgaattaccaaagaatgacttgataacctacctgcagaagaatgcagacgctgctttcctgcgccactggaaattaactggcactaataaaagtattaggaaaaacagaaattgttctcagctcatagctgcatataaggatttttgtgagcatggaacaaagtctgggttaaaccagggggccatttctactcttcaaagtagtgatattcttaatttaacaaaagaacaacctcaggccaaagcaggcaatggacagaactcttgtggagtagaagatgtccttcagcttctgcgtattctatatatagttgcaagtgacccttattcaagaatatcccaggaagatggtgatgaacagcttcagtttacttttccaccagatgaattcactagcaaaaaaattacaacaaaaatattacagcagattgaggaaccattggcactggcaagtggggctctgccagactggtgtgaacaattaaccagcaaatgtccttttctaataccatttgaaactagacagctttatttcacatgtacagcatttggcgcctcaagagcaatagtatggttacagaaccgacgtgaagccactgtggagcgaacgagaaccacaagcagtgttaggcgagatgaccctggagagtttcgagttggtcgtctcaagcatgaaagagtaaaagttccacgtggcgagtcactgatggaatgggctgagaatgtcatgcaaatacatgcagatcggaaatcagttcttgaggttgaatttttaggagaagaaggaactggcttgggacccacattagagttttatgctctggtggcagcagaattccagagaactgacttgggagcttggctttgtgatgataattttccagatgatgaatctcgtcacgttgatcttggaggtggattgaaacctcctggatattatgtgcagaggtcatgtggactgttcacagcaccatttccacaggatagtgatgagcttgaaaggatcacgaaactgtttcatttccttggaattttcttggccaaatgcattcaagacaatagacttgtggacttacctatttctaaacctttttttaaacttatgtgtatgggtgacattaaaagcaatatgagtaaactgatttatgagtcacgaggtgatagagacttacactgtactgaaagtcagtctgaagcttctacagaagaaggtcatgattcactctcggtaggaagctttgaagaggattcaaaatcagaatttattcttgatccccctaaaccaaaacccccagcttggtttaatggaattttgacttgggaagactttgaattagtaaacccacacagagccagatttttaaaagaaattaaagaccttgctatcaagaggcgccaaattttaagcaacaaaggtctttctgaagatgagaagaacacaaaattacaggaactagtgctgaagaatccatcaggttctgggcctccacttagcatagaggatttaggtttaaatttccagttttgcccttcctcaagaatatatggttttacagctgtggatctcaagccaagtggtgaagatgagatgataacaatggataatgcagaagaatatgtggatttgatgtttgacttttgtatgcatacgggtattcagaaacaaatggaagcctttagagatgggtttaataaagtttttccaatggagaaattaagttccttcagccatgaagaagtccaaatgattctttgtggaaaccagtcaccatcctgggcagcagaggatattatcaattacactgaacctaagctgggttatacacgtgacagccctggtttcctgaggtttgtgagggttttatgtggcatgtcttctgatgaaaggaaagcattcttgcagtttaccactggttgttcaactctacccccaggtggactggctaacctgcatcccaggctcacggttgtacgcaaggttgatgctactgatgcaagctatccatcagtcaatacatgtgtgcattaccttaagttgcctgaatattcttccgaggagatcatgagagagcgcctgctagctgctacaatggagaaaggctttcatctcaattgagctttgaagtgcaatgggagacatcagaga

SEQ ID NO: 3165 - protein, 2612 aa, Homo sapiens
MADVDPDTLLEWLQMGQGDERDMQLIALEQLCMLLLMSDNVDRCFETCPPRTFLPALCKIFLDESAPDNVLEVTARAITYYLDVSAECTRRIVGVDGAIKALCNRLVVVELNNRTSRDLAEQCVKVLELICTRESGAVFEAGGLNCVLTFIRDSGHLVHKDTLHSAMAVVSRLCGKMEPQDSSLEICVESLSSLLKHEDHQVSDGALRCFASLADRFTRRGVDPAPLAKHGLTEELLSRMAAAGGTVSGPSSACKPGRSTTGAPSTTADSKLSNQVSTIVSLLSTLCRGSPVVTHDLLRSELPDSIESALQGDERCVLDTMRLVDLLLVLLFEGRKALPKSSAGSTGRIPGLRRLDSSGERSHRQLIDCIRSKDTDALIDAIDTGAFEVNFMDDVGQTLLNWASAFGTQEMVEFLCERGADVNRGQRSSSLHYAACFGRPQVAKTLLRHGANPDLRDEDGKTPLDKARERGHSEVVAILQSPGDWMCPVNKGDDKKKKDTNKDEEECNEPKGDPEMAPIYLKRLLPVFAQTFQQTMLPSIRKASLALIRKMIHFCSEALLQEVCDSDVGHNLPTILVEITATVLDQEDDDDGHLLALQIIRDIVDKGGDIYKHQLARLGVISKVSTLAGPSSDDENEEESKPEKEDEPQEDAQELQQGKPYHWRDWSIIRGRDCLYIWSDAAALELSNGSNGWFRFILDGKLATMYSSGSPEGGSDSSESRSEFLEKLQRARGQVKPSTSSQPILSAPGPTKLTVGNWSLTCLKEGEIAIHNSDGQQATILKEDLPGFVFESNRGTKHSFTAETSLGSEFVTGWTGKRGRKLKSKLEKTKQKVRTMARDLYDDHFKAVESMPRGVVVTLRNIATQLESSWELHTNRQCIESENTWRDLMKTALKNLIVLLKDENTISPYEMCSSGLVQALLTVLNNVSIFRATKQKQNEVPKVILSVFKTAFTENEDDESRPAVALIRKLIAVLESIERLPLHLYDTPGSTYNLQILTRRLRFRLERAPGETALIDRTGRMLKMEPLATVESLEQYLLKMVAKQWYDFDRSSFVFVRKLREGQNFIFRHQHDFDENGIIYWIGTNAKTAYEWVNPAAYGLVVVTSSEGRNLPYGRLEDILSRDNSALNCHSNDDKNAWFAIDLGLWVIPSAYTLRHARGYGRSALRNWVFQVSKDGQNWTSLYTHVDDCSLNEPGSTATWPLDPPKDEKQGWRHVRIKQMGKNASGQTHYLSLSGFELYGTVNGVCEDQLGKAAKEAEANLRRQRRLVRSQVLKYMVPGARVIRGLDWKWRDQDGSPQGEGTVTGELHNGWIDVTWDAGGSNSYRMGAEGKFDLKLAPGYDPDTVASPKPVSSTVSGTTQSWSSLVKNNCPDKTSAAAGSSSRKGSSSSVCSVASSSDISLGSTKTERRSEIVMEHSIVSGADVHEPIVVLSSAENVPQTEVGSSSSASTSTLTAETGSENAERKLGPDSSVRTPGESSAISMGIVSVSSPDVSSVSELTNKEAASQRPLSSSASNRLSVSSLLAAGAPMSSSASVPNLSSRETSSLESFVRRVANIARTNATNNMNLSRSSSDNNTNTLGRNVMSTATSPLMGAQSFPNLTTPGTTSTVTMSTSSVTSSSNVATATTVLSVGQSLSNTLTTSLTSTSSESDTGQEAEYSLYDFLDSCRASTLLAELDDDEDLPEPDEEDDENEDDNQEDQEYEEVMILRRPSLQRRAGSRSDVTHHAVTSQLPQVPAGAGSRPIGEQEEEEYETKGGRRRTWDDDYVLKRQFSALVPAFDPRPGRTNVQQTTDLEIPPPGTPHSELLEEVECTPSPRLALTLKVTGLGTTREVELPLTNFRSTIFYYVQKLLQLSCNGNVKSDKLRRIWEPTYTIMYREMKDSDKEKENGKMGCWSIEHVEQYLGTDELPKNDLITYLQKNADAAFLRHWKLTGTNKSIRKNRNCSQLIAAYKDFCEHGTKSGLNQGAISTLQSSDILNLTKEQPQAKAGNGQNSCGVEDVLQLLRILYIVASDPYSRISQEDGDEQLQFTFPPDEFTSKKITTKILQQIEEPLALASGALPDWCEQLTSKCPFLIPFETRQLYFTCTAFGASRAIVWLQNRREATVERTRTTSSVRRDDPGEFRVGRLKHERVKVPRGESLMEWAENVMQIHADRKSVLEVEFLGEEGTGLGPTLEFYALVAAEFQRTDLGAWLCDDNFPDDESRHVDLGGGLKPPGYYVQRSCGLFTAPFPQDSDELERITKLFHFLGIFLAKCIQDNRLVDLPISKPFFKLMCMGDIKSNMSKLIYESRGDRDLHCTESQSEASTEEGHDSLSVGSFEEDSKSEFILDPPKPKPPAWFNGILTWEDFELVNPHRARFLKEIKDLAIKRRQILSNKGLSEDEKNTKLQELVLKNPSGSGPPLSIEDLGLNFQFCPSSRIYGFTAVDLKPSGEDEMITMDNAEEYVDLMFDFCMHTGIQKQMEAFRDGFNKVFPMEKLSSFSHEEVQMILCGNQSPSWAAEDIINYTEPKLGYTRDSPGFLRFVRVLCGMSSDERKAFLQFTTGCSTLPPGGLANLHPRLTVVRKVDATDASYPSVNTCVHYLKLPEYSSEEIMRERLLAATMEKGFHLN

SEQ ID NO: 3166 - DNA, 4552 bp, Homo sapiens
cggctgcaggctgggagggagaagtgctacgcctttgcaggttggcgaagtggttccaggctacccggctagtctggcacggccccgtcttctgcctcctcctccgtcgcgtggcggcgggaactgttggccgcgcggcctcgggaacggcccaggtccccgcccgcaggtcccgggcagataacatagatcatcagtagaaaacttcttgaagttgttcaagaaaaatttgaaagtagcaaaatagaaaataaagaattaacagcagatacagaggacagcatggaagtgttgtcttaggaaacagaacacagcagtgaaaaaacagacaaaatccgctcagatacaactgcagctgataatgttttccggcttcaatgtctttagagttgggatctcttttgtcataatgtgcattttttacatgccaacagtaaactctttaccagaactgagtcctcagaaatattttagtacattgcaaccaggaaaagcctctttagcttatttttgtcaagctgattccccaagaacatctgtatttcttgaagaactgaatgaggctgttagacctctgcaggactatggaatttcagttgccaaggttaattgtgtcaaagaagaaatatcaagatactgtggaaaagaaaaggatttgatgaaagcatatttattcaagggcaacatattgctcagagaattccctactgacaccttgtttgatgtgaatgccattgtcgcccatgttctctttgctcttctttttagtgaagtgaaatatattaccaacctggaagaccttcagaacatagaaaatgctctgaaaggaaaagcaaatattatattctcatatgtaagagccattggaataccagagcacagagcagtcatggaagccggttttgtgtatgggactacataccaatttgtcttaaccacagaaattgcccttttggaaagtattggctctgaggatgtggaatatgcacatctctacttttttcattgtaaactagtcttggacttgacccagcaatgtagaagaacactaatggaacagccattgactacactgaacattcacctgtttattaagacaatgaaagcacctctgttgactgaagttgctgaagatcctcaacaagtttcaactgtccatctccaactgggcttaccactggtttttattgttagccaacaggctacttatgaagctgatagaagaactgcagaatgggttgcttggcgtcttctgggaaaagcaggagttctactcttgttaagggactctttggaagtgaacattcctcaagatgctaatgtggtcttcaaaagagcagaagagggagttccagtggaatttttggtattacatgatgttgatttaataatatctcatgtggaaaataatatgcacattgaggaaatacaagaagatgaagacaatgacatggaaggtccagatatagatgttcaggatgatgaagtggcagaaactgttttcagagataggaagagaaaattacctttggaacttacagtggaactaacagaagaaacatttaatgcaacagtgatggcttctgacagcatagtactcttctatgctggttggcaagcagtatccatggcatttttgcaatcctatattgatgtggcagttaaactgaaaggcacatctactatgcttcttactagaataaactgtgcagattggtctgatgtatgtactaagcaaaatgttactgaatttcctatcataaagatgtacaagaaaggcgagaacccagtatcttatgctggaatgttaggaaccaaagatctcctaaaatttatccagctcaacaggatttcatatccagtgaatataacatcgatccaagaagcagaagaatatttaagtggggaattatataaagacctcatcttgtattctagtgtgtcagtattgggactatttagtccaaccatgaaaacagcaaaagaagattttagtgaagcaggaaactacctaaaaggatatgttatcactggaatttattctgaagaagatgttttgctactgtcaaccaaatatgctgcaagtcttccagccctgctgcttgccagacacacagaaggcaaaatagagagcatcccactagctagcacacatgcacaagacatagttcaaataataacagatgcactactggaaatgtttccggaaatcactgtggaaaatcttcccagttatttcagacttcagaaaccattattgattttgttcagtgatggcactgtaaatcctcaatataaaaaagcaatattgacactggtaaagcagaaatacttggattcatttactccatgctggttaaatctaaagaatactccagtggggagaggaatcttgcgggcatattttgatcctctgcctccccttcctcttcttgttttggtgaatctgcattcaggtggccaagtatttgcatttccttcagaccaggctataattgaagaaaaccttgtattgtggctgaagaaattagaagcaggactagaaaatcatatcacaattttacctgctcaagaatggaaacctcctcttccagcttatgattttctaagtatgatagatgccgcaacatctcaacgtggcactaggaaagttcccaagtgtatgaaagaaacagatgtgcaggagaatgataaggaacaacatgaagataaatcggcagtcagaaaagaaccgattgaaactctgagaataaagcattggaatagaagtaattggtttaaagaagcagaaaaatcatttagacgtgataaagagttaggatgctcaaaagtgaactaattttatagggctgtggtttccaaaatttttttggcatgatagacttaatttatttccttaaagaataatattaaatcatttcaagtttgcagactagtgccatccaatagaattataatataagtcacatattttatttaaaattttctagtaactacattaaacaaagtaaaagtgagcagggcaaaataattttgatattacttttcacccagtagtatacccaaaatagcgaaatatagaaattattaatgagatattttacatccttttttgtaccaagtcttctaaatgcagtacatattttatacttactgcatttcttacttccgagtagccatatttcaagtgttcattgccacatgtggcctgtgactactgtattggacagttcagtactagacaaaaactagcataattaacttagttctagccatgatttctatttggattaaaattaaactctaatcacagttaactccacagtgcattcatgcagctgacagttatatttgttttattggagtcatgatattaaaatcagcgtttgtcaacctcaggggatatttagcaattgtcgggagacatttttgatgtcatgactagggcagttattgacatttagtgagtagaggccatggatcctgctaaataacctgcattggacagcgccccacaacaaagaattatcctgcccgaaatggtagtcgtgccaaggctgagtaaccttgtgttaaaagtaacctgtggcagactaggtttccagaatttcctggttctgctcacgtatcatgtttgaaaaaattttggctattaaagatatgtattagatggtcttatcctgattattacctggatacaacttgatcttttctaatattttcagaaagtgatgggataaccctagaagaggactcagaatgatatttatattttaagtgagtcttaaaacctcctcttatttctacaagttatatggctaaatttcagattgaacagggattcagcattctgccatctcctcatggaaagagaggctccctcatctgaagcgtctctgaaatctacccttgcaagcttcagacaaatcagttgatctccctgagccacacggcctcattctgtgagggagggaaagattagccaaagagttaattttcattccaaatcacttagctgttagactgatctgtttgtagcagttgtttgtctcatttttgctctgtgcattttttgagacatttgttgagaatattctatttggtgctctactgtatttttctttttaatatctacttgatatcttgttctttaaattttcttcacatatggtttgcctgatacaactgatttttataactgaaatttaaggaatctaacagctaaaactcagtaagtgcatctatttccttataacatagacccgttgctactctcagcaccctctcctcaattttttttcctgtagcatgtgatgcctgattaaactcattttcatttgcttttatttctaatatgggaacaatgagagtgaactctaaatataggttgtagtaataaaacatcattagcctaattattagaaaatgctaattaagtaccagcacatagaaacatgaaattgcttagtcattgtacctttgtcagcaattttgacagtcattaatgtttgtcataattttaaataaagtgtctgggtttcagaataccttc

SEQ ID NO: 3167 - protein, 825 aa, Homo sapiens
MFSGFNVFRVGISFVIMCIFYMPTVNSLPELSPQKYFSTLQPGKASLAYFCQADSPRTSVFLEELNEAVRPLQDYGISVAKVNCVKEEISRYCGKEKDLMKAYLFKGNILLREFPTDTLFDVNAIVAHVLFALLFSEVKYITNLEDLQNIENALKGKANIIFSYVRAIGIPEHRAVMEAGFVYGTTYQFVLTTEIALLESIGSEDVEYAHLYFFHCKLVLDLTQQCRRTLMEQPLTTLNIHLFIKTMKAPLLTEVAEDPQQVSTVHLQLGLPLVFIVSQQATYEADRRTAEWVAWRLLGKAGVLLLLRDSLEVNIPQDANVVFKRAEEGVPVEFLVLHDVDLIISHVENNMHIEEIQEDEDNDMEGPDIDVQDDEVAETVFRDRKRKLPLELTVELTEETFNATVMASDSIVLFYAGWQAVSMAFLQSYIDVAVKLKGTSTMLLTRINCADWSDVCTKQNVTEFPIIKMYKKGENPVSYAGMLGTKDLLKFIQLNRISYPVNITSIQEAEEYLSGELYKDLILYSSVSVLGLFSPTMKTAKEDFSEAGNYLKGYVITGIYSEEDVLLLSTKYAASLPALLLARHTEGKIESIPLASTHAQDIVQIITDALLEMFPEITVENLPSYFRLQKPLLILFSDGTVNPQYKKAILTLVKQKYLDSFTPCWLNLKNTPVGRGILRAYFDPLPPLPLLVLVNLHSGGQVFAFPSDQAIIEENLVLWLKKLEAGLENHITILPAQEWKPPLPAYDFLSMIDAATSQRGTRKVPKCMKETDVQENDKEQHEDKSAVRKEPIETLRIKHWNRSNWFKEAEKSFRRDKELGCSKVN

SEQ ID NO: 3168 - DNA, 4779 bp, Homo sapiens
atgcagcgaaaagagaaagcaaaatgccctcaggaggctccaggcagagcccacagcctgaagggccagcgctgtcacctacctgcccgggacctgcgggcggggacctgggccgttcccgaggccgcgcggccaacagttcccgccgccacgcgacggaggaggaggcagaagacggggccgtgccagactagccgggtagcctggaaccacttcgccaacctgcaaaggcgtagcacttctccctcccagcctgcagccgccaccgactcggcggagtcggcctcctgggaaaaaacaacctgcgaagctcctccttctcctcgtgctccctacgcgaggcactctctaaccaatgggaaacgtggtgggcggagcgagagtgacagacgattacagagtcctcccgccggcgcgaacgggcggtgcagtagcagggccaatcagcagcgtgggtgggaagtacaggggcgggagaaagtagggaaattacgcgcccaatcagatctcggggccctcgagcgacgggtcctgcggcccgtggccttccgagcgcggcgctcagggggcgtgcctgcctgggccaatcggcgcgagcccacagtgcggagcgagcgcctcaaatgctcgggtttctcagctgattgtctccagccgagagttgttttttgcagctacggagccgagccgcagcaggaggagccgagacccccggggggtggggggaaagaggaggcggggtccgggggagccgcggctgctttgcgctggactccgggtcccgtcacggcgcttcctgggtccagccccttccttcccgcgctcgctcgcccggcccccagccccctcatgagggtgtccgtgccgggtccggcggccgctgccgcccccgcagccggccgcgagccctccacgcccggcgggggcagcggaggcggaggcgccgtcgctgcagcctcaggcgccgcggtgccgggctccgtgcagttggcgctgagcgtcctgcacgccctgctctacgccgcgctgttcgcctttgcctacctgcagctgtggcggctgctcctgtaccgcgagcggcggctgagttaccagagcctctgcctcttcctctgtctcctgtgggcagcgctcaggaccaccctcttctccgccgccttctcgctcagcggctccctgcccttgctccggccgcccgctcacctgcacttcttcccccactggctgctctactgcttcccctcctgtctccagttctccacgctctgtctcctcaacctctacctggcggaggttatatgtaaagtcagatgtgccactgaacttgacagacacaaaattctactgcatttgggctttataatggcaagcctgctctttttagtggtgaacttgacttgcgcaatgctagttcatggagatgtcccagaaaatcagttgaagtggactgtgtttgttcgagcattaattaatgatagcctgtttattctttgtgccatctctttagtgtgttacatatgcaaaattacaaaaatgtcatcagctaatgtctacctcgaatcaaagattacaggatctcattctttcttatggctgaatagtactccattgtgtggtatgtctctgtgccagactgtcgtcgtgggctctgtagtcattcttctgtactcttccagagcttgttataatttggtggtggtcaccatatctcaggatacattagaaagtccatttaattatggctgggataatctttcagataaggctcatgtagaagacataagtggagaagagtatatagtatttggaatggtcctctttctgtgggaacatgtgccagcatggtcggtggtactgtttttccgggcacagagattaaaccagaatttggcacctgctggcatgataaatagtcacagttatagttccagagcttactttttcgacaatccaagacgatatgatagtgatgatgacctgccaagactgggaagttcaagagaaggaagtttaccaaattcgcaaagtttgggctggtatggcaccatgactgggtgtggcagcagcagttacacagtcactccccacctgaatggacctatgacagatactgctcctttgctctttacttgtagtaatttagatttgaacaatcatcatagcttatatgtgacaccacaaaactgacagcatcaccaagtcatgattcttgagttgtttttcataaatgtgtatattcaatgtgtttaaattccatctacataaacattccattatctgttgcaactgaaaacaaaatctggaagtgtggctgtgtttggtaaataacacagctattatttttgacctcttcatagtaaaatgaagtaaaatggaaagtttggagtaggagaaaagagagattagatcttaaggcacttgatggcctccaaaaatcctgactttggaacatcaaatgcatatgtgcacttttatctttgttctgagtcactgcagtccccaaagtcatatgccaatgttcacactgaaatactgtattgtacaccaaactggaaggcaattttcctatgaaaatcaaagccggtatattcattggtatgctctatacagatatcttaataaaaattttatagtgtgaacagtgcacagagttaaggcataaaaatgtatcattctttataaaaatctactgaaaatgtgtaatcattgaagacagttcttttaagcatgattttaaaatagcaactgaaattcaatcattttaaacaaatgatggtagtaatccattagttatggccagcagtgttctttggagagccacaataatttcaagaggaaaatataccagtgaaaattgtgtggctattttgagtagaattggtcagttgattattttgtgtaattgagatatatgtagtagtttaagcatgattcttgaagaaagcaatagtgacttttgcatagggagattttggtagaaacttcttgggactaaacaagtttagagatgcatttaagaattattcacaaaatgtgtaattctaaattaaaacataaatatattttcaaaagcatttgatttctctgaagcatgatatagctggtcttacctagtgaatcaggattgtcctcaggtaaatgaaatcatgatacattattgcagtgaactcaagtgcaatactttgtaagacatataattcctatgattttcacatttttatatcttatatatgggaaaagccaaattaaattgaattcagattaattccagcattagactaaatgagcaaacttaagtaaatgtacaaactaggtaagtataaaaccacaggttaacaatattggagtacttttagaattacattaaaactgtcttaaatgtcctatcccaaatctaaaaaaaaagaaaatggcaggctgagataatacagaattttaaaatgcactttgtaccagtgtctatatggaaagaagtagatgctgaatacctcaagatgccaagggaacaagcaacattgggaagttgtcacaacatgctcaaagacaaactacaattgtctgctagctatttcttcagaactggaactaatacgactatccttttctgttttatactttgattagaatgttatttcctcgcttacttaaaatgtacttcaactttttaacaactgatacaataacttcataaaagtataacactaggttgaaaccttaaggaaaaattgaaattgttaatgctttcgatcttttgggaggccagtacacagacaaataaatttcttctttttatgatacaaaatgactttgtattcaatcagaagcatatacttatgttattttgggtttgtttataattctctcattgtaaccaaattattttaaaatgtatagtataaaaagttacccgtggtattaagtgacaaaagcgtacttttattacaactccagttgttagattgcttctcagaatgctaactgtttattttgctaataatgttaggcatctaatcatctagagctgtccaaaaagatatgttgtctttgttaatccttggggttcaaggtgataaagtttttctagtaaggctcccctcgataatgttcctatttgaccaaactaacaaagattactttttaaaaatttttcagataaaataacttggttctttctgctgcattagttgattgttccaaatttgaggtttgtaagtttattcttatcactgactagggtacccaaattcttgcatttgtctccttatacacatctaacatatcaccaaagacaaataaagatacactctggcccaatctttgcttaaaaattccaaagcactaggagcactttaagtttggtctcgaaaggagttgtttataaaatcaaagggctaccgattccctgttcatcctgcactgaagcacatgatgacagtatcaaaccttcatttttgttcattaaaaagtgaatttcattacttaagtgtgtaattctatagtgattagcagtatttgttttcatcatttcacttgggtggccattaattttgaaacctttaccactcattgtagttggttgtagttttatggaaaatgtaatttatagctaaagtggcttttttatgcatagctgccttttttattgtttaacagtgtttctcagctatataatcagtttcaaactggttgtaaaagtatagctgtggccaatgaatgtatttatttgttgtttcactaaattgtaacaaaacactactattaaaaataaaagtgtttgtg

SEQ ID NO: 3169 - protein, 728 aa, Homo sapiens
MQRKEKAKCPQEAPGRAHSLKGQRCHLPARDLRAGTWAVPEAARPTVPAATRRRRRQKTGPCQTSRVAWNHFANLQRRSTSPSQPAAATDSAESASWEKTTCEAPPSPRAPYARHSLTNGKRGGRSESDRRLQSPPAGANGRCSSRANQQRGWEVQGREKVGKLRAQSDLGALERRVLRPVAFRARRSGGVPAWANRREPTVRSERLKCSGFSADCLQPRVVFCSYGAEPQQEEPRPPGGGGKEEAGSGGAAAALRWTPGPVTALPGSSPFLPALARPAPSPLMRVSVPGPAAAAAPAAGREPSTPGGGSGGGGAVAAASGAAVPGSVQLALSVLHALLYAALFAFAYLQLWRLLLYRERRLSYQSLCLFLCLLWAALRTTLFSAAFSLSGSLPLLRPPAHLHFFPHWLLYCFPSCLQFSTLCLLNLYLAEVICKVRCATELDRHKILLHLGFIMASLLFLVVNLTCAMLVHGDVPENQLKWTVFVRALINDSLFILCAISLVCYICKITKMSSANVYLESKITGSHSFLWLNSTPLCGMSLCQTVVVGSVVILLYSSRACYNLVVVTISQDTLESPFNYGWDNLSDKAHVEDISGEEYIVFGMVLFLWEHVPAWSVVLFFRAQRLNQNLAPAGMINSHSYSSRAYFFDNPRRYDSDDDLPRLGSSREGSLPNSQSLGWYGTMTGCGSSSYTVTPHLNGPMTDTAPLLFTCSNLDLNNHHSLYVTPQN

SEQ ID NO: 3170 - DNA, 3334 bp, Homo sapiens
gcacgagccccgggctgccggcgcgggcgccgcggcacgtccacaggctgggtcgcgaggtggcgatcgctgagaggcaggagggccgaggcgggcctgggaggcggcccggaggtggggcgccgctggggccggcccgcacgggcttcatctgagggcgcacggcccgcgaccgagcgtgcggactggcctcccaagcgtggggcgacaagctgccggagctgcaatgggccgcggctggggattcttgtttggcctcctgggcgccgtgtggctgctcagctcgggccacggagaggagcagcccccggagacagcggcacagaggtgcttctgccaggttagtggttacttggatgattgtacctgtgatgttgaaaccattgatagatttaataactacaggcttttcccaagactacaaaaacttcttgaaagtgactactttaggtattacaaggtaaacctgaagaggccgtgtcctttctggaatgacatcagccagtgtggaagaagggactgtgctgtcaaaccatgtcaatctgatgaagttcctgatggaattaaatctgcgagctacaagtattctgaagaagccaataatctcattgaagaatgtgaacaagctgaacgacttggagcagtggatgaatctctgagtgaggaaacacagaaggctgttcttcagtggaccaagcatgatgattcttcagataacttctgtgaagctgatgacattcagtcccctgaagctgaatatgtagatttgcttcttaatcctgagcgctacactggttacaagggaccagatgcttggaaaatatggaatgtcatctacgaagaaaactgttttaagccacagacaattaaaagacctttaaatcctttggcttctggtcaagggacaagtgaagagaacactttttacagttggctagaaggtctctgtgtagaaaaaagagcattctacagacttatatctggcctacatgcaagcattaatgtgcatttgagtgcaagatatcttttacaagagacctggttagaaaagaaatggggacacaacattacagaatttcaacagcgatttgatggaattttgactgaaggagaaggtccaagaaggcttaagaacttgtattttctctacttaatagaactaagggctttatccaaagtgttaccattcttcgagcgcccagattttcaactctttactggaaataaaattcaggatgaggaaaacaaaatgttacttctggaaatacttcatgaaatcaagtcatttcctttgcattttgatgagaattcattttttgctggggataaaaaagaagcacacaaactaaaggaggactttcgactgcattttagaaatatttcaagaattatggattgtgttggttgttttaaatgtcgtctgtggggaaagcttcagactcagggtttgggcactgctctgaagatcttattttctgagaaattgatagcaaatatgccagaaagtggacctagttatgaattccatctaaccagacaagaaatagtatcattattcaacgcatttggaagaatttctacaagtgtgaaagaattagaaaacttcaggaacttgttacagaatattcattaaagaaaacaagctgatatgtgcctgtttctggacaatggaggcgaaagagtggaatttcattcaaaggcataatagcaatgacagtcttaagccaaacattttatataaagttgcttttgtaaaggagaattatattgttttaagtaaacacatttttaaaaattgtgttaagtctatgtataatactactgtgagtaaaagtaatactttaataatgtggtacaaattttaaagtttaatattgaataaaaggaggattatcaaattcatatatgataaaagtgaatgttctaagtctctcaaactagcgttttatgtaataatatgtaatataaataaaactatggtaaatgtgacaagcatttaataggaaaatgctaaggaggcctcataaatgacccataattaccaacgtagaatttttcagtacatttagggttgctggatttagcaaataaaaataaagattgcccagttagatttgaatttcagataaacaattagttttttaatattttacatggaatatttggaaaatacttatactaaaaaattatttgtttgaaattcacatttaactgggagtcttgtattttatctggcaatcctaaaatacattggtatgaaacaaatcacttttagaagtatattgctattttgattgggttgtttttgtgtgtagaaacgtacaataacaactcaaaggcacaggagatttctaaacattgtgaaaagttgaatagattatatatttattctcataatactttcactaatactaaataaaatttggggaacactttttatttttatataatttccaatttacagaaaagtttcaaaaatagtacaaagagctctcttacccagattcactaattgttcatacgtgctttatctttcatgctttctctgtacacacacacacacacacaaatttttcctcaatcatttgaaagtcagttataggcatcatgccccttaaaccctaaatacttcagtgtgtaatactgaataattactaaaaatgattttctcagaaaaaaaaactcccacaattctggaactataatactgtaagccttagaataaataatactttcaagttccaatctaaagttctttttgagttttgttgcccgttttatgcttgatgtgtatagtaatagggtaggctatttattttattaaaattttttttagagacaaggttttgctgtgttgcccaagctggaacttgaacgactgggctgaagtgatcttcccacctcagcctcccaagtagctgggaatacaggtgtctgccaccatacccagtttcatttttgttttttatacccgaagttcatttcctttgtctccctaaaactgaactgtaattttgggaggttttcattagtggaagctcttcatttataaagctatttgaaggggtttaggaatttatatcacatggtaattgtagagaaaaagaagctatatacctcaaaatcgtgccctctttacatatgtcttatcaggtataacatgttgaaatgtcacattagtagtaaagtggggtttatttatatagtggttaagaaatgtcagtttacactgctgtatacttcttcttctgtgtccctaaggcctggtacagtgccaagcacatacttggtatccaataaatatttgttggatgaaaaaaaaaaaaaaaaaaaa

SEQ ID NO: 3171 - protein, 468 aa, Homo sapiens
MGRGWGFLFGLLGAVWLLSSGHGEEQPPETAAQRCFCQVSGYLDDCTCDVETIDRFNNYRLFPRLQKLLESDYFRYYKVNLKRPCPFWNDISQCGRRDCAVKPCQSDEVPDGIKSASYKYSEEANNLIEECEQAERLGAVDESLSEETQKAVLQWTKHDDSSDNFCEADDIQSPEAEYVDLLLNPERYTGYKGPDAWKIWNVIYEENCFKPQTIKRPLNPLASGQGTSEENTFYSWLEGLCVEKRAFYRLISGLHASINVHLSARYLLQETWLEKKWGHNITEFQQRFDGILTEGEGPRRLKNLYFLYLIELRALSKVLPFFERPDFQLFTGNKIQDEENKMLLLEILHEIKSFPLHFDENSFFAGDKKEAHKLKEDFRLHFRNISRIMDCVGCFKCRLWGKLQTQGLGTALKILFSEKLIANMPESGPSYEFHLTRQEIVSLFNAFGRISTSVKELENFRNLLQNIH

SEQ ID NO: 3172 - DNA, 1907 bp, Homo sapiens
ataagggaaaaaaactccattaaaaagcccagctttcctccatgttagatgtgacttggaaaatgagaaagatttagcaaaattccaccgtgtcttttgccaggctagagacagggagagcagagtaaaaccctcaggctgctgaaatttctaggctgttaggaagcccctcgaattctgtgaaaatgagggtttcttaactcacactgagagcggaaaggggcagacccttttcataactccctcaagtgtgtgttacctttctttaccagcatggtaagcaacaggacatatcccagcctcggacatgtctgtatgatccaaggtacccaaagtcagacagagtaaactcaagcctggcactggctttctgccgcttcatgtgctttggaaaaagcaggagaagcaatagcagcaggagtccccagcagctggagccgcaagaatgaactgcaaagagggaactgacagcagctgcggctgcaggggcaacgacgagaagaagatgttgaagtgtgtggtggtgggggacggtgccgtggggaaaacctgcctgctgatgagctacgccaacgacgccttcccagaggaatacgtgcccactgtgtttgaccactatgcagttactgtgactgtgggaggcaagcaacacttgctcggactgtatgacaccgcgggacaggaggactacaaccagctgaggccactctcctaccccaacacggatgtgtttttgatctgcttctctgtcgtaaaccctgcctcttaccacaatgtccaggaggaatgggtccccgagctcaaggactgcatgcctcacgtgccttatgtcctcatagggacccagattgatctccgtgatgacccaaaaaccttggcccgtttgctgtatatgaaagagaaacctctcacttacgagcatggtgtgaagctcgcaaaagcgatcggagcacagtgctacttggaatgttcagctctgactcagaaaggtctcaaagcggtttttgatgaagcaatcctcaccattttccaccccaagaaaaagaagaaacgctgttctgagggtcacagctgctgttcaattatctgaggttgtctgggacctgcctccaccccatccagggatgagaatggcagccaatctctgtggccaagctccagccaaaaaggagggcacgaccagaaaggaactccctttgcacggaggcttgccccatcaccctctgagccctcccaacacagcacactagtcagcccactgccacgacctccctgccagccagaagcatccgtactgcacgctgtctgagaatgctgggcctggattgcagacagtgccgctgctgatcgcatcaaaaacaaagtcaaaggccatctcacattttacaaatccccagctcatgaacgtgaagctgataggaaatcaccccagggaacccgaaaaagaaacttgattcctctattgctggccttacttgatgtcttttataaaacttgggactacaatactaacctttttttctgaatctgctgttctacccatgtgtctcacattcatttgtattatttcaagaaatgtactaatttccagttcactcaggccttactaatccataccaaattagcctaaagacaaggcattttatattcatttctattttcagcatgtttctaccaaagctattagaaccaacacgtacctctgaatgcccgattataagaagacatgagaagactttaaaagttttggaaatttacagagccatgatttttgaacctaattgaaagaaaaccatctgaattgttgcaggtccacatttttgccaaagatacactctatagatgcttagtagtggcctgatttttttccatgtattgccacgacaaactaaaaatgaactgtgttt

SEQ ID NO: 3173 - protein, 214 aa, Homo sapiens
MNCKEGTDSSCGCRGNDEKKMLKCVVVGDGAVGKTCLLMSYANDAFPEEYVPTVFDHYAVTVTVGGKQHLLGLYDTAGQEDYNQLRPLSYPNTDVFLICFSVVNPASYHNVQEEWVPELKDCMPHVPYVLIGTQIDLRDDPKTLARLLYMKEKPLTYEHGVKLAKAIGAQCYLECSALTQKGLKAVFDEAILTIFHPKKKKKRCSEGHSCCSII

SEQ ID NO: 3174 - DNA, 392 bp, Homo sapiens
atgaagctggcattcctcttccttggccccatggccctcctccttctggctggctatggctgtgtcctcggtgcctccagtgggaacctgcgcacctttgtgggctgtgccgtgagggagtttactttcctggccaagaagccaggctgcaggggcttcggatcaccacggatgcctgctggggtcgctgtgagacctggcagaaacccattctggaacccccctatattgaagcccatcatcgagtctgtacctacaacgagaccaaacaggtgactgtcaagctgcccaactgtgccccgggagtcgaccccttctacacctatcccgtggccatccgctgtgactgcggagcctgctccactgccaccacggagtgtgagaccatctga

SEQ ID NO: 3175 - protein, 91 aa, Homo sapiens
MKLAFLFLGPMALLLLAGYGCVLGASSGNLRTFVGCAVREFTFLAKKPGCRGFGSPRMPAGVAVRPGRNPFWNPPILKPIIESVPTTRPNR

SEQ ID NO: 3176 - DNA, 3366 bp, Homo sapiens
ggttgcgcgtgtgccatggactcagccgcccggtgatattgacaataggagagagaaaggggcattgactgggacccaccgcgggtagcgaaaggtggctctggcagcggcggctccagctcctgcggctcctcctccttattctgtccccttctcttgctgccgctgcagatccagtcttcctccctcccttccccccctccccacgtcgtcgccgccgccgccgggtccggggcaacgagctgaggcgccgcccgccaggaatgtgagcgaggagccaccggcggagccgcaacggggtcggtgccgatttgatgggacgggcccgcgggggaggatcgtgaggccgccgccgccaccggaacgctgaggttcgggtccggccgtgaggcctagaggctccgccgccgcggaaccggagggaccccgtaccggacagccgtcgccccaggctccccgcagctgcccggacctccccctgcacgtcccggtcccgccgcccgcccccgctgcggccacctcgcccgtctcccgcccctccaagccacagatcatctttggattcttccccagaagcttcaagtagggatatgtcctcagcaccaactactcctccatcagtggataaagtagacggattttctcggaagtccgtcagaaaagccagacagaagaggtcgcaaagttcctcacagtttaggtctcaaggcaagcctattgagttaacacctctgccgctgctaaaagacgttccatcctcagagcagcctgaactgttcctaaagaaacttcagcagtgctgtgtcatttttgacttcatggacacgctatctgatcttaaaatgaaagaatacaagcgctccactcttaatgaactggtggactacattacaataagcagaggctgtttgacagagcagacttaccctgaagtagttagaatggtatcttgcaatatattcagaactctccctcctagtgacagcaatgaatttgatccagaagaagatgaacctacccttgaggcatcgtggccacacttacagcttgtatatgaatttttcatacgatttttggaaagccaagaattccaacccagcattgccaaaaaatatatagatcagaaatttgtattacagcttctggagctatttgacagcgaagaccctcgggaacgggactacttaaaaacagtcttacacagaatttatggcaagtttcttggtcttagagcatttatccgaaaacagattaacaatatttttctaaggtttgtttatgaaacagaacacttcaatggtgtagctgaactgctggaaatattaggaagtattatcaatggctttgctttacctcttaaggcagaacacaaacagtttctggtgaaagtattgatccctttacacactgtcaggagcttatcactcttccatgcacagctggcatattgtatagtacagtttctggagaaagatccttcactcacagaaccagttattagggggttaatgaaattttggcctaaaacatgtagtcaaaaagaggtcatgttccttggggaactggaagaaatattggatgtgattgaaccttcacaatttgttaaaatccaagaacctttgtttaaacaaatcgccaagtgtgtatctagcccccattttcaggtggcagaaagagcactctattattggaataatgaatacatcatgagtttgatagaagaaaactctaacgtcatccttcccatcatgttttccagcctttataggatttcaaaagaacattggaatccggctattgtggcgttggtgtacaatgtgttgaaggcatttatggaaatgaacagcaccatgtttgacgagctgacagccacatacaagtcagatcgtcagcgtgagaaaaagaaagaaaaggagcgtgaagaattgtggaaaaaattggaggatctggagttaaagagaggtcttagacgtgatggaataattccaacttaacaaaaacaatgacaacaacattactaacctgtggagtcacacgtttatgtagtagaagatggagcaacagttttctgtattgtgcaactttacagtagatttcacctttgtttcattattacagcagcactgtatatacctgtctctaagtaaaggaaaaaacaaaataaggacttcaatccaaagtttggacagtagatggacttctcagaactttgcaaacataatcattgttctcaccctcttttaaaaaaaaaaatcggtcttcaaagatctgttgatgaaattgctatgttaaaattccattatcgggagttccttatttatcactagcagagagtatgatacaattttcaaatgtgaacaatcttaaatttagcttgtctttctgctaagctgttaaatgtatttatagtaaaggaagaaaaaaagactgtcatttccttataagtttgtgtaacatcctcctctggataacttgactgtaatttaacatctttttcttttgcacatcttcctgagttgaatgtccacgtggaatggggtcatgaattataaaagtccctgataaaagttttgtttactggggtgaacatctttccagtaaccaggtagtcctggtactcctttagttttaaaattaggagttaagagagaagaggtgataaacatagtagggaagggaatatcggattcatgcatcagtttatggtgaatccaaatcaatgtcttgaatcctttgaaaacaggcactgggacatcacaggcttcagtacctgaccagtattagttgcatatatcattgaacacacataccagagatgttttagaaatgtgagaaaaacatccttttggaccatttgaaataagaaagacaaacactaaacaatacaaccatgaaattgatcaccgggattgcaaatctaattgggaaaagagttgagcaaacagcttggactgtttggagttgttgccttactttttaatatgtatttataaagtattccagcaaaagaggatgtagcctctgggaaaaaacaaacatgttacagtgttttttgtagattctcgttctatatctcatcacagcgccagccctgtttttagccggaaaggattcaggataaacattattatgcattctgaattggatgcatattcctaactactgtatttgttaccaaaagtggttctacaaatgctactgaaaaaaatctggaaattcctaatgtcctgagtattaataataaagtttaaaaatgcttttatatcaaaggtgcatcgtgaccaaattgtttaagaaaaaaaaacaaaaaaaacaaaatctagggctgtattttatatatatatatatatatatatatatatatat

SEQ ID NO: 3177 - protein, 467 aa, Homo sapiens
MSSAPTTPPSVDKVDGFSRKSVRKARQKRSQSSSQFRSQGKPIELTPLPLLKDVPSSEQPELFLKKLQQCCVIFDFMDTLSDLKMKEYKRSTLNELVDYITISRGCLTEQTYPEVVRMVSCNIFRTLPPSDSNEFDPEEDEPTLEASWPHLQLVYEFFIRFLESQEFQPSIAKKYIDQKFVLQLLELFDSEDPRERDYLKTVLHRIYGKFLGLRAFIRKQINNIFLRFVYETEHFNGVAELLEILGSIINGFALPLKAEHKQFLVKVLIPLHTVRSLSLFHAQLAYCIVQFLEKDPSLTEPVIRGLMKFWPKTCSQKEVMFLGELEEILDVIEPSQFVKIQEPLFKQIAKCVSSPHFQVAERALYYWNNEYIMSLIEENSNVILPIMFSSLYRISKEHWNPAIVALVYNVLKAFMEMNSTMFDELTATYKSDRQREKKKEKEREELWKKLEDLELKRGLRRDGIIPT
